United States Patent Application Publication US 2024/0301345 A1 - sequence listing, part 3

SEQ ID NO: 209 - DNA, 12460 bp, Unknown
  R101_18m  MAG No. k141_20409
ctgacccatgcgctgccgttcctgccgctcgcgcaaggtgacatcgactatcaggtggaccggcgcggtgaacccggtctgatcgacgagctgttggccgagccgaccaccaaagtcgtgcttacgcgcggcggacttgtcgccgtaccgcgcggccaaggcgagctcgtggactatgagaacgtgaaaatgcggctcgccacgttgccgggcgcctatgtgtccgccgaactggcacgctaccccgaagcggtcgccatgttcctcggctcctatgtcggggcgcgcggcgaatccgtggtcgccgtggatatcacgcgcgtgccggaagccggtgttcccggtgttggcgggattgctggtgtttccggtgctgccggcggcgtgctcggcacccaggattccggcaccgtggacggtgcgctgggcaagaacggcatcagcggaggtgctgccgccggaatacggcagccgggaaacgccaagggcaatggcggcgtagccgcagccaaaatcgccgggccgctcggtgtaccggattcagccggacaaggtgcggacgatgccttcgatgattcggtcggcgcgcccgtacagcccttggccccgaagcccacgctgctgcaacaggccgtgacccggttcgactgggtggacctgcgcggattcgcccctcacgccaacgcgcgcgaggctgggcaagccaccagtgccatcaccttaagcatctggcacagccgccagcggttctgccccacctgtggcgcggcggtccggccggcgctcgccggatgggcgcagcgatgcaccaacgaggcggacggcaaccgtgtgctgttcccacgcgtggagccggcggtcatcaccgccatcgtggacgggcacgaccgtctgctgctgcaacacaacgcggcatggaaggattcgaggctgtattcggtgtccgccggatttgtggaggcgggggagaaccttgaacacgcctgccgccgcgaggccatggaagagaccggcatcaagctcggcgaggtacggtacctgggctcgcagccgtggccgttcccggcttcgctgatgatggcgttcaaggcacatgcgatcaccaccgacgtgcatgtggacggcgaggagaccatgaccgcgcgatgggtcacacgcgacgaatacacggccgagctcatcgccggccgtatggcggcgccgggccgcgccaccatcgcccgctacatgattgaggaatggctcggtcgcgagctgtgacggaccgcgaagataggttaggcttatgactatgagtgatgacaacgaaaacgaacagccgctgaacctcgacattcccgaccacctcgaatactccgaggagcatgcttgggtggaccgttcggtcgaccccgcaatcatcggcataaccgaatacgccgccgaccagcttggcgaacttgtgttcgtggatttgcctgagcctggcgcccgtgtggaggccggcgacgagatcgtggagcttgaatcctccaaggccgtccagccgttgatcagccccgtggcgggtacggtcaagtatgtgaaccgtgacgtggcggacgacccgtccgtggtcaacggcgatccgtacggcgaaggctggctgctgaaggtcgagcttgacgacgatgagccggagctgctgagcgccgacgaatacgcgaaggtcgtgcggtagttccacccatagctcccctccctgaggggagccagtatgtggcatcaaacctatatgcatcgtgcctcttatggagggaagccaagaaaatgaggcgtatggcctatattggtgtctatgagaagcccacgcgaggattttgaggcggcaggcaagcgactgccttgggatgctgctgctcgcaatgcagcgctgtccgccaccgcgccagtctctgacgtcaaggcatccgccaatggtgctgacaatgccagcaatgctgaacattccgatgacatgcccaccgtgccgattcccgcacgcaaggctgccacgacgttcgacaccccctccaagcgtgagcgcatcgaggtcaagccgccgatcacccgattcatacgtcgtgccatcacccgcgtgttcggcgtatggtcacacatctccactcaggtggtgcgccaatggggctggtatccgcgagtggaaccctatgtgggttatggcaccggcgattactcgcgcctgatctgccgcacggtatacgcccccaagcatgcgcaatccggcgaactgatccgcggcatccgcggcatgcttgccgtatccgcgccgcgcacccacgtgcaggccagcattgatgacacgccgctcaacaccgtgcagatcggcgtctccgaggtctatgacaaggtggaccgcacgcgcgatctcggcagcgaatacgccatctccgattccgccggatacctcgacctcgtggccgagcatcgtctggtgcccggtatccatcgcgtctcctacagcgtggccaaccgcaaacccgtgagcgccaacctgtacaccatccccgccagtgccaaagtcggcatcatctccgatgtggacgacaccatcatgatcacacaggccccggtgccatggaaggccgcgtacaacctgctgttcctcgaccccaagaagaaagcctccgtgccgggcatgagcgtgctgttcacccgcatcgccgacttgttccccggcgcaccgttcttctatctttcgacatcgccctggaatgtggagagttcgattcgcaacttcatcactgaccatggttttcccgaaggcccgctgctgctgcgcgacctcgacccgaggcccaagaccttcgtgcccaccggcccccagcacaaacttgagtttgccgaacaacttatggccgacttcccggacatgaagttcattctggtgggcgatgacgggcagaaggacccgaccacgtacgccaccatcgcccgcagatatcccggacgtgtactggcgatcgtcattcgtgagttgagcccgcgcgaatcaaccggattggcgtcggtgacgggactcacctcgacccagccgactccggtaaccgatgtaccagtattcaccggcaccaccggctcgaacattctgaagaccatgctgccgtatctgaagacggtgttgcgataggcgcggcgtgatgaacactgaatgcgtcccggtgcggtgcctcgcctataatcgcgtggtatgactgacgagagcacaaacgccgcggccgcgatgccgccttacgccaagcgcgagccgaagcgccgcgaattccacggtgacgttttcgacgacgattacgagtggatgcgagacaaagactccgatgatgtgcgcagctacgtagctgccgaaaaccagtactgcgagcgtcgcatggcgcatctggcggatttccggcatacgttgtttgaagagctgaaatcgcatgtggaagagaccgatatgtcggttcccacgcgcgtcaatgattactggtacttcacccgcacgcagcagggcaaacagtatggcgtgcaatgccgcatccccgtgcgcgatgccgatgactgggacccgccggtcgtggatccgcaaggcgcgcccggctccatgcccggtgaacaggtcgtttttgatgcgaacaaggaatccgaggggcatgacttcttccggctcggcggcttggacctgagcaaggacggccgttggatgctgtacggcgtggatgttgcgggagacgaacgatatgatttccgcatccgcgaccttgccgggctggagaccggggagccggtcagcgaactgcccgaacagttcaccggcattggcagcgcatgcttcacgccggacggccaatgggtgttctgggtggaattggacgattcctggcggccgctcgccgtgtggcggcatcgtgttggcacggcggtcgaatcggatgtgtgcgtgtaccgagaaaccgatgaacggttctgggtgggcgttggcatcagttttgatgagcgcaatatcgtgatcggcaccggttccaaaaccaccaccgaagtgctgatgctgccggtggccacgcctgaaggcgaattccaagccttcattccacgacagaacgatattgaatatgatgtgagctttgcctgttttgaaggcgcgggggagaacggtgcggatgtgccactcgccgtggtctatcacaacgccgccaatccgaatttcgaaatcgacgtcattgacatgcgtggccatgagccgccgtaccaactcggcgaaggcgtgtgcattgccgccgggtcgccgtacggctgtgaacatggtgagccggataagccgattaccgaggcatacttcaacgccgccaatccggcgatattgcagggtgcccacggtctgggcatcgaaggcatcgcgttgcatcgcaactttgtgtccctgagctaccgtgccgacggccagccgcacgtggcatacatgaccaagagcgcggctgccgccgacttcctggccggacggccgtggcggtttacggaactgctgccgcctgccctggaggacgactgggacatggttgccgccgatcgcgaaggcttcaccggcgatcatggcgaaatcttgtggaccgaagatgaggcccccacggatcacacgtcatcttccgatggtgccagcgacgaccacctgcccggtgagacccggcgcttgtacaccatcggcgtcggcggcaacccatcgtatgaggcgccgcgcatgcgctactcgttcgccagctacacccgcccgggcgagctgcacgaaatcgatcccgccaccggcgaagatgcgctgctgaaacgagccaccgtgctgggcgacttcaatccacgcgattacatggaacgccgtgtgtggattaccgcgcgcgacggcgaacgcattcctgtttccctcgtctggcaccgcgattgcccggcgcaggattcgccgatgttcattaccggatatggtgcatacgagatttcctccgatccggggttctcggtctctcgtctgagcatgttggatcgcggtgtgctgtacgccgtgccgcatattcgtggcggcggcgaaatgggacgtgcctggtatgaacaggggcgcagactgaacaagaagcattcctttgaggacttcgtggacgccacacgcgcgctgcagaaggcgcatttggctgatgcttggcgcaccgtggccaacggcggatccgctggcggcctgctgatgggcgcgattgccaatatggcgcccgaatgctacgccggtgttgaggcggatgtgccgttcgtggacgcgttgacctccattcttgacccggacttgccgttgaccgtcaccgaatgggacgaatggggagacccgttgcatgaccctgaggtgtatcagtacatgaagtcgtacacgccatacgagaatgtgccggtcaccgtgctcgagggcggcgacgacgaggctgccggtgacggcagtgctgatggggctgccgccggcgcgctcgccgccgcgcaattcccgagaatcttcattaccacctcgatgaacgacacccgcgtgctgtacgtcgagccgctcaaatggctggcccgcctgcagtccgccggcgtggacgcggtggccaagattgaggtcgaggccggtcacggcggtctatccgggcgttacaagcaatgggaagaggtttcctatgagaacgcttggtgcatggatgtgatggggctcgctcattaggtcattctgtcgttcattaggtcggtgtcctcttctatgtgagactgaaatgccgccatttcagtccctgaaatgaacccacaccgacctaatgaacactaaaatgacctaatgaatgtctcgacacgatacgcatgttggttgtgtccactagctgagcgggttcgggccggcagatggtcgcgcgagtaggctccttgaactatggcaaagacatataaaatcgccgttattcccggcgacggtattggcaaggaagtcactccgtgggctcagaaagctttggaaaaggccgctgaaggcgtagctgacttcgagtacgagaacttcgacttgggtgccgagcgctatctgcgcgatggtgcgattctgcccgaggacgaagaggggcgcatcaaggccaacgacgcgattctgctcggtgccgtgggcgatccgcgcatcaaggccggcattctggaacgcggcctgctgctgaagctgcgcttcgacctcgaccagtacgtgaacctgcgcccctccaagctgtacaagggcgtcacctcgccgctcgccaaccccggcgacatcgacttcgtggtggtgcgtgaaggcaccgaaggtctgtactgcggcgccggcggcgcggtgcgccgcaacaccccgcaggaggtggccaccgaggtgtccatcaacaccgcatacggtgtggagcgtgtggtgcgttacgccttcaagcttgctatgaagcgcaagaagcacgtcaccctggtgcacaagaagaacgtgctcgtcaacgccggtgatatgtggcaacgcatcgtcgacaaggtcggcgaggaataccctgaggtcacccacgactaccagcacatcgatgcggccaccatcttcctggtctccgacccgagccgtttcgatgtgattctcaccgacaacctctttggcgacattctgaccgatgaggccggctccgtggtgggcggcgtgggctactccgcctccggctgcatcaacgcctccgacgagttcccgtccatgttcgagccgattcacggttccgctccggacatcgccggtcagaacaaggccaacccgaccgccgccatcctctccgccgccatgctgctcgagcatctcggctttgatgatgcggccaagaagatccataccgccgtcgaagcggacatcgaggagctcggctccaccgtgcgctccaccgaccaggtcggcaaggacattctggcccgcatgtgatgtcccacttggctcccctccagaggggagccaagtttatactgagttgcatgcaaatacgacatggggaatgcaaaaccgttggcggcaaactagtcgccgtgaccgtatccgtcgatgatgacggcaccgcacagccatgccatatcagtggtgatttctttattgaatcagtttcggatgccgaatctcatgctttgttgcatgacctggaacaagctctaattagcgatgattcattgcggtccgtattggacgctcatccaagttgccgaattatcggcaccgatgaagttgccatcaaaaccgcatacagccgagccgtaggcagcaacttgcccccgctggtgggggctcccgcgcagcgggtgggggtggtcagccccgatgcgccgaacatcccagcatccatcaatacacaaaccaaacagtccgacaaaagctctgaataccgggagcgttggaacgccctcaagcctcaactcaccgtgatccacgaccatccgcgtactccggacgagcaaatggccattgacgagacctgggcgcgtgaagtcgcagcaggaacacgacagccgaccatccgattatgggagtgggtgggcccggctgtggtcatcggccgtttccaatcggcccaggacgaggtgaatctggacattgccaagcagctcggcttcgacgtggtgcgccgttgcacgggtggcggagcgatgtttatcgaaccgggcaacaccattacctattctctgtatgcaccgctcgatttcgttcagggcgtaagcatcgaagaatcctaccggctctgtgactggtggctggtcgaagcactgcgcgaacttggtttggatgtgcggttcacgggcctcaatgatatcgcctcgcagtacggcaagatcgggggagcggcgcagcggcgcttccccgtaggctcaggcggcgcggtgctgcaccatgtgaccatggcatatgacatcgatgcggccaagatgagccgtgtgctcaacaccagtcgcgagaagatgtcagacaaagcggtgaaatcagcagtcaaacgcgtggacccgatgaaaagccagacgggtctcagccgcgaacacatcgtcgaacaccttattgactggtttgcggcgtgatttcaccgatggccgtatacgattttgccggtggccgtgcgtggttttgtcatgggcgagcgcggtaaccgcgacagtgccgtttttcgcggtaacacattcgtcagcatgtcgtacggctatcggatcgcaccacacatgaagtgacgaatgatggcatgcttctgacgaaacctgtggggcgcgttacaatatgacggatggccgacgacggtcgtaggacaataaggatggtgcgatgagcttggaaacgccaaacgcttttgctgacgaggagaacatcctgctgcatacggcattgttcaagcaggtatcgccagccgaagccgaggagctgctgccgcatttgaagcgtgcgaccttcgataagggcgactatatcttctccgaaggcgataccgatcagcgcatgtatctactggagcaggggcgcgtcaagctgattcgcacttcttccgatgaccgcgtgcagctgctgtccatccacgcgccaggcgaagtgcttggcgagattccggtattcgaccctcatggtggcccgcgcaccgcgtccgcggtgtccatgagccatggcacgcgcgtggtctggctggagcatgatgccctgttcgcatggcttgatgagcatccgcgtgtggccatcgacatgttgcaggtcatggccaaccgccagcgcggcaacaacgaacgcatctccgacttggtattcatggatgtgccggcgcgtctggccaagacattgctcaacttgggctcacgtttcggcgagccggtggaacagggcctcaaagtgccgcatgacctgactcaggaagagctggcccaactggtgggctccagtcgtgagaccgtgaacaaggcgttgatggacttttccaaccgcggatggatcgcacgtgacggtcgatcgatcatcatcttccagccaggcatgctgattcgacgctcgcggcgctgaccgttcggctgacttccagccaatgttacgctagtgcggttcttgtgatgatatgttcacgggagctgaccgcgagcccggttggtagggcaccccatttagaatggggctcatgcccaaaaagaagtccctcactctccaacgtgtgcttgttctcctcttggcctatatcatgcttgccgtctgcggtggcgtggcggccagcgtgttgtttgtaccgggtgtggtcggtgccaataaagccgccaaagcggtgattccgtcgctcaaggtagaaaacgtggacttcgacgtgaccggtctgccccagaagtcgacgatgtacgcgcgagacggttccaccgttatcgcgacgttctacaaccaaaaccgtatcgtcgtgccgctgaagaagatttccaaaaccatgcagcaggcagtggtggcgcgcgaggaccgtcgattctggactcacgccggcgtcgacgtgcaaggcgtgatgcgtgcgttcgtgcagacctacctcgtcaaaggctcccagcagggtggttcgtcgctgacccagcagtacgtcaagaacgtgctgctcatgcaggcgatcgaggacgacgacccgatcgcccagtaccatgccaccgaagacaccgtcgcccgtaagattcgcgagatgctgatctccgtgcagatggagaagaagtattccaaggccgagattctgcagggctatctgaacatcgcccagttcggcaacaacctgtatggcgtggaaaccgcagcccagcgctacttcagcgtgtccgccgccgacctgaacgtggtgcagtccgccaccatcgcggctatcaccaagaacccgagccagtacgatccgctggtcgaggagaaccagaaggaaagcgagaaccagcgcaatatcgtgctcaagctgatgctgcaggaggggtacatcacccagaagcagtacaccgaagccgtgaacacgccgctgaaggacacgctgaaggtgcaggccgtgaacgtcggctgccaggacaccggcgactacgcatacttctgtgatttcgtggtgcatcgcatccagaactccgaagaattcggcaagactcgtgcggagcgtaacaagctgctgcaggagggtggcctgaagatcgtcaccacgttggatgtggaagcgaattccacgatgatggagaccgcgcgtaataccattccaccggacgatcccagcggcatggagatcgccatggccgcggtcaaaccggggaccggcgaggtgctgggcttcggcctgaaccgccactatgacgccaccccggcggccgcgaacgacccgaccaagacgagccagaactacgccgtcgatctggtggacggcggcggctccggttggaccatcggctcgacctggaagcccatcaacctcatcgcgtggatggaggcgggccattcgatcaacgacaacctgcagaccaccacgacgtaccccacgaccgacttcgcctgtgacaactacaagggcggcgccgattcgtggaacgtgtcgaacgccatgggcgccggcacggtgaacccggaaagcccgttcctcggtctggtgcgatcgcacaacaccacccaggcctccatgggcgccatcctcaaactgtgcaaggtggcggacaccgcgaccgaactgggataccatgacgccgccaccggcgagaccatcgacaagaccccggtgtacacgccgtccatgatgatcggctcggtgaacgtgtccccgctgaccatggcgagcatcttcgccgtatacgcctcgaacggcgtgcagtgcaacccgatcgccatcaacaaggtgaccggcagggacggcaaggagttcaaggtcccgtccgcgaactgccatcaggcggtggataaggacatcatccaaacactcgcttataccctgaaccaaggtacggtgcggccggatggtgccggttggtcattcagattggctgacgggcgtaagccgtttggtaagaccggtaccagtgaggatctcgcggtgtccggtggatcgttcattcctaatcagatcgcggcgttcgctgtggtcggcgacgcacagaacccgtacaccaaccgtatttccaacattgccatcaacggccggtacaacagctattgggatggttcgacaatcgcaggtccggccgttaccaacttcttcaatagctacatttccaagaagaaaataccgattgacaacgattatggccagcccgtctcgaagtacaccacgactggcaagtatctgggcattggcggacgaacgttcagcgcgccgcagaccactacgaatggcaacagccaatcgcagagcaacaacaatcagtctcagtcgcagaacactgggcaaaacaacacccaaacccaggggcactgattcagagcagttgtgaatgatggccagtgattggtgattgcaggccggctgagtctacgtaacatggccgactgcgatacccagattacgtagtttgcgggcgttacctgtttcaggtgacgcccgttttacaatacttaatgacaacgccagcgcgttcatcgaatattcgccatgaacgcgcatcggaaaggggaacgatgagcaacgacgatctgacgcatgagaattttgattttcgtggattcgacgtgccggatctcaaagcggtgacgatggcttcgtcttcggacggcgatcagtccaagcagccgaagaccaagcacgatgatgcatcgaagaaccgtaagcacggtaagaagaagtcaaaatccgacgcacggtccaagaagcgggccggcacgggcaagacaagcgaatcgttcgatgattatgaggattatgaggattatgagggaagggaagctgtgggcaaggcagataagaaagccagcaaggaccgtcctgggctgtttgcgccaatgacgctgcgcgaggtgaccgtgcgtaatcgtatttggttgcctccgatgtgcacgtattcgtcgttcgcccgcgacggtaggcccacgccgttccactaccagcattacgtgtctcgcgcgttcggcggattcggcatggtgatcgtcgaatccaccgccgtggctcctgaggggcgtatcacgccgtgcgatctgggcctgtgggaagacgggcagattgatgcttggcgctggatcgtggacggtattcgcgaggcgggtgcggtgcctgccatccaactcaaccatgcggggcgtaaggcttcgactggttgttttgccgttggctacgacggtcagagtatgccggaggaggcgggcggctggcccaccatggcaccgtctgaaatcgcattcggcgggctgcgtacgccgcgcgcgctgtccgtggatgagattcatggtctggtcggcgcgttcgccgcggcggcgggccgggcgtcggccgcc

SEQ ID NO: 210 - DNA, 7265 bp, Unknown
  R101_18m  MAG No. k141_21509
gaaaagccggaagtttgataactcaagattgggggcgatcggtttcgacggtgacctgttcgctgcagggaagcgtgccgagaacgccgggtccgctcgtggatgaccccggcaaaagaataagtgctaaatctaaccgcactgagttcgctctcgctgcctgattttagtcaggattaaccagtgagcagccgctccgttcactcctcctcgtctttgggaggatgctgagcgtcgtttagaagacttgctgatgcagttgagcctcagggctgcatcgggactttaactgcggatatgctcgccatcagttgtctgcgacatcgatgggggcagaaaaatcgccaacttggccagcagactacgcacgtagaagactgtgggctcggtcatcggaccggggttcaattccccgcgcctccactaatccgcctcggcggcaacaagccgcttggctttacgaaagtaaggctgagcggcttttcttattcccgccgattccctcgtattctctcggtttcacgggataatgtgggcaaaatgtgggcaaaaatcgagcccgcgaagccctctgtcacaacgcgagaacggccccgaccggcaagtaggccgactcgggttgagtcgtctgcgatgccggacggggccgaactgtgcgtggtggtcatgcggcgaggtcgaggcgctgtttgatggcgctgacgccgatgagcgcgccggcgaggatgccgagcgcgttgagcgtggtcactatcgcgtccacgtgagtccagccccatgcggggccgaccgtactgacgaacagggcgagtgcgggcaggacgatgaggcccaaccatttgaggatgtcgtagacgcggctggggattgcgcggttggcttcgatccgacgacctgcggttttggagaccgccgctctaccagctgagctacgcgcataggcggtcatgccggttgattgccatggcacatgaccattgggtggatatgagtaaagcccctgaaccggttgattcagaggctttcacactaatcctgatacggagtatgccacggggtggattcaccctactcccgcttgtgttttgttttttcaggcggcttggatggtgaggcgtccgccgagggcgtggattaccttggcgatggtctggaagctggggttgccgtccttgctgaggctcttgtagaggctttcgcgccccacgcccgcgtccttggcgatctgggtcatgccccgggccttggcgacgttgccgagcgcggcctgcatgagtgcggggtcgtcgtattcggctatggcgttgaggtaggcgatgatgtcctgttcgttttcgaggtattcgctggtgtcgtagtcggtgaattcggtgctcattgtcgttgttccttgtagtcgttgaggatgtcgtgggcttgtctgatgtcggtctgctggatgcttttgtcgccgcctgcgagcagcagcatgagcacgttgccctgcatggcgaagtagacgcggtatccggccccggtgtggaaccgcatctcgctgaccgggcctcccacgggtttgatgtcgccgaatggcctgcctgcgagcttgcagacatcgagccgggcttggatggcggccttcgctttgtggtccctgagtttcttgaaccacttgcggtattcggcggattgcttgatttccatacctctattgtatcctacagactacatcatgtcaagccgaatggccgctggagcccatagccaacgcaagaatctcccgtatgttgaactcccggtagccgtcatcgacgggtctcgagctggggagtttgccccggttgagccagttgctgatccgcttacggctgacctcgtacccgtagtttcccttgagccattggctcatgcctgccggtgtcttggtcaggtggattgcttcggccttgtcgcggctctgctcgcgcagctcctgcacgttgatgggattgccgcacctgcacaggcgcagcgcctcgcccttcgcggccatcacttcgcgtccgcattcggggcagacgccgattatcctgcgggtgcgcggcctgcggtcaaccttggcagagcgtccatggtgcctcgacctgctggctgccgcagtattggcatggttcggtggtgatgactgcacacgttgtactgtagggaaccatgaaagtcgtattgcaacgagtatccgaagcgtccgtggacgtggtcaatgaattgggcacgctggatcccacgttcgagccgcagcagattggcccgggattcatgattctggtgggcgtcgccgatgaggacggcgacaagcagatcgcctggctggcccataagattctgaatctcagggtgttcgaggatgcgcagggcaagatgaaccgttcgatccaggacatcggcggcgagattctctccatctcgcagttcacgctgttcgccgacgtgcacaagggcaatcgcccgagcttcatcaaggccggcaagcccgagcatgccgatctcatgtggatcaagttcaacgaggcgttgcgctccgggggagtgccggtgaaggaaggtcgtttcggcgcgcatatgcgggtcggactggtcaatgacgggccggtgaccatcgtcatcgacaccgagcatgacatgcctgacggaacacgctgaattgcgatagtaatttgacatcatatcccgttccctccaatatgttactaaagcgctttagtcttctgcgggcgagggcgcatgccgatatgtttcccatgaacgggcagcacaatgatgtggccgcacaagcggcagagataaggggagtgaacagcagatgttcctgaaacctgaacagcaactggagcggtgcaagcgcatagtgcgccagcgcgtggaccctcatatccacccatcgatcgcacagcttgcggtggagtcctttgacattcccggagagccgatgcccactgacgagttcttcgagaagctcaatcgaggggacatcgacttcaagccgtttacgctcggcggtgaatggggcaccacatggggcacagtctggttccgcctgaccggtaccgtgccggccggctacccgaaaggcaagccgctggagctcatcctcgacctcggctggtacccgcactcctgcggcggccatatcgagggcctcgtctaccgtgccgacggcaccgccatcaaagccgtacacccgctcaactattgggtgccgttcatggatgctgagggcaacgcgcaagtgccggtcgccgaagacggcagcttcaccctgtacctcgaagccgccagcaacccgctgctgctcggcgtgcctccgttcgttgagaccgaactgggcgaccatgccaccggcaagccggatgagccgtacgtattcaagtccgccgatctgaccgaattcgatgaacgctacgagaactactccgtggatctcgacgtggtgagctccctgatggaattcgccgacaagcagtcgccgcgctactggcaactcgccaaagcattgcagcgttcgctgaacgcctacgacgagcgcaaccccgaatccgtggaagccgcgcgcgcagcactcgccggcgtactggccaagccggccaatgcctcggccatgaacgtcagcgccatcggccacgcgcatatcgactccgcatggctgtggccggtgcgcgagacccgccgcaaggtggcccgcaccgtatccaacgcattggcgctgatggacgccgaccccgacttcaaatacgcgatgagctccgcccagcagtacgcctggctggaagaggatcatccggacatcttcaagcgcatgaagcggcgcattgaagaaggccggttcatcccggtcggcggcatgtgggtggaagccgatggcatgttgcccgccggtgagtcactgatccgccagattgcatatggccgcaaatacttcaaggaacatctcggtgtggagcccaagggcgtatggctgccggacagcttcggctacaccggcgcatggccacagatcgcccgccgtgccgggtacgaatggttcctcacgcagaagatctcgtggaacgacaccaccaagttcccgcaccactcattcatgtgggagggcatcgacggttcgcgcatcttcacccacttcccgccggcggatacctatgccgcttggtgcaagattcaggaactcgactacgccgagaagaacttccaggacaaagaccttgccgaccgctcgcttctgctcttcggtttcggcgacggcggtggcggccccacgcgcaacatgatggagcacctgcaccgctacgagaacctcgaaggcgtctccaaggtgagcatcgaagagccgaatgacttcttcgacaaggcgcatcagcagcttgcagagaacgccggcccagaaatgcccgtctggaagggcgagctgtatctcgaactgcaccgtggcaccttgacctcgcaacaggacatgaaacgcggctgccgccaagaggaatcgctgttgcgcacggtcgaatacctgggcgcagccgccgtgttgtccgatccggagtacgtctacccgcgcgaggaactggaccgcatatggaagacgctgctgctgaaccagttccacgacatcctgcccggctcggccatcgcatgggtgcaccgcgaagcccgcgaggactatcgccgcgacctgaagcgtctcgctgaaatcgcccaagacatgtgcgccgtgctgcgcaaggccaacccgcaggccgacttgctcgccgaggcccgcatcagccagttccgcaatgacggcgcgtcttggcatgccaaccgcatcaacgaaccgaccgacgcgctttccgtactgacccagacattggacaacggccgtgtactgctggccaacggcgtactgtccgtcaccgtcgaggccgacggtacaatctcgtcactgcttgacgaggagcatggccgtgaactggttccggccggcacccgattgggccaatacgaactgttgaaggacgaacccgccgtttgggatgcctgggagatcgaacgcgaatccctgctcatggcgaatgccatgaccggatcgatcgaatcggtcgataccgaaaacggtgcggcacgagtccgcgtgcgtaccgccgacgatgacaccgtcatcaccaccaccatcacgttgcgccccggttcgcacacgctcgatttccatgccgatatcgattggcacgaacgtgaacgcttcctcaaagtcgatctgccgctgggtatcgtggccgaccaagcgacctacgactgccagtatggtctggtccgccgcccaatcgtcaaaaacaccgcatccgatgaagccaagtatgagagcagcacgaaccgtttcgccattattggtgatgccggttacgccgtggccgtcatcaacggatcggtatacgggtccgatgcctcaccgatcgccgggaacgttgccgaaggtcgtgactcgggcactatgttccgactgtcattgctctccgcgccgaccttccccgacccgcgcaccgatatcggctcgcacgagttcgactggtccgtggtggccgacgccacggtggaccgtgcgcttgacgccgccggtgtgctcaactcaccggtactccatgatgtgcccgatatcacgccgctcgcctcgatcgagtccgtcaatggtaccgtggtgctggactggatgaagctggccgatgatggttccgacgatctgatcgtacgtgcctatgaggcggccggcggcagggccgatgccacgctgcatgtctgcccggcgctcgcaggcgcttcggtgcatgagaccaatgtgctggcaggcgacaatctggccaccgaccttccagtcgcgctgcaagacggtacacaaaacgccgaaggcgccacactgcacttcggcccgttccagctcgccaccctgcgcatcacgcgctgaattcccgtctgacgcttctgcctcctcgaaccatgaggaggcagaagtatgtcgtattacggttttccaaattaccaccacacccatcatttccatcattcccaccagacacagcaaaggagaattctccatgtttcttctgcccgatcagcagttggagcgctgcgaccgcgtcatgcagcagcgcgtcaaaccgcatatccacaccacactcgccgcatgcaccttgcgttcgttccacaatcccggcgaaccggtgccctccagcgaatttctagccaaagtgcgcaacggccaagtgcccttcgaacctttccgcgttcccggcgtctggggcaccacatggggcaccacatggttcgaggtgaacggccacatcgacatggcggcggtcaaaggacgaaaagtcgaactcatggtagacctcggctggctcgataaccgcggccccggattccaatccgagggacttgtctatcgtgccgacggcaccgccatcaaatccgcgaacccacgcaaccactggattccactcgtctacgcggacggaagcagcactgtagaactcgatgaacatggcgacttcaccgtctatatcgaagccgccgccaacccattcgtcgaaggccccaccccgttctcacccaccgaactcggcgaagaggccaccggcacctgtgacttcccatacacactgagtcgcatggatatcaccatcttcaacgaagacgtgtttgcctatgacatggacttggaaaccgtatcttccctgattcgcgaactcaaagacgacgacccgcgctactggcagctcgccaaagcgctgcaacgctccctgaacatctacgatgaacgcgacttggaaaccgtgccggcagcccgtgcggcgctcgccggcgtgctcgccgaaccggctgcatccagcgcaatcaaccacattgccatcggccacgcgcatatcgactccgcatggctatggccggtgcgcgagacacgccgcaaagtggcccgtaccgtatccaacgtgctggctttgatggacgaagacccagacttcacgtatgcgatgagttccgcccaacagtacgcatggctggaagaagaacatcccgacctgttcgcacgaatgaagcggcgcatcgaagaaggccggttcatcccggtcggcggcatgtgggtggaatctgacaacatgattccttccggcgaatcattggtgcggcagatcacgttcggccgccgatatttcaaggagcatctcggcgtcgcgccgcgcggcatctggctaccggacagtttcggctacaccggctcttggccgcagatc

SEQ ID NO: 211 - DNA, 18009 bp, Unknown
  R101_18m  MAG No. k141_23253
gaccagcaacacgatgatgaaaatcgccatgctgcggttcgagacgaacgacgtacccaacgtggtcaggaagccgtcgacgccaatgccgccgaccagcgcagtcaccacagccgccacgataatgatcagaatcgcatccaatccgagggcgaagcccgcgatcacgatgccgatgcccaacagcaccagatagtttggttccatgcgggaaatcccttccacagtacgtgcgcattgcgccgcaagcgtattcgaataccagatagtgtacgacgcgaatcatgcttcggcggcctcttcgcgcacatcgtgggtattgcatgggcgtcgcgcgcctcgcgcacggctgcggccgggacggtcggcatggtgttcgctatgatgtacagtcggactttggtaagagacagtattcgtaacaggcaagtaggttattcatggctattgaggtgcagggacttgaaattcagatcggcgcgcgcacgctgcttcaccccaccaacttccatgtggccaagggagacaagatcggtctggtgggccgcaacggcgccggcaagaccacgctgacccgcgtgatcaccggcgacatgttgcccaccgccggcaaggtgcgcgtctccggcaagctcggctacctgccgcaggacacgcacgcctccgatcccacgcagaccgctctcgaccgcatgatgagcgcgcgtgacatcgccaccatcatcagccgcatccgcaaggccgaaaaggatatgaccgacccggatccggacgtgatgagcaaggccatgacccggtacgacaaggccatgcaggacttcgacaaggctggcggctacgcggcccagtccgaggcgatttccatggccgcctcgctcggcctgccgcaggaggtcatggagcagcagctcggcacgctctccggtggccagcgccgccgcatcgagctggcgcgcatcctgttctccaacgccgacacccttattctcgacgagccgaccaaccacttggatgccgattccatcgaatggctgcgcggctacttgaagaagtacgagggtggcttcctggtcatctcccactccaccgaactgctggacgaagtggtgaacaaggtctggcatctggatgcgcagctcggccagatcgacatgtattcgctcggctggaaggcctacctgcaccagcgcgtggtggacgaggagcgccgccgccgcgaacgcgaagtggccgagaagaaggccgaccgtctcatgaagcaaggcattcggctgcacgccaaggccaccaaggccgtggcagcgcagaacatgatgcgccgcgccgaaaagctgctggaaaacacctccgaggcgcagaaggccgagaaggtggcggacatccgtttccccgagcccgcgccctgcggccgcacgccgatcatggccaaggacatctccaaggcctacggttccaacatcgtgttcgccggcgtgaacctggccatcgacaagggctcgcgtgtggtgatcctcggctacaacggtgccggcaagaccaccacgctgcgcctgctggcccacatcgaggagccggacaccggttccgtggaatacggtcacggctgcaagatcggctacttcgcgcaggagcacgacaccttggatctgaacgccaccgtgttggagaacctgcagcatgtggcgcccgagctcgacaacacgcaggcccgttcgattctcggctcgttcctgttctccggcgatgacgcgatgaaaccggcccatgtgctttccggcggtgagaagacccgtctggccttggccacgctggtcacctcgcgagccaatgtgctgctgctcgacgagcccaccaacaacctcgaccccgcttcccgtgaggagattctgaaggccattgccaagtatgagggcgccatcgtgctcgtcacccacgatgagggcgccgtcgaggcgctcaaccccgagcgcgtgctcctcatgcccgacggcgacgaagacctctggaatgattcgtacctcgaactcgtagccgaagaatagtcctacctcttggctcccctaccgggagctgtcagcaaagaacgggttaaccctaggttcccctcgctgaggggagcctcgcaagcatgcaaaggaatcaaccatgccaaccacaacaggccagaagatcgccatcgtcaccggcagcgcgctgggtttgggctacgagctcgccagccaactcatcgctaagggctggctggtggccggcatcgacttcaacgccgaacgtcaggccgagctgagcgcgcagtggccagccgaatcctaccgcgccttcgtaggcgacatcaccgacgaagcgttcgtcaaggaatccgtggcgagcatcgccgcgctcggccacatcgacctgctcatcaacaacgccggccagccttcgttcaaggtgcccaccgcctatgaagccgctgacattgacaaatgcctcaaggggctcaaaggcatgatcctgtggacggtggaaaccctcaaggcctgtggcgagcgtgacgtgaaaatcgcccagatcatgagcactgccgccacgcgcggcaacgcgaacgaaagcgtgtactgcgccaccaagtggggcgagaagggctataccaagagcctgcaggccgcatacaagggcaccagcgtcaaggtggtcgccgtctatccgggcggcatcgacaccgccttctaccgtgatagccacgattacgtgtccgaagccaagcagcacaccttcatgcagcccggtccgctggccgaggtcatcctcttcaacctgatcaacgaggccaacctcaccgtcaccgacatcgagatcaaccgcaacagctgagctggcaggttatacacatatccaccgattcggccgagctggttgcgcgcagaagttggttatgccatcgtgagttgtatccgtgaataacgcggttcacggatacaaccatcagggggatggcatggagtcctatgcatacaacacgttcttcacacttgatgaggcgcgagacctcgcccagaaaacactggaacaatgccgtgccagatcgatgcgcacttcacaggagctttgcttcagccatggcaccaggctacagcttgctggcatgacggccacgctgaattacaagcccaactatgaccccaacaaactgcacgttacggtgtccggggctgaaagattgtcgaatcttaccgaaacgcaatgccattattggggtcatggcattgaccagacgatgattgatgatcttatcgccgtggtttcagtggaacaggcgctgtgtcagatcgcacagttcgtcgatgtggaaagtatggtcattgccttggattggtccacctgccgtaatgagcatttgaaacagacaacgaaagacaggatatcgttgttcctcgccgatataggtaggttcccaggtatcagattatttcgcaaagcgctctcgttgtgcagagagaacaccgattcgccgcaggaaagtatccttcgccttgaatcggtaaaacgtggattacccgaattggaggtgaatgctccgatatacctcccgttgcagaacaaagaggtggttgtggacatggtgtatccgaatgatcatgtgattctggaatacgacggacggtaccactatgaccgaaaccgatgggaaggagatatcgagaaaaggaacaacctctccttcgcgggctataagacttttcccgccacaagaagaacgttcgctaccacgcagaatctggatgaatacttcagaatcgttggaagtgcaattgcggaataccgcaataccgggtcattttcacaatgagatatgaccggacgcattcattaggtcgattcttcattcattaggtcggtgagctctgacagtcactactggaatggtgccattccaacaccgacaatcgcagcctcatgacctaatgaatgaagaatcgacctaatgaatgattggaagcgttccgcgcaacgttatggcacccgcaagaagccggaacccggaatatgtctgttatcgtgggggccaagcaacaggtgaaggattgagtatgcacatcggtgacgatgagtttgaacgggccattgaacaggtgttggatgatttgcctgaacggtttgcgcgggtgctggagaatgtcggcatcgtcgttgcggacgaacccaatgagcgcgaactggccacaatgagcaatccgtgcggtgagctgctcggactgtatgagggcatacccatcacgaagcgaaccacgggctacagcggcgtgatgccggacgtcatcaccctgttcaaggggtcgcatgaacgcgtatgctcaacacaggccgagctgcgccaacagattcgcaaaaccgtgttgcacgagatcggccattatttcggcttcgatgacgagtatctgcactcgcacggctactgaagcgctgctgtttcactagcggggagccgtcataccgccgtatgttgccagatctactgcaagtggtgcaacgcacggatgatggcgcaacggtcctcggtggttccctcgttggcgcacatggtgtgcgtaccaacgcggattgcgcaaggtctcggcgccggtggcctcatccgtggcgacgagcgtgtgcagatcgttggcgtactggaaatgcaggtggctgagcagcccgccctcggcgaacgccttgcgcgaaggcagagggttgatggccagcagccagcggaacgggctgtcttcggcggccgggcttgaagccagggccgcaatccggtgccgatacggttccaagtcaaacgcccgcaatcccatggcggccacgcagccgggggagagggacaggaattcatcggcctcgtaatcctgcacgatatgtccgccgtcgaataccacgtaccggtcggccacgccgttgagccatgcgagtcggtgatgaaacagggcagcatcatcgtgacgcccacggccagcgcggagaccacatgcagccacggcagtcccagggcatcggggtcgagcattcccagcgcggtgagtacggcataggtcacgccgaagttcaacgcggttcgccatcgggcggccgccagcaggggcaacaggaacagcacgaccatgacgatttgcgtggcgagccctacatggaagaacagcatgaggttcgccaccagcagaaggaagagtctcgcgcgcggatcgagcgtccggcgggcaggaagatggagccgaagccgctggtgaacagggtgctcaccagtgtggcgatgcacaccatcacgaagtacagggccgcaaacacgccgatggtgatgaggtcggagacctccagtttgccggatttggcgggcttgttgagctggtcagaggtttcggcgggcgtgttcggtgcggtcacgatgttttccgtttcgtatgcattgacaatattcctctcgccaatctaacgatgatttcccgcaaggcaatagtctgtctgtgatttttgcgtgcgaaacaatagagctcccctctttgaaggggagcctgagtgttccatcaaaaccgaatgctcgcccggaactcgccttcggccggttggccgagttccagcctggctcccatcgcctcgcatgccgcactggcgatggacaggccgagccccacgccgggcacggcgctgatacgcgagttctcgccgcgatggaacggttgggtcagctcgttcagatcgtccggcagcatctcatccgtggtgttcgtgacggtcagacggggtccgcttccatcctcatccgatacgacggtcacgtcgatcgacccatcatccgtgttgtgcacgacggcattgcgcagcaggttgccgaccgccagttccagcaacgccgggtcggcggcgatgagaaacatgtccgcgtcgccgccggccttgttcacggttatggtgatgcgacgcttggtggcggcatcgtcgatatccgcaagggagttgccggcgcatccgtacaaatctgtggatgtgcgtgccgttgatgcgggactcatctgtgtcacatcgcccgcctgcttgccgccgatggtcccgctttggatacgggacaaggtcagcagcgcctgcaccagttgcgcgccgcgccgattggcatccagtgcgcgctgtaccgacggtcgcacatcctcggggaaccgcccctgggccaacggcgcgtccagattggtctccaccgcagcaatcggcgtgcgcagctcgtgcgaggcattggacacgaaccgccgctccgcttcggatgcggcctgaatccggtcgagcatgccgttgatggcgtcaccgagctgcgtgacttcggaggattggccggcagctcgaccgtccgtgcggctgtccgtgctatgatcccaatcctcggtcccgcgtctgcccgcacgccggaactggggcctacggcgagatggcggcccattcacgtcgatgcgcgtatcaagtttggccggatccaatgccgccgcctgcgcgctgatggaggtcagttgccgggacatgcgcgaggtgaccagccagatgatcagaatgctggtgatcccgaagaacacgaagatgatggccgcgctgatgcgcaatccggtggcgatgttgtcctggttccacacggagacgccatacggggtgttgatggtatacgacccgtccttgccccattccacctgatagtcaccgtcgcccatatcgccgccgacgctggatgttccagtgatatcgttcagacctgtgccgcttccccgggaaaacattcgcgggtcggaatccgggcgtttgccggtgccggaaccgctgtgctggctttcgacctgcatctcagggtttttggcggtgaccgtcgtggcgtacgtgaacatgctgttgaccacaatggtctgcacgagggtcgccgatcccatggcgatgaggaacacgagactgatggccaacgtcagtttggcgcggaatgatttgggccgcagtttgccggcaagcgcctgtatacgacctgatgctttcgccgtgttcgtcgccttcattgcagccggtatccttccccgcgtgtcgagacgatggcctcgcgatcggtgagtttgcgccgtagcgaatagatggtggttttgatcacgtcggtcgggtcggcggcggtcggctcatcccaaaccgcatcgtagagttcgtgcgcggtcacgtatccgccttccgcacgcatgagctccagcaatatgccgtactccttgggtgtgagtttgacgagcgtgcgcccgtggtcgcggaacacgagccggcgtgtggaatcgagggtgatgtcgccgcgcgtgagcacggctgcggtcgcgttgctggtcccgctgcgccgttgcagggcgcggatacgggccagcagttcgggataggcgaacggtttggtcaggtaatcgtcggcccctaggtccagcccgctcacgcggtcgctgacctcggcggcggccgtcagcatgattacggccacgggaatgcggttcgcggcgacggtggccatcaccgcgtcaccggacaataccggcagatcacggtcgagcagcatgatgtccacgttcgtgccggcaaggatcttcaacgcttcgacgccggtggttgccagactggtcgcgtacccctcgtagcgcagcgcgtcgtccaacgcgacggccagttcgcggtcgtcctcgacgatcagaatccgcatcatgtccccttccgagccttcccgaaccaatggcatcacccaacattttcccgattctacggtaaggcgaaagtaatccgtccgcttaccgacgctccacggtgagggcgattggatggaagtcgtcacaatcgactcacggaatggagacggtaatgtccactactcatacgcgcctggtacggcgaatcgcaatgcttacgtccgcactctcgctggcttcgatgctgggcgcctgctcgtcaccgctggcggcagtcggaacaggctcaggtgccgacgatcggtccgatgcgacgaccaccaccgacgccacggcgaagcgattcgccgcctgcctgaccggcaaaggattcgacgcgcgtacggctgctggcgtgtcgtccggctccggctcgggcaaacaagccccgaccaaaaacgcggtcgcactgcgcatgatcggcaccgacggcaagccggtcgcctcccaaggcaacagcctcagcgcatccgacgacggcccgcaactctacccgaacgctgcctacacgtcgatggaagacgacagcacctgggtggtgttcaaggacgccaaggcgctcgccggctcaccctacgaatccaaacagcgggaatacgccgactgcgaggccaagaaccccgacttcacccagcccattccggacatggggccgcaacaccagtattccggggaagacaagcaggcggcgctcgcctacgcccaggccgcgcgtaagaagggcttcgactgggtcaaggacccggacgccgatacgcccacctcaatcacgattcccggcaccgtaagcgaatccgaactgcgccgattcctcaaggaatgcccgaccgatggcgcgaacatctcctatgccttcgctggcaccaccgaggaattcggctatgactacaacaaagtcctctccgaattcacctccggcagcgcgtccaccgaagccgcgccccagcaatgagacggccatccgataacggacaaaggagcaatcatgacacggacggaagcgcgcagattcgggaaacaccgcagaatcgtgacgatgattatcgcggcgatcgccgtgatcggactggccgcggtgtgcgtggcggtgaggccgtggacgttggccgggcacgtcaccgcgaccgggcagactggccgatcgcagcaggtggatgtgtccacgctgcgcacgcaggaggtgaccaagggcgtactcaacgccgagacccggctcggcgcgagtctgcaatacgatgacgcctccgatttcgcggccgcttccggcacaatcacccaactgccggtggccggcaaacagatcaacaccggcgaacaggtgtacgagatggacggcgcgcccgtgccgctgttccatggcgaccgcccgttctggcggacgatcggcgatggcgtctccgacggcccggacgtcacgcaactggagcagaacctgcaggaactcggattctacggcggcgaggtcggaccgcatttcaactggctgacccgcgaggcgatccggcaatggcagcgctcgctcggcctgaccggcgacgcggtcaccggcacattcgacccgaatacggtggccctggccgcggccgcaccaatccgcatcacggcggtgaacgcgaaactcggccaatcacaggtcagcccggcaagctatacgggcgtcaccctgcatgcgcaggccacgttgaccgccacgcaggcggcgatgttcaaagccggagacaaggcgcaggtcgtgctgccggacaacaccaccgtcgaaacgacgctcgcctcggtcgatcagggcgggcagaagaccggcgacaacgggcaagccacacagccatcggcgcgcatcgacttcccggaccagtcgcaggtggcggctttcgggccgacggccgtgcaagtcatcatcccgaacgccgatgcctcgaccggggaggcgctgatcgtgccggtgaccgcactgatcgccagcgccggcagcgcgtatgcggtcgaagcggtacgcggcggcaagttggtgcgtgtgccggtgtcaatcgggctggtgtccgacgcgcaagtgcaaatcaccaagtccgacggcctcaaggcgggagacaaggtggtggtctcatgaacgacatcgagtttgcccccgctggcccagagcatggggcattgctgacgttggagcatgtgacgaaggcgtttccaggcaaggacgggagcgtgctggagatattgcatgatacgtcactggccatcgatcgcagcgagctcgtggccatcgtcgggccgtccggctcgggcaaaagcacgctgctgtcgttactgggcacgctggacatgccgacctcgggaatattgcgatacgacggcggggatgtgaatgcgatgggtgagcggcagcgcagcgtcctgcgggccgagcgcatcggcttcgtgttccagcagttccatctgatcgccaccgtatccgccttggagaacgtgatgacaggcctgcaatacacaaccctgccgcgcggcgaacgtcggcaacgggccgccgaggcgttggaacaggtcggattggggaaccgcctgcatcaccggccggcccagttgtcgggcggcgaacagcagcgtgtggccatcgcccgcgccctggccaaacggccgaacatcatcttcgccgacgagccgaccggcgcgctggactgcgaaaccggccacaccatcgtcgacctgctgctcacggcggccgattccggcgcaagcctggtcatggtcacccacgaccagaccatcgccgcacgtttccccaggcgtctgcacatccaagacggcctagtcaccgaactcgacaagccgaatcaagccccctctgacgaggggctgtcagccaaaggctgactgggggagagatatgagtgaacgtactcctatgagtaaaccaatacgcacgcgaattgcggatttgatgcatgcggcttgggttggggccgccgggcgggcgtcccgcacggtgctggcatcgctgggcatcgcgcttggcgtggccgcatatgtgacgttgtccggcatcgccgcatcgaaccaggcagcgctcctcgcccaactcgacgcgcttggcgcgaatctgtcggtggtcgcccccggcgtggacgccgcccagcagaaggttccgctgccggattacgcgcccacaaccatcgcccgtcagccgcaggtcgaacgggtcggtgtcttcgacaccgcgccagagaaggtgcggatcttcaagaacgggctgtgccccaaaaccaacggcaacgcgctggccctcgccatcatgcggcccggcgcactcgacgccgtcggagcaagcctcgcccaaggtcatggcatcgacgcgaacaacgagcacctgcccgtcgccgtgctcggctcggacgccgcctaccggctcggcgtcaacgagcccggcgaccgcatcctcatcgacaacgcatggtacggcgtcatcggcatcctgaaccccacgccgcaggctgaaaacctgaacgccgccgtcatcatcggcgagcaatgggcgctcggccggtaccccgaccaggccgacaccatcggacggatcagcgccatctacgtgcgcaccacgcccggcgacgccgaaggcacccgccgcacgctcgcccacgccgccaacccggccggcggcaacgtgtccgtcaccgcgtccgccgacctatccaaagcgcgcaacaccaccaacgattcactgaccacgctcggcctgatgatcggcgtgatcgcgctggccgtgggcggcatgagcatcgccaacatgatgattgtcaccgtgatggaacgtcgcggcgaaatcggcctgagacgcgcgctcggcgccacgcccggcaacatccgcatgcaattcgtcaccgaagcggccctcctgtccacactcggcggattcgccggcatcgcgctcggcgccggcgctgccatcggcgtcgccgccagtgccggccagccgatcgccctcgactggacctccctgccgctcgcctgggccgccgccatcctggtcggcatcctcgccggcctctacccggcctcccgcgccgcccgtctcaccccgaccgaggccctgcgcggcgaataggggcgacggctggagtgaacgatcaccatgagtgcgcagcctcaatgtcacttttactgcacatgatgacatgtgcagtaaaagtgacatattggtgctgggcgggagagagcacgcgtggcgcgggcggggtgtggttcgcggctatcggctagtatggtgcggtcacgacagagggaggcatgctgtggccgatgtgatgcgggagctggaacggctgcgaccggtgtatgagacgggcgtcctgcggttgctgttgcgccagaacgcgatgctgtacgtgtcgctgctgcgttccacgttcgacccgctcaccggcgagctgccgcgcgagaccgtggaggagcggttcgcgcaaagtctgaacgctctggccgacgccggcgaatatgcgccgcgcgaggaccagaccttcgccgaggccgcccatcagatcctcgccgacctgacccgtgaaggcgaaggcgactacgcctggctcgccaactcgcatgatgcggccacacaccgattcctctaccgtttgacggcccgcgcccaccgcgccatcgaggcgctgagcaggctcgaagacgaatcacgcgccctgtccggcgcgcaggccaacagcatcatcatggaaatcgaacacgcgcgcatgcagctgaccgccgaccccggcgagcgcatcaaactcctcaaccgtgaaatcaaggaacgcaagcacgagatcaaacgcatccaacagggcaagcagcacgccacgctgagcgaagcccaagtggaggacgtgatcgccgtgatccacaacacgctgcgcggcgtgcccatcgacctgcgcgaactcgtgctcgacgagcgggacaacggcgacgccttgcgccggcgcatgcagaccggcgacatcagcgtggacgagaacctgacccgctaccacgacgaataccgccgctcgttcagcgaatcggacagcggccgccgcttcgaggacgccttccaggtgatcatcaccgacgagggccgccagcaaatcgacgaagccctgcgcgccatcgccaaaaccccgtatctggccggcgaatccggcgtgctgctcggccagatccgcgacgaactggcccgcatctacgacggcatcgaagccgtgcgccgccagatgcgcgtctccgacgaggcgatcagccggctcgtgcgccagcaaaccgatactcgctaccgtacgatgctcacccgcttgaaccgactgtacgcgcgcctcaacgcggatgcgaaaacccatatgggagacgcctcgcgcccgtacgacacggccaccgcggacgcgctgttcgcgccattgccgatgcgcccggccaaatccatgacccgcgccaccgcacccggcctgagcgacctcgccgccgaagccccgcaggcgactccggtggccgatctgcgggatatggtcaacagcggcggcccccgattcctgcgcatggtcagcctcatccggcgcaacccggtgaccgttgacaggtccgatgacagggccaacgcaacccttgtggacatcgccgccagcttcaaccggctgcccgaaagcgaacgccgcgaaagcgagatcgtcggcttcctgggtgggctgggagccgtaagcggcagcgccatcgccgacgagccgtccactgacggcgtcggcatcgacagcgccatcgccaccgagccggccccggcgcagcgcggcgataccgcgacttggcattgcgtatcgatcgacggcgagccccggcactggatcactagaccggtgctggccgacatggacgagctgaacatcattgtggaggaaggatgaccgtggccgaggaacacgaggagcacatggacaacgccaacccgtacgccctgttcgaaggcgacaccggcgacatgccggccgaggcacgcatggccgccatcgccctcaaacgcgaccgctatatcagcgggcccacctacgacaccgtgctcgacaaccgcgacgtcgtcgtacgctccctgaacaacgacctgctcgacttggtgatcaacgaacgctaccgcatcatgtacgccacgcccgtggccggcgacgacgtgaccctgcgctcgctcaaaacccgtgtcagcctcaaacgcgaggaggccgcgctgctcgccttcctgcgcatccgcgtcctcgaatacgagaacgtgcacgccgaccccgccgactggctcgtcagctttgaggagatccgcgccgcgctcgccaccggcgccggttacctggcagcccgcaatgacgaggaaggcgtggcaaagcagatcggcaccatcgtctccgcgatgatcacctacgggtatttggcgcgcctggacgacgaagccatgtaccagatcacgccgctcgtgcccgtggtgctcgaccgcgaactggccgacacctggctcgacgtcgcggaacacggcgacggcgacacggaagatgacgatgacgacgagaagggagccgaatgatgcaggcgacagacgtgcagatgatcgcggaccggtggatgctggaatcccgccgactcatcaactggggctcctatgagggctaccacgaattccgcccctccacggaccacaagctgccggtgaccctgctcgccggcgccagcgaatccggcaaatccacgctggtcgacgcgcagatctccctgctgtacccgaccggcacgccgttcaacaaggcctcgaactccggccgctccgaacgcagcgactacacctacctgcgcggcatggtcggcgtgggcagcaccgaaaccggcgacgagccgctctacctgcgcggtcgcgacgagaacggcgcgccgcaacccgtgtggggcgccatcgtggacacctatcgcaaccagaccaccggccaggtgctttcctgcgccaaattcctctacctgatgcccggcgacggccgcggcgacgtgcgccgccagtacgtggtctggggcaagcccgtggaccccaggcgcatggaccaataccgtgacgccccgttcacaccagcccagctcaaagccacctaccccgactgcctcacattccccagcgccgaagcgttccacacacacatctggagcgcaatgggcctgagcgaggccgcctgccgactgctgcacaagatccagtccgccgacgcgccctcccggctcgacgacatcttcaaacaaggcgtgctcggcgtgcccgaagccctggacctggcccgcaccacggtcgaggactacgaacgttacgacgagaacttccacgccatggacgagaagacccgccgcatggacacgctgcgcggcatccaacaggcctacggcgaatacgccgccgcacgcggcaaggcccgcgccttcgaaccggtcaagccggccgtcgacggcacggtgccggccgtgctgcgcgactgggcattggcccgcatgcgcggcgaagtcgccgtccaactgcccgccgaccgcgccgaacaacagaacagcgaggcggaagccaagctgctgcgccgccgaaccgaagacctgcgcacccgcctcgacatgatccgaggccagatgcagggtctggacggcggcaacctgacccgactcgaactcgaactcgaccaggcccgccgcaccctcgaagacatgcaagccaaccgaacacgaatcgaacaaacgttcgcatccatcggcgagacactgcccggcaacgaacagtcctggaacgaacgccgcatcaacgccgtgaacttcaaacgcgaatacaacaaacgagacggcgaatgcgaggaagccctcaccgccgccatcaacgcacgggccggcgcacgcggcgacctcgaacgactgcaacgcgacttcgaccggcaacgctcccagcgcacccgcatctcccagcagatggacgaaacccgcgccatgctctgccgcgccaccggactcgcccccgccgaactgccgtacgtggccgaactcatggacgtgaacgaacacgaggaagactggcgtctcgccatgaacgtcgcctacgcgcccatcgcccagaccatcctcgtcgacaagcgccacgaacagggcttcgccgccaaagtcagcaccatcgacccgcgcaccatgccccgacgcacctggcagttcgtggacaccgcacgccactacgacgacaccggcgcgcacgcgaacatactcaccggagaacaggacggcgactggctgtccggcaaactgcgctaccgcgacgactcgcccttcgccgactggctgcgctcgcagacccaggacgaacgattcgacgccctatgcgtcaccgccatcgacgacaccgaccgcaccaaccgtcaggtgcaggccgacggtcagatcaaatccggcgcacgcggccagcacggcaccaaagaccgcgcccaggtcatcggattcgtcaacgaaacctacctcaacgcgctcgcagcgcaggtcgacgccgcccgcaacgcgctcagccaagccgacaccgactacacggccgccaaaacacagtccgataacctccaccgcgaactcgaactagccaaccagctcgcctacacgtcatgggaacgcatcgacatcgccggcgcgcaacggaccatcacggacacgcaggacgccatcgcatccatcaaaaacgatcccaaactcgccgaactcgccaaacagcgcgacgaactgaacgccgaactcgaccgtgcggaacgccagcgcatcgaatccgaccaggccgcggcccgcgccggcagcgccgtcgaagcggcgctcatctggctgcgcgaccatgccgacaccggcacgacggacgccgccggtgccaccgccgacaatgacgatgacgccgcttccggcccgctgccggacgaagtcacggcggcgctcgccgaatcctacgacaaccgattcgccggattggcggacgcggccatgcgcgcgcacatgatcatcggcgcgggcgcggcaggaacgcaggcgccgggggagagcttccccgaacgcaccatcgccggcatcggcaaggacatggcctcccgcatcaatctgctgaacggccaggccgacgccgcgcgcaccggcgtcgaatcgaaaatgagcacctacatcgcgctctacgcggccgacgatgattcgctgaccgccagcgtggaggactaccggtactatctcgacgaactcgccagcctcacccagctggccgcggttgccgccaccgacgccgaataccggcgctgcctcgaacagctgctcaggagcttcctgaccatcaaacgcgccatcgacacggatgccagcgacatccacgaccagcttgaccgcatcaacgccatgctcaagggccaacagttcggccccaagcacggcagcctgtccctgcacgcggacgtgcgccgtcccgagcgcaccttctgggcgcagctcatccgcgtcatcggcaccctgaacgattggaaatccgccgacgtcaacgattccgacgcctcgcgcaaggctttcgcggcctgcgcgccgatggtcgggctgctgcgcgccgaactcgcgcaggtcaaggacacgaacggcgtgaaaagctacggcgcccgcaacctcgacccgcgctgccgctcgtccttctacgccatcgtgcatcatgccgacggtccggacgaacgcatcacctccaccggcggccgttcgggcggcgccttgcaggagctcacctcgttcgtatacggcgcggcgctcatctacctgctcggcggcggcctgaccagcgagccctcgtacaccacgctgttcctcgacgaggcgctcatcaaggccgacggccgttacacgcagcgcgccctcacggtgctgccgcgcctcggattccaggtcatcgtctccgccccggaaagcaagaccggtgaaatcctcgaggtctccaccaaggcctacgtgacctacaaggaccccgacaccggcctcacctccctgcgcgaggccgtgctgcatcagaatgacatggacgatgaatcatcgtcaccaagcatcgcaccataggcacctctgtcgagttgatctccaaagtcgtcgttcctgacgaattaatagccatgcgtgtggttggtcgtacgctggcggcggaatatcgcgaagcgcaccgtcgcacagattccactgacaggattcagcggcaaatggctgaatgagtcaaaaaccaatcgtcgtaaggccatttgccgactgc

SEQ ID NO: 212 - DNA, 2575 bp, Unknown
  R101_18m  MAG No. k141_23478
cccggacttgccgggcttgagaacgaggaggattggggtgatgatttccccaagacgttctcggtgaatctgatttgggcgcaggcctgtgacaaggaaggtcatgacggcgccatcggattcgagggtggtatgccgtggcatctgcccgaagatatgaagcgtttaaaggagcttaccgtctcgcatccggtcatcatggggcgcaagacgtgggaatccctgagcccgaagtatcgtccgttgccgaatcgcgacaatatcgtggtttcgcacgattcgtcttatagggcgcctggagcgaccgtggtcgacagtttggatgatgcgcttgatctggcccgtcaggaagccattccggatgatggtctcgaccgcagcgaaatctggatcatcggtggcggtcagctgtaccacgaggcgatgccgtttgcggacaaggcatatgtgacgcagatcagcatgcacgttgacgccgacacctatgcgcctgacatcaaaggcctggtggaatccggggcatggaaggtggccgaggaaggcgtatggcagggcactacgaagggttccgacgacatcgccggattccgtttcataatctttgaaagaaatcacgaggagtaaacccatgtataccgtgatgaccgtgtgcaccggcaacatctgccgctctcccatggccgagatcattctgcgcaccgaattcgagcgtcgtgggctcgccgacaaggtcaatgtcgaatccagcggtgtcagcgatgaggaatacggcaatccgatcgatcgtcgcgccgtcaaggtgttgcgtgagcgtggatatgagcttccggcgcaccatttcgcgcaccgcatcactcgtgatgagatcgagcgcaccgacctgttcttgcccatgaccgcttcccacatgcgtgcgttgttgcgtcagcttccgcaggccaagcgtgagaacgtgcacatgtaccgtagtttcgatccgaatcttgccaagcctgctgcaggctacgaaagcgagattgatctggtcgatccatggtatggtggcgcccacgaattcgaagtggcaatcgatcagattgaggaagtggctccgttcatcgtcgattgggtcgagcagcggctctgaacctatgttgaatgtgacattcgaggcgattgaaaaagctcggtttatttgaaccgggctttttttgtatgagatatacacttgtgtggcaaccgcaatacggcgatctcaaaaagatgtttgaaaagaattaaaaaaagaaataaaaaagcgaccccggccggacttgaaccggtgacctccgccgtgacagggcggcgctctaaccaactgagctacggggccgttgtttcagtcttgcgactggcaacagatgtatatattacggcaaagtcgccattgtgcaaattgcggcgtgtcatcggcgaatatttgcatggatcggcgaaagaaaatgtttgtggaatcggaaatagcgagaaaacaaagcaacggccggtcgtgtatgaggggaaaacttctcatacacgaccggccgttacatttgcggtgccgtgttgtcgctcacgacactacgtcttgttgaaatcagtcggtctgcttccaggtctcgacgtcgatgtggtgttccggattggcctgccatgcttcccaagcggacttcacgatgtcttccacgttgtactgtgcgtgccagcccatctcttcgttgatgcgcttcggggagccgatcaggtgcggcggatcgcctgcgcggcgggccatgacggtctcttcgaacggcaggccggtgaccttcttgacctcatcgacgatctggcgcacggaggtgccttcgccggtgccgacgttgaaggcatcgtagttgcgctcgtcgcggttctgatacttcagggcggcgatgggggcgtcggccagatcggagacgtggatgtagtcgcgcacgcaggtgccgtccggagtcgggtagtcgtcgccgaagattgccggagccttgcccttcttcagacggtcgaacagcatcgggatgaggttcaggattgccggatcctcgagctcgaccgggccgcagccagccacgttgaagtagcgcagaccgcagaagcgaatgccatacggctcttcgcaggcgcgagccatccactcgccgaacagcttggtctggccgtacgggttgatcggcagcatcggaacgacgtcttccggcaccacgtcgaccggcggaacgccgtaggtggctgcggaagaggagaagacgagcttcttggcgccggagtcgcgcatgccggtgagcacgttgagcatgccgttgatgttctgctggtagtaccacagcggcttctcgacggattcgccgacctgcttgcgggcggcgaagtgaatgacggagtcgacaccttcggccttcatgatttcggcgagacgttcgccggcacccggagcggcgatgtccatgccgtacaggcgggagccttcgatgcgggttggcttgccgtagctcagatcgtcaacgacgacgacctgttcgccggcctgatgaagagcgtggacgacgtgggcgccgatgta

SEQ ID NO: 213 - DNA, 3564 bp, Unknown
  R101_18m  MAG No. k141_23531
gatctcgtcggcatgcgagtacatacgggtctcgatgtcggtgacgtcatcgtagtcacggttgtgggtcacgccctcgtagtgcaccggacggttcgggtcgatgtcgtgcacgtgcttgtacatggcgcggaacacgtcgcccacgtaggattcgttgcccagcgaccagatcagcacgctcgggtggttgtagtcacggcgcatcatgctgttgacgcggtcgacgcaggcgccttcccattcgcgcttgctgcccggcacgatggtgtcctcggtgaggacgtctccgggcagggaccagctgccgtgggcttcgaggttggcttcgtcgatcaggtagatgccgtactcgtcgcacagttcgtaccagcgttcctggttcgggtagtgcgaggtgcggatggagttgatgttgtggcgcttgcagaagaccacgtcatcgatcatgtcctgctcggtgatggcgcggccgcgttcggcgtcgaactcgtggcggtcggcgcccttgaacacgatgcgcttgccgttgatggtcaggatgccgtcctcgatgcggaagcggcggaaaccgaccttctgggacgtgcattcgatgacgtcgcccgcttggtcgatgacgtcgacgtcaagttcgtacagcgtcgggctttcggcgctccaaggttcgatgccctgcagcggctcgctggagatcgcggtctgcgcctccgcgtcgcccgtcgtctgccacaccgtgttgccgtcggcgtccttcagggtcgcgcggaccgtggccgcgtcggccgcgttgagcacggtcagcgcggcgtcgagggaagcggtgccggcctcgggatcccaatcggcttcgatttgcgtgttctcgatgtgcacgtgcgggcgggcggcgagttcgacggagcggaacaggccgtgcagacgccagaagtcctgatcctcaagccaggaggcgctggagtattcgtagcaggcgacggccacgacgttctccccgtcgtgcagcagttcggtgatgtcgaactcattgggcgtgaagccgtcctcgccatagccgacgaacgcgccgttgacccacacgtagatcgccgtggccatgccgtggaacacgatcgacaccgatccgccggcctgcttggcgtttgccacgggggcggagacggtgaacttcctgcggtagagcgcgacgtgattgttctccgggatgttcggttccaacgggttctcgtggccgtcccacggatactggacggtcacgtacttgtggttcatcagaccggccgtctgcaggtggcccggaacctggatacgctcgaacgaggagtcgtcgaacgacacggccgtcgcgggttcctcttcgaggttgatgtcggcggcctgaacgacctcgacccgccactcgccgtcaaggctctgcttgagatcggaccattgtccgctctgggggtcgcgggtgtaccacttgtggctggaatgggccggagtccggttcacctcgaacaccgtcgggtcggtcagccaagcctgcgatgcgcgatcgacatgtgtgacgtctgtcatgctctcctgctttctgtcattacctcgttgtgaatgatattatggaggaggtcggggcctcctttaccgaaaagaataaacagtttttatataaaacgcaaatcctgtttaccgcttccaaatcactggcactgcttgccgtcgacgctacgccgcgtccatgcaatgtctcggttcagcccatgttatcccatccttgcgacacgctgtttatctccttgtttactaatgctttttacttttggtgataaaacttgtatgcttactttacaaaatcaatgagtgattccatgctctgggttcttaaggagaagattaatgagcaacgaaaatgccgcggacggtgacgtccgcaggaagagtgggttaggccagcgcatcgcctacgcgttcggcaacctcggtcaggccgccttctacaacgcgatgagcacgtacttcatcgtgtatgtcaccagctgcctgttctcgggcgttgacaaggcgcttgcggccaagctgatcggcgtcatcaccagcctcgtggtgatcatccgcatcgccgagatcttcgtcgatccgttgctgggcaacctcgtggacaacaccaccaccaagtggggccgtttccgcccgtggcagttcttcggcggactggtctcctccgtgctgcttgccgtggttttcagcggcatgtttggcctggtgaacgttaactccacattgttcatcgtcgtgttcgtcatcacgttcatcgtgcttgacgtgttctactccctgcgtgacatctcctactggggcatgatcccggcattgtcctccgactcccacgaacgttccacctacaccgccctcggctccttcaccggctccatcggcggcaacgccatcaccatcctcgtgattccggtcgtcacctatttcagctgggtgttcaccggcgagaacgccgagcaccagtcgggttggaccgctttcggcatcatcgtcgcggtgctcggcatcatgaccgcctggaccgtcgccttcggcaccagggaaaaccaaagcgcccttcgcgccaacgccgaagacaacggtggtccgttgcaggcgttcaaggccgtgttccagaacgaccagctgctgtgggtcgccctgtcctacctgctgtacgccatcgcgaacgtgaccaccaccggtgtgcttctcttcctgttcaagttcgtccttgacaatcaggccgctttctccgcgaccggtgtcatcgccatgatcgcgggcctggtcatgtccccgctgtacccgattctgaacaggtacattccgcgccgctacctgtacatcggcggcatggtctccatgatcgtggcttatgtgatgctcgccctgttctccagcaacatcgtcctggtcttcatcgcgctggtgctcttctacgttcccggcacgctcatcatgatgacggtcatcctctccctgaccgactccatcgagtacggccagctgaagaacggcaagcgcaacgaggccgttacgctttccatccgcccgatgctcgataagatcggcggcgctctgtcgaacggcatcgtcggcttcatcgcccttgcggccggcatgacgggtgacgcaaccgccgccgatatgaccccgacgaatatccacgtcttcaagatctgcgcgttctatgccccgctcatcctgatcgtgctcagcctggtggtgttcgtctccaaggtcaagatcaccgagaagatgcacgcgcagatcgttgacgagctcgaagccaagctcgcttccggcgagatcgtcgacgatgaggcgcagaccgtggaggccgccgaagccgccggcgatgaggcgcaggcagttattaagaactgatctcccgttcccatccctcccataaggcccgtccgcctgaaccgcaagatgcggtccgtggcggacgggcctgttcgttcctgcggtcggcggtcatgaacatacccctgtcggttccggcagtggggccggaaccggcggcgtgtcacctgtcggcaa

SEQ ID NO: 214 - DNA, 12367 bp, Unknown
  R101_18m  MAG No. k141_25528
ccagccccgccacaaccagaaaaccgcccttggcgacgttgcctcaggcggttttccagcggaaggagagaaaggagaaagaaggaatggaaaggtgccatgcgggcataacacaacaccgcacatggcgaaactatcgaatcagcccatcgggcgcactggcatcataattgatgtgtacacgcccgatggagcgaattcaatcggtcagaccgatggtcactcgacctcagccagggcatcaatgatgtagttgttgatggtggccttgacggactcgaggtgatcggacttggtggcggcgatgagctcggactgcggcttgtcgaggctgtaggcttcgaggtcggccaaggtgacgttgccctcgtcgatgtccttgccgatgccggagtcgtaggagctgtagcgctcggcctgaagattctggatgaagccgtcctggttcatcttgtcggcaaccagcaggccggcggcgtaggcatccatgccggcgatgtgggagcggaacaggtcctcctcgtagaaggaggtacggcgcggcttggcgtcgaagttcagaccaccgtgaggtccgatggagccggcctgcaggacttcccacatgacggcgacggtctcgtacagatcggtcgggaactcgtccatatcccagccgatgagcttgtcgccctggttggcgtcgagggaaccgaggaagccggactcgcgggccacgcggatctcgtgctggtaggtgtggccggccaggttggcgtggttgccttccaagttcagcttgaagacgtcggtcaggtcgtggttgcgcaggaactcgatggcggtggcggcatcgaagtcgtactggtgcagcgtcggctccttcggcttcggctcgatcaggaactgggcctcaaagccgatttccttggcgtaatctgcgcacatgtggaagaacttggcgatgtggtcggtctcgcgcttcatctcggtgttccacaggttctcgtagccttcgcggccaccccagaacacgtagttctcggcgcccaggcgcttgccgatctccaagctcttcttgagctggccaccggcgtaggcgtagatgtcggcgaacggagaagtggcggcgccggacacgaagcgcgggttggtgaacagggaggaggtgttccacagcagcttgacaccggtggacttcatattctcgtcgatcttgtcaacgaccttgtcgaggttggcgttggtctcgcgcagggtgtcgccttcgggggcgatgtcacgatcgtggaagcagaagtactcgacgcccagcttctggaacagctcgaaagcgtagtcgaccttggccagagcctggtccatcggatcggtgtacttgtagtacgggcggtgcgcggtgccggtgccgaacggatcaaccagttcctggttgaaggtgtgccaccaagcaacgccgaagcgcagccaatccttcatcttcttgccggcaacgaccttgtcggcatcgtagtaatggaaggcgaagtcttccttcggtcctttggcgcggccgacgtactcgatcttgtcaacatcccacagacccatttgggcgctcctttgcagtaggcgatattacggattgcaggaccaataataaaacgaacgaactaagtttgtcaaatgattgaattaatacgccgcgtctcagcgtgttgctagtcattgcaatggttttcgaatgcagtcaaggcacagatagtatgggcaagccaagaaagacaactcagccaagaaaacgagacttgataattgacgtcacgcaattcctcgccggccaccgctgaggccggctccaccaccccgccaactccaacagcaccacccccgccaacaccaccgccatggtcatcaccctgatgatcggctcgtttgtggccatcctcaaccaaacgctgatgatctccgccctgcccacgttgatgcacgagttcgacgtgcccagcagcaccgtgcaatggctgaccaccggattcatgcttaccaacggcatcatgatcccgatcaccgcgttcctcatcgagaccttcaccacccgccagctgttcctgtacgcaatgggcatatttgcagaatgatcttggcgttaatgcactggtgtccggtctggtgatgatgccgagcggcatcgccatgggcatcctgaacccggtggcaagcaagatgtatgaccgtatcggtggccggccgctcgccttactgggcttcgcgatcatgacgtctgcggctgtgctgctggtcaccatcatgaacacgcacaccgcggcggccatgcgcaccggagtgccggaagcggcggcatcggccattggcgtgcgggcttcgttccgcacggtcgccattgtgtgcgcggtctgtttggttgcgtcactcttcattcgtgatcgcggccgccgacttggacagcagcgttaggcgaatccttcaccgattgccggccttcttgatcagcacgtccaaagtaccggcttggcgcgcggcttccacatcttcccagtcgagaccggtgtctttggccctcccgtagaaaaaccgcaccagaccggcaaagtccggtttatatccggtttcccggaatgaacgggccagcgaatcaccgatttgcgggtcatcaggccttcgtgcctcatagatcgggatggaacaggatcgccacacgcctctcacatgtgcgatgcgattgacgatcatgccgccgtgcgcaccatcgtattgcgaggcggcatgtacgtccgccacctcgtagacaccaccatgaatgatgtcctcaactgtcagacgacctttgaccgcgctggcatcgcgaatccagaacatcgaagcgaaattggtgtcatcaagttcgcgaaaatcacgtatctcgcgtgtgccgatacgttcgtccttgtcatacatgaattcggccaaggctaggaatggcgagatacctgcgcccggaccgtgctgcaattcgatacgtaaatcttcggattcattgccggtcagtccaataccgctgacggcgcagtcataggcaaaccaatcccagaaccaccattcgatcctttgcagcacctgcttcggatactttttgcatgggttcagattcacttcgcgataatatatgcgtctcgcttcggcatagacggcgagattgcagcgtttgaacatctcggctacgtctttggtgtccagcattgctggcaaaccggcattttcggcagtagtagtggttgcggtgctcatggtgtttccccttcatgtgatgtggacggcgggctacgttgcccgccgtgaggcacactgtatgacgttcgtgcggcggcccgcaagcccgcatggcgagatggtggataagtggaaaacccaatgattccaaggggtatggaatgtgcataacagtggctaccgtcggtggataaccgcactttcttgcaggttatccactgatcgcgcagctgttatccaccgtctctgggttatccacatcgtctctggcgtgtcgtccactgtcagcagtcgatttctgcttcgtttggcgtgtataagtgcacggtgaagtgtataactccgcgcattaggcatatttgctactgagaaaggtcccgaaatcgccttcgaacgcatagctacactcagcagatgtattcagcatggcaatagacccacttaggcaccggcgaatgattttccctcgcttatagagtcggcaaaggcccaacacctgtcccaacgccgacgctactgcactggcagcgtcggcagaggaccacaacttggcacagcaacgacgctaaaaccgcccagcatcgttacacgtccaagttttggccgctaacgacgcttaatgaacgcttagcgtcggcagcaggtcacgcactggttctccaccgacggtaacgctccttagcgaagccagcccgccactctttggcacatcaccgacgctgagagaacctccagcgaagccaaccagccaaccgctggcaacatgacaccacccacaccctccagcgaagccaaccagccaaccgctggcaacatgacaccacccacacccctcagcgaagccaaccggccagcgcatggcaccccaacaccgctgagaacacccaccccacccgtgcacataaaaaaaaactggtcatagcggttgcgatgtaattgcatcgtaatcgcgatgaccagcctcgggggggggtgggctgcaacgagcaccgaatgaatcagatgacgatgccgttgcagtgatcaacttcgtgttggatgatctgcgcggtccagccggtgaaggtggcgtggcgggcgcggaaccgacggtcctcgtagttgacctcgatacggcggcagcgcagtgtgcggcgttcaccggtcagcgacaaacagccttcctgggtgtcgaaggcaccatccgaagcggtgatcacggggttgagcatcaccgtgatacggccaccgagatcttcgtccacgaagacgatgatgcgcttgctcacgccgatcatgttggcggccatgcccacgcaccgtgaacggttggcctccaacgtatccacgaggtcctgaatagttgcctcgtcgccgggcccagccgcttcagacggtgtgcgcaaaaacgaccgcgaagtcataatagggcgttgcatgttggaatcacgcttcttcgtgccagtggatgttggtgataagcggcagggagatgccggtaccgagcgacatgaccagtcgggcggcgagcagcatcgggaagttgaccgcgagcgcgcccagtaatgtgccggcggtgaaaatcacgatggccatgatgaacagtgttttggtggcgaatttgcgcaccatgaacggcgagctcggaatcgacaccgacagcaagagcagataaccggtgacaagccactgcaccaccgaggcgccgatggagaactcctccatcggcgtggagtaggcgatgttcagtgacgtttccgataggatgccgaggaaggtcaggatcgcgagcgagacgaccgcgatgacgagtttgttggagatcggttgcttgccgccgttaggcagctgtgttgcggaatgagtcacgatcttgttctctcctccattcattcagatattctgactacgacgttggaagtcttcctgcatgagtcgcagagcctcggtcaaggtgcgtaccgtggtttcgcactggtccgaggtcaatccgcccagcagttggctcaaatgcgcgtgatattcctccacatagatgcggcggatatccaagccgcgttcggtgagcgtgagcgtcaccgcacgccgatcggcggcatcggcgtgtttgacgacgagtccgaggtcggccatttcgccgacgagcttggtgatgctcggcgtagtgacgccgaggaatgcgctgacgtcgcccacgcgcgcggtgccggtatcttgcccattcggttcgttgatatgccagacggcgtcgatcacgtggacatagcgcggtttcatacctttcggcaatgccggcatcagttcggtgatggtcttggccttccagcagacatccaggaggctccgcacctcattcaccggaagcaagccggtcttggtatcggttcgggaatcgcacatcgctggcccaacctccaattagttaccaatagtcattaccataagtaactatatgcaggctctagacaaacccaacgacctgcgcgcccgtgtcgagttccgtttcggcataaaaaagccagggggatccctggcttgcaatgcacatatcgctgcaggtttgccgggacctatatgttcccggcaacaacagccgtatatacgttaccgatcagcgctgccctcatcatccttggcacccgccgtggcggcctcagtctccttggcgttccacccggtgacggcattccaaccactccatccgatgaccactagcaagcacagcgagaagacaatagtggcccaattgaacagcgagccatcgttattggcctcgaccagtgactgccagagccagataacgcaggccaagcaggtcaatgcatacatacgggaggtggagcgcgcggtgagtttcatggcggaaaaagtcctttgattacaagaatgacggcagataacagtgtgggatccgcaccagcggcaccggcacgaatcccacatcgaggaggagaaaggggaaggtcagctcttcttgcgcttggatatgatgtccacggcgacggccagcaggagcacgaggcccttgatggtcttcaccacggcggtgtcaacacccataatcgacagaccctggttgataacacccatcacgaatgcaccaatcacagcgcccgggatggtaccaataccaccggtgacggccgtgccaccgatgaagcaggcagcgatggcgtccatctcgaactccataccggcctgagcagttgcggaagccagacgggaaagcatgcagacagcggccactgcggacaggaagcccatgtggacgaacagcaggaagtccacgcggcgggtgttgataccggagaggatggcggccttgcggttgccaccaacggcgtacacgtggcgaccgaacacggtcttggtcaggatgaagttgtagatgaagaccagcacaccgacgatcaccagcatgatcggggtaccaccctgatcagcgttaccggaggaagccagcaggtaggtgacgaaggcgatgacgaccgcgacaagcacaatcttgaggacggtcaggctcatcggctcgggcaccaggccgaccttggccacacgggcgcgcttgcgcagctggctccaggcaaagccgacgatgcacaggatgccgagcacaatggtcagaccgtcgaacggaccccaccagccaaggatgttgggcaggtagttacgggcaatgccacggaattcgagggaggtaatcggcacggattcgccgacgatcacggtggcgagaccacggaagatcaacatgccggccagagtggtaatgaagcccgggatgccgatgacggcgacccagaagccctgccagacgccgacgatcaggccgacgaccagagcgatgacgatggcgagcatccagttgactccggcgcgttccatcagcagtgcacacacaccaccgatgaaggccaccaaggaaccaaccgaaaggtcgatgtgggtggcgatgatgaccatcaccataccaatggccaggatgatcacgtaggcgttctgctggatcagggacacgaaggagttcggcttcagcagcacacctccggtcaggatctcgaaggccacgacgatgatcagcagtgcgccgacaataccgtattgacgggcattgttggcgaccgtggccagcaggccggtcttttcttctttctttgcaggtgttgcagttgcggcgctcatcaggctgccacctccctttccttggtcatacccttcatcaggtattcctgggtaaatccattcttctcgacattgtcggtgacgacaccgtaggacaccgtgtaaatgcggtcgcagataccgatgagctcaggcagctcggaggaaatcacgatgacggccttgcctgcatcggcaagcttatcgatgatttcgtagatctcatacttggcgccgacgtcgatgcctcgggtcggctcatcgaggatgaggatgtccggctgcgagataacccacttggcgagcagcactttctgctggttaccaccggagagggtggagacattcacatcgatgtcatgacacttgatgttgaagtccttgcggtactgttcgacttccttgcgctcaaggttgtcgtccacaaccccgcccttgctgatcttggtcagggaggccagggatgcgttctctcggatgttctgcagcaggttcagaccgttgcccttacgatcctcggtggcgtaggcgagacctgcgtcaatcgcggactgcacgttgggcatcttgacttccttgcccttgacgaacaccttgccggagatgttggaaccgtaagagtggccgaagatggacatggccatttcggtacgacccgcacccatcagacccgccagaccgacgatctcgccggcgtgcacgttgatgttcgcatggtctacgatcacgcgctccgcgtcgagcggatgatgcacggtccaatcctcgacgcgcaggtattcctcgcccggggtattggaggggtggttcgggtacaggttgtgcagcggacgacccaccatcttgcggatgagttcttcctggtcgagcggcgtctccggcgtcacgtacatcacaccgacggtcgaaccgtctcgaatgatggtgacattgtcggcaatggcggcgacctcgttgagtttatgagtgatgatgatgctggtcacgccctgctcgtcacgtagctgacgaaccaggtcaagcaggtgggcggaatcctcatcgttcagtgcagcggtcggctcatcgaggatgagcagcttcacgtccttggacaatgccttggcgatttcgacgagctgctgcttgccgacgccgatgtccataaccctggtatccgggtcttcgggaagtcccacacgatcgagcagcttcttcgcctcggcgcgggtcttgtcccagtcgatcacgccacccttggcctgctcgttgccgatgaagatgttctccgcaatggacaggaacgggctcaacgccagttcctgatgaatgattacgatgccgtcggcctcggaatcattaatagtatggtatttgcattccttgccatcaaaggtgattttgccggaatagctaccgtatgggtacacacccgaaagcacgttcatcagggtcgatttgcctgcaccgttctcgccgcagatggcgtggatctcgccgcgatcgacggaaagattcacatcggtgagggctttgaccggaccgaacgtcttcgtgatgttttccatcgtcaagatggtgtcatttgatgacatgtcatcactcctcgtcacagttctgtgttcatggacatgcggcgcatatcggctatgcgccgcatgtcattgtgtttgtttacggattgcctgatgaggactacttagtcagctcgtcgaagcgatcctgggtgatgtagttggccgtgaccagatcctggaggttgtccttggtgatgttctgggggtcaagcagcttggacggaacgtcgatgttgttgttgttgaacttgccgttcaggccggagacttccttgccctcggcgatctcgacgaccatgtcgtacacggcgtcagccagcttgttcacgtccttgaacacggtctcgccctgcttatccttggcgatgttggcaactgcgatctccatggcgtcctgaccggtgatgtacggccaggagtcggtgcccggcttcatgtcgggacgcttggattcgatggcgttgatcacaccctgggcgatgccgtcgtacggagtgaggaccgcgtcgagcttctcgccgtgggcgtaggtggagtcaaggatggattccatgtccttctgcgcctgctcggtcttccagctcatcacggagatcttctgccaatcctcaacggtgaagtccttggtcacgccaccctgaccgtgctgggacggggagacgagcacgcccttctcgaagtacggctgcagcagatcccaagcgcccttgaagaagtacttggcgttgttgtcatccggggaaccggtgaacagctcgatattgaacgggccggtggcgccatccttaagcttgagctggtcaatgagccacgtggcctcgagcacgccgacctgctccagctggaaggtggcgtagtagtcgacggcgtcggtgttcatgatcagtcgatcgtaggcgatgaccttggcacctgcatcgcgggccttctcaacggcggggcccactgcggtgccgtccttggaagcgaccacgacgatcttggcgtcgttgttgaccatgttctcgatgtcagcgttctgctgggccggcttatcgtcggcgaaggacaggatgaccttgtatccggccttctccagcttggccttcaggttgttgccgtccttgttccaacgctcttcggacttggtcggcatcgaaatgccgatagtggcgcccttttcgatcttggcatcaccgccagttgcctggccgctacggctgccaccgcaggccgcgaggcccgcgcacatggcaacgcctgccaccacggcgacgatcttcttagtgaacttcatttgttctccttcatcttcgaggggatggcgaaccctccttggtcgcccgaacctgagaataacctcaggttcatctcatagaataccgtattgagttaagttgtcaaactcaagaaagcgaatttcccgtcgtttatgttcaaccaatgaacgcaatggcgatttttcgcgcatcacaaggcgacacgccgaaaaatccacgctctgcgcttcgctgtgcctcatgccggtaacgactacactgaactcttatggcaacaaggcttttcggttcgcagacctcgcttcgcgaggcaaaccgcgccaacttgctggccagcatccacaagttcggcgccatgacacaggtcgaactggcagaggtgacaggactgtccactgcgaccgtgtccacgctcgtccatcagcttgtcgacgaagaccagctggagaccaaaaacaccgttcgcaacggtcgcagagccactctggtgacccttgcacggcatcagggcctcggcgtcgggctttggatcgcgcgacgtcatcttacgctttctatcgttgacttctcgaagtcaatcatcgctgagcacacgctccccctgccgttgggccacaaggcggacacaacgctggaacgcgccatgctgctcatcaatgagaccctgagcagcatcgacgccgaagccagcgagctggtcggcatcggcgtggccgtggccgcaccggtggccaccagcgaccacaccatagcgattcccggcattctgcccggatgggacggcgtcgatatcacggccccgttgcgcacggcgttcaacgttcccgtatacgtcgataatgacgcgaatttcgcggcatacggcgaatcccgtatgggcgtggcggcaggcaaacgcaatttcgtatatatctcagccaacgacggggttggcgcaggcatcgtcatcaacggcgaaatcatgcatggcgtgaccggcctggccggtgaaatcggccatatccaggtcgacccgctgggtgccatctgttcgtgcggtaaccgcggctgccttgacaccgtcgtggcggaaaacaggctggtgcagttgctcagcgtcacacacggcaatatgacgctggatgatctggtgtcctttgccaacgaaggcgaccccggttgccgtcgcatcatcgccgacacggccgtgcgtatcggtcaggtggcggctgatctgtgcatcagcgtggatccggaggtcattgtgctcggcggcaagctggccatgaccggcgacgtattcatccaaccgttcaatgaagcgttgcagcgcatgctgttccctgatgccgtggcacccatcgatgtactcgtgtcatcccacccgaacgacaactgcgcgctaggcggcgcattatgcgccatcgagttctcggttcgcaatgacgtcagccagtgaccggtaccaggagaagagtgagaagaaggaacacaccatgaggaattcgagcacacctcctctgctgcggctggaggacatctgtgtgaagttcggcttcgtcgaggcgttgaaatcggtgaatctgtccatccaacgccaggaggttgtcgccatcgtgggcgataacggcgcaggaaagtccactctgatcaaggtcatcgcgggatttctgcagccgggattcggccatatctatctcaacggcgaacaggtgaccattccctcgatcagggaggcggaccgcatgggcatcgcatcggtgttccaggggcaggagttctgcgacaacctggacgtggcctcgaacctgttcctcggcaaggagatcaatcagattggcatacgcgatgacgattcgatgaactcgcgtgcccgttccgtgctgaagaccctgagctcggcgattcgggtcggctcccctatcgcatccttatccgtcggccagcgccagaccgtggccatagcacgcacgctgctcaatgacccgcagcttattctgctggacgaaccgaccgccgcactgtcggtgatgcagtcggcggaagtgctcgcatatatcaagagactgcgctccgaaggccggtccgtggtgatggtctgccacgatctgccggatgtgttcgcggtatccgaccgcattgtcgtgatacgtcaggggcacgtcaccggcgtgcatcgaaccgtcgaaacgtcctatgaggaga

SEQ ID NO: 215 - DNA, 13632 bp, Unknown
  R101_18m  MAG No. k141_25674
catcgtatttgccggcttgccgtatatggtcaacgatttgctggataacgaggtaaccacattcctgcgccgtgcgctacgccgcgaattggataacgtgccgcttccagacgtcaagaatgcgttcttggaaacagttgcggattccggcaagaccatcagtggggaagatgcgcttgaagccgctcgccagtctgaaggatacccgtacatggtgcagcttgttggctactacatgtggcaatccacacaacgtcgaggttcaaatgtcattaccgcggacgacgtgtcgaccggtgtttccgatgcgctgctcgccttcgacgattcaaggacaaactcatccgcccggcagatcatgggcagctggaatttgcggtgccgcatttggggcagtatttgcagtcgttgtagcaccaaatatagggctgggttcattcatttggtaggttgcgcgttcatttggtgggttgtcggcatggtgaggcgttggaatggcggcatttcaatggtcagtgttggagtgcagtgaccaaatgaacgcataattgacctaatgaatgaagtaagccggttgcgggctagtttcgatccagttctatgagcgccgacgcatcttggccacggcattgctgacgcaaatacgcagcacaatggtgaagacgactaccataatccccagaatgccaatgttgaaccagaactgatccgtggtgtgctcccacagatcatcctttttgaacatcggcaccttggtggggccatacagcagatcgttgagcccgatatccgaggcggcggcggagaagccccaacgtccggggaagatcatgctgaccagctcgaggctgtcgcggccggtgaccggaatcatgccgccggagaacaccaactgggccatgaccagcaccaccagcaatggcatcgtctgttctcccgacttcaccaacgccgagccgacttcgcccaacaatgcggaagtccacgcagtcagccaaatcgccaacaccagttcgggtatgccggaatcagtgaccacaccatggtccgggccgggcttgccgaggctgaccgcagtggtcagaatcgccgcctgcaacaaggtctgcaaacccatcacgatgagtttcgaggcggtgtatgacgtgggcgacaaacccaccgcgcgctcgcggccgtaaatcgctcgctcggagacgatgtctcgcacggacaaagccgatcccataaaacaggcacccagtatgacgagcacaagcagctggttcggctcggtggcggcgtctttgaaatcgggctcacccaagccatgagaaccgggcacaaccagcgacagcagtcctaggagcaatggcagcaacagcaggaagatcagcaatccggggtcggcgatgatcaaatgcagctgacgaatcaccagagtgatggtctgtttgatgcggaatggctttgccggtttctcatgctcggtgtgccgcgtgatggtggactcggcctgcatggtgcgctggcgtgaatcagtaatcgaatacacccgttccggagattcggcgacatcgttgaagatgtcggcccattccttgccgttgaacgcctggctcatctcctgcacggtgccgaagaatgccggatggccgccgggagcgagcatgagcacgttatcgcacaacttgttgatatacgacagtgaatgggtgaccacgataaccacgcggccggcatccgccagttggcgcaacatggtcatcaccgtaagatccagcgccgggtcgaggcccgaggtcggttcgtcgagaatcagcagttcgggttcggtgagtagctcgatagcggtggacacgcgcttgcgttggccgccggacagtctgtcaatgcgattcttacggcgagacgtgagttccagctcattgagcacgttgtcgatgatttcggcgcgctcggccttggttgagccgggcaggcgcagcttggcggcgtattcgagcgccgcgtccacagagagcttgcggtgcaccacgtcgtcctgcggcacgaatccgatacggctgcgcaacagttcgatgttctgatgcacgtcgtatccatcaaacagcacgcgcccgtccgtggggctgttgagcccggcgacgatggaggtgaatgttgatttgccggcgccggaaggtccgattacggcggtgagcgtgcccttggcgaatacggcgttgatgccgtcaagcagccgggtgcctttgcccacggtcagtccgatgttttcggcgataaccgcgtcgttgctgacaaacggcgtgcggtcgcacagcacgccttcatgcacgatcaggtcggtgttgccgacggtgacgacgtcgtcttcccgcagccagatcttcgcgacgcggcggccgttgacgtaagtgccgttggcggagttcaggtcagtgagcaggatgccgctgctggtggtttccagcgagcagtgtttgcgggagaccagataatcgttgatgcgaatcaggcaggaggtatcgcggccgatgacgcctgtggtgtcgtgctcggggctgaaggacccgtgcacgcggttggtggtgagttgggattcgagccttaccgcttgcgtgctgcctgccagaacggtgccggcggcattcgatggggaaggggatgcgcagggagacggagatggtgatgcgggtgataccggcactggcgatactgctgtcggtgccactgctgttgggcggggttgctgttgcaggtgcgcgagggccggggatacgcggtgcgaggccagcggggctggcgttggttgcggttgtaccggttgtgccggttgcggtgctggtggtgtgggttgcactactgggcgtgcctgttgcggcgcgagttgcgtgggttgtgccggttgcgctgatggtgccggcggtagcgcaggctgggccacgtttgccgcagggcgtcgcgggggctgtgccggcgtggacggcccgctggttccgacgatgcagacgatggtggcaccttgtgccagcgtcactttggtgctgttcagcagcagtacggaagtggtgtgaatgccgttgatggacagtccgtttgcactacccgtgtcttccaagagccaaccatcgtcggtaaaggtgacgcgagcatgatggtgagatacgtacgggttgtgaatcaccagatcgcaatccggcgcacgcccgatggtcgtggcacgtgcaggattgggggtataggtggcggatccgtagtgaatagtaagggcaggtggcattggttcagacttccgtgttcttcgatctctctgcacacagatgtaccacgaccgcattacccccggtgaacggggtctgactgatggtcagaaactcagcacctcgaccttgccggtgtcgagctggtaacgggcgccgacgatcatcagctggtcggcagccaatgcctgctgaatgatgggggattgttccaccagcgtctcgatggtgtgggccacgtgtacgcgctcgatgtcttcatgcgcgtcgagctcggcttcgcgcgcctgccagacggacatgccggcctggcgcagaataatcgattcggcggcggcgatgtgctcgtcgaggtcgtccatcgcatccgcggcctccagtgagccgtcggcttcggaagtgatggtgtgcatcaggtcgtccagctcctgctcggcggcctcgattgcgccgcagtgctcgtgaccgagcacacagatcaggctgacgtgcagtttcttgaccgcgtactccagcgaggcgataaccgcgctatcgatgagttgcccggcggtgcgcacggtgaacagatcgcccaagccctgatcaaaaatgatttccggaggcacgcgcgagtccgagcaggagagcaccgcggcatccgggttctggccatcaagcagcgtctggcgggtctcctgatcctgccatggatggtcgggcttgccttcggcgaatcggcgattgccttggagcatacggctccacgtcgcatttgcggtcgattcctgttcaacgtctgcctgagccatgaaaacctccattatcagcggactgctggtacccatagtagcgattggaagtgcggattcgcgactgcatgcataatctggctttgcccaaagcataatgagaacgctcacaatctcaatcctgtttaagggtgggccgtgatgatagtcagcacaagggctgtggctggtgtgataaggctcatatgttctgtccgtgcgagccctgtgccgccacactacgatgggttctggtaatcgcctgaagaatcctgaaaggaccgaaaatgactcttctgcagcatgaactgaccgatttcaaggtgaacgcattccagaacaacgagttccacgaagtgaccaaggacgatgtgctcggccactggtccctgttcttcttctacccggccgacttcaccttcgtgtgccccaccgagcttgaagacctggccaagaactacgccaagttcaaggaaatcggctgcgagatctactccgtctcctgcgacacccacttcgtgcacaaggcctggcacgacgccaacgagaagatcgccaagatcgagtacccgatgcttgccgacccgaccgccctgctggccaaggacctcgacacctacaacgaggccgatggcgtggccgagcgtggcgacttcatcgtgagccccgagggcaaggtcgtggcctacgaggtcatctcctccaacgtgggccgcaacgccgaagagctgctgcgccgcgtgcaggcctcccagttcgtccacgagcacggcgaccaggtctgccccgccaactggacccctggcgaggaaaccatcgagcccagcctcgacctcgtcggccagctgtgatcgacactgaataggcggtaaccttggctcccctctctgaggggagctgtcgctgaaagcgactggggggagtgctcgcgagagctagcctgatccgatatgctcccctcagtctcactacgacagctcccctcagagaggggagccagtgtatgtaagggagttttcatgactcagaccaacaatctctatgacgtcgtcgtcattggtggcgggccggctggcctgacggccggcctgtacctggcccgcgctcgctaccgcgtgctgattctcgaaaaggacgatttcggcggccagatcaccatcaccaacgaagtcgtcaactatccgggcgtgggccgcaccacgggccgcgcactcacccagaccatgcgccagcaggctcaggacttcggtgccgaattcctctccgccgaagccaccggtctcgacgtggatggtgacatcaaaaccgtgcacacctcacgcggcgacctcaagaccttcggcatcctcatcgccaccggcgccagcccgcgcaagctgggcttcgagggcgaggccgagtacgccggccgcggcgtggcctactgcgccacctgcgacggcgagttcttcaccggcaaggaagtactggtggtcggcggcggattcgccgcggccgaggaatccgtgttcctgaccaaatacgcctccaaagtcaccgtgctcgtgcgcgaaccggacttcacctgcgatgccgcagtggccgccgaagccaagaacaacccgaagatcgacgtgcgttatcaggtcgagctgaagggcgtcaccgccggccaaggcggcctgcgagaagcctcgatcctgaaccttgccaccggccagaccgaaacgtggaagcccgccgacgccggcaccttcggcatcttcgtgttcgccggctatgtgcccgccaccgatttggtgcgcggcgtggtagagctcgacgaccacggttacgtggtcacgcacgactacctcagaacctcggtgccgggcgtgtacgcggccggcgatctgcgcgtcaagaacctgcgccaagtggtcaccgccaccgccgacggtgcgattgccgccgtggaactggagcgttacgccaagcagatgagcgagaaaaccggcttggtgccgccgcgtcccactgcttccgcttatgaggagtccgaggccaaggccgcctccgccgcctcggccgctggcacgacgcccgccccggctcccgccaaacgcagcgccgatgccgatgccgcagccagcgccgccaagaagcccggcgaactgttctccgccgccgtcaagcagcagcttggcgtggtcttcggacgcatgacccgcccggtcacgctcgctctcgaactggacggcactccgctttcggcggaattgcagggtttcatcggcgagatggttgcgctgtccggcggcaagctgaactcggttgccgttgatgccgcagggctgatcacggcggtggatggtgcttctgtgcctacttctttggtggttggcgagccattggccgtcaccttgccggacggcaccgaactgcccacttatggttcgttggacgattccggccgtgccacgttcgacgtcgccggcgtcctgccgctcgcccgtccgactgtgcgcatctgcgtgccggctgagggcgacggcaaggccggcaaggacggcaatggttcactggtcttcaccggtctggccttccacggcgtaccttccggccacgagttcaactcgttcgtgcttggcctgtacaacgcggccggtcccggccagccgctgggcgatgacctggtcgaacgcgcgaagtccatcacggacccgctgaacatcatgatcctcgtctcgctcacctgcacgatgtgcccggaaaccgtgcttgcttcccagcgcattgcctccctgagcccggccgtgcgcgccgaagcctacgacgtctcgcacttccccgaactcaaggaccagtacggcgcgatgagcgtgccctgcatcgtcatcacccacgccgacggcacccagcaagtcgaattcggcaaaaagagcatcccccaaatgctcgaactggtcggcgcgtaagccgcacgacctcaggtactcaacagcaacaacaacgattctgccaaaatcgtgacgtacatcgattgatgcgatcgatgcgcccgactccggcagaatcgttgttttgcggcagctcagcctcggtcttcgacggccttcgtgacgtttctgtcgccgaggtacttgaccaggctgatgctgatcagggccacgacgaacaggccggtgagcaccgggatgagtgcggcgtagcggtgggcctgatcaggcgcatgggcaactacgaacgaggccaactggttgccggacagaccggcgaacgcccaggcgctcagcgtcagaccgtgcgtggtggagacggttttggtgccgaagtgctgatcaagcagcacgggcagcgtcgagaaaccgccaccatagcccgcgttgacgaggaacagcatggccagcacggcccacagcagagcgttgtcgatgctgttggtgaagatctgcagcaagcacacggcaatcgacatgatgaagattacctgatagacggtctcgcggcgcttcaggtggtcggagagtgtggagaagcccacgcggccagctgtgttgaacacggagtccacggcgagcaccagtccgatgatgccggagatggcggcggcaaacttggcggggctcaggttggcatactgcgggaaggccctgagcacatcgtgcaggatgtccttctcttggctgatgagggccaggccgcaggtgatgttgatatagaaggctatccagatgccccagaacacgggcttcttgaggattgtcttgcggctgacgtgtgaggtcgcgggatcgtacacccagccggccggacgcttgatgagcaggaagccgacgaacatcatcaccgcgtagaccgcggcgaggatgaagaacatgctgaccaggccaaccgtgccgatgagatattccatcagtgggctggcaatggccttggccaggccgaagccggcgacggcgatgccggtggcgaggcccttgttgtcggcgaaccaaagcatcaggttcttgaccggagtcagataaccgacgcccaggccgatgcccatgatcgcgccataacagatgaacacgcccggcaggaagttcagggcgatgctcacgcccgtgccggcgaagccgaccacgaagcagaccatggagacgagtgcggatttcttgatgtttttctccaccattggcccggcaaacgcggcggacatgccgaggaagaagatggcgagtgagaagccccattccacggaggcggggctggcgtggagacggtcagcgataagctgcttgaacacgctccagcaatagacggtaccgattgggatatgaatcagcagtgcgggaataatcgcgctggtccaacgattctcggtaaaccttgccatatatggacggatcctttcgtaactggtgtacgatgacctgccgacccgaacgagagtcgcatcgcccatatccacgcacatcacgacggcatgcccccgtgaaccatccgggctgcacgaatcgaatcaaatcgaatcgtgcgaactgcgaacaattcgctaaacatccttggtgtgcatttcatcggcgctgctggctcttgtcgacgccgacaaacagaactataacgctgttatggggttgctgtggctggtttctgtggtcggaagctatgagctttctcacatcgaaaacagttatatgacggtatcggcgtgattgatacgtgacgtctgcccgtggacgcggcatatccctctcggaaaacaatgactccgtcatgtccatttcttggtttgacatgttttcgtttgcagcgtcggtgctcaccacggtgaccgcggcgttcgagtcgccgggcagggcctcgaccgagggtctcatcctcggctgagatgtgggcggtactatggattcttatcgataaggttcgtgatatgcggagatggtaacgatggtgaccttaaaggatgtcggcgaactggccggagtgaccgccaccaccgcctccgcggccctgcgaggcaaggattacgtcaagcccgaaaccacgcaacgcgtgtgtgacgccgcccgcaaactcggctacaaaatcaacctgtctggccggtccctgcgttctgggcggtccgataccatcaccttccttacctcgggcctcgagggcgactatttctcccatctggccatgtgtgtggctgaggaagtgcacaagcgcgactcgcacatgctcatcgaactgtcccggtatcttaccgacgacaacgatctgtcgtacacgttttcggacggcatcatcgccatcaatgcgccacgtgcggtcgatatcctgaagcggcacccggccgtcatgctggaaaactacgacaccagcctgcccatcgacaccgtgaacgcgccgagcgacgccggctcgcgggcggcaatcgaacaccttatcgcgcgtggctgtgcgcgcatcggcatcgtcggcgacaatcacgatcccaacaatcccaacatcattcccggctcgcgtgatattcgtatgcgggccgccaaggagacgattctcgcggccggactgccgtttgacgagcgccgtgatttcatcaaatcctcgtggtcgattgacggcggtatcgaggccgggcgcggcttggccaagaaaggcaagtgcaagtacgacggtctgtactgcctgaacgacggtattgcgctcggtattctgcgtggtctggcggacgatggcgtaagtgtgccgggcgatgtgcgcgttatcggcttcgacggcctgagccagagcatgtacagcgtgccgactttgaccaccgtggccaccgatttcaagggcatggcggataccgcgctgaccttgcttatgcggcgtatcgagaacctggacgacgagttcttcccgcagaccgtgaatgtgggctataagctcatcgagcgcgaatccactgcggcgtagagtctttggccgtgttgagcttcaattgggtgattggactggcaccagcggctgatatcagatatgccgaaagcagcgatgatcggatttaagttgctggagatgacaggatggattgctctttacccctttcaccatcttgcaataattcttacatgtaagaactctctgttaacatgtaagaattattgcaagatggtgaaaggggatgctcatgttgccggccaaagaaagtttgacggttgagttcaagagtgagcagaagcgccctcaatcgcatgatgaaattgttgacaacgtagtggctctagccaataccgcaggcggcacactgtatctcggtattgaagacgatggcactgtgaccggcgtatgtgacgagcatcgcaatatcaatggacttgcggtactaattttcaataagactgttccgcagcttcccgctcgcgtggcgctcttgtatgagaacgaggtgccgatagtcagtattgaggtggataacagtcagcaaatcgtatctaccagtcaggggaagacattgcagcgccggctgaaagcagacggctcgcctgaggtcgttccgctgtttgtttcccaattcattagccgtttatctcagcaacggttctacgatttcagcgcgcaacctgcaccagaggctcggttggacgatttgaatccagactcacggaacaagttgagaagccatattcgcagtgccaatgcgcaaaactcgttgttgtcttttactgatgaggatttcgatcgggcacttgagctggttgttgatggcccgtatggattgcagccatctgttgctggtctgctcaccattggttcggttgatgctattcatcgatcggttccagccgcatcggctgtttttcaagtgatgaaaggcatgtctccaaaggtcaatatggatccgttcgtgttgcctttggtggatatgtttgatcgtgtaggcgagctgatggagccatggaatcccagccacgaagtcatgagcggcttgattcgtgtcgatctgccagacttcgatcgaggggcattccgtgaggcaatgattaacgctttttgccatcgcgattatgcacgaatgggttcggtgagattcctggttgatgatgatgggttgaccatagctaatcccggaggattcatagagggtgtttccgaagataacctgcttactgcacaaccgcgttcccgcaatccgcagcttgccctgattctgaaagctgccggatatgttgaacgcaccggacgaggcgtggataccatctatgccgggtcggttgcggcgggcggttctttcccggattattcacagtccagtgctgaggaagttatcttgttcttgcgccgtgtggtacctgacgaggcattcgtgaccatgattggcgacgaggaacgtcgacgtggggctccattgccggtctggtcactgattgtgctctcgctgctgcgtgagcatcgtaggcttaccgtggtccaattgtgcgatttttctcatttggagcatcgacgcatcgtgtccgctgttgagaatctggtggaagctggtttggtagagggggtcggtagcgggagctctcgttcgtatatgctgagtgcccgagtgtataaacgttcagaggggctggcgtcttacgtgcgccagcgtgacatcgatgccacccggcgcagtggccttgttctggagttcgccgaaaaaaatgatggtgtcgtcactacggcggatgtcatggatttatttggcctgagctatatcagtgcataccggttgttgaagaagctagaggatgcgggcaagttgcgccgcgaggggaatgggccgtcatcccgatacgtgttgggatgattggcgcgcgtgaaagtaagttctttcatcacctttcaataattctttcatgcaagaactctctgtttacatgtaagaattattgcaagatggtgaaagatgtacacgaaacggggaagccccgctcacatcgagcggggcttccccatatgcgctggtgtgtagatcagcctgtgttctgcaggccggcagcaacgccggagacggtgcacaggatgaggtagatgaatcctgcctgctggctttgcgtgttttgcttcaatttttcttaagcagagtgagacccatcgtatcgttcgattctacgacgaacgttttgcatcaagcgcagataatgtggtgagtgcatattcaacaatggcggacggtcttgatgcacttggtttgacaaatattggaatgagcgaaagcatcctaaaaaaggctgccggtacagacaagcttcctgataagcaggaagctgaagtgagtgctcgggcgttcgctgcattcattgatcagccaagacggtagctcgcataatgcattatgtgtgggcagatgtgtcgtctgcccacacattcgctgttgtgctttcgatttggaattcctctgccagatacggggaaacttctaaaaggccgctatgccgaggaagagtcctgtaataccggtggccatcaatacgatgatggtgatgattccggcgaagatgcgtacaggaagggtttcttttccatggtttgatgggctgtccgcaactaatctcattactccagctgtaacccagcaaactgcgcccaggactagtgccaggaattctcgacaccattccgtttcaagtgcgggaatgccgacgattgatgacgggtcgcttgccagtcttggcggaatagcgcataggatacgctccaatatcaggtaaggggtatcaaaatggatcagagtcaaagcgaatgggagctgtagcgccagtcctatccaccacagcgtgcgtcggatggtcgcgagtctgtcgcccggcctagtgtccggcttgccgccttcgccctccgtcccggcaccgtccgcgggcgtgtggtccccctcgtgcgcgtccgtcgttccgtccgtgtccttctcctcattcatatgtcccctttcgatcatccgagtctgtcactcggccagcgcgcccgttctatgcgcgccgtcgccggccagtctagggccgtgcgacgcgagcggggaggcccgcgtcgcttatcggcacggaacctccccgctcgcttttgtcgatcggtcggccgggaatcagcccgtgttctgcaggccggcggcgacacccgagcaggagtgtcacaaagcccctgccgctctgggtacccaggtggcggtttatgaggacagcatcggtcaactcatcctgcagtggcttcgcaaacctgagtactggtcggaaggtagttccggcacgcaggcactatggcacgcgtacacacctgagtcggttactcccagtgaattggccttgtcgcgtcaggcatgcggtgtcgcatgtgatgcacagcctgtcatcaaaggcacgctgcccaatcgggacatcgcccatatggccgccacatccttgggatacttgacatggggcgttacgaacgatccaatggactatggtctcggtgatctgggcggatgggccctggatttgttgcagatttggggaagctacctggcgaatgccccggaagaggacctggcgtcatggctgcacgctcatctcggcgagcaagacgcccgtatgggattcagttacagcgatgttctcgcggactgtgatgcatggttgctggcgcggtccatgcagagcgattcctccgaaaggtctttgtccaccgctatgcgggac

SEQ ID NO: 216 - DNA, 6776 bp, Unknown
  R101_18m  MAG No. k141_25981
caagccgaccacgaaacaggacgcccagccctctacgacaacgctatcgacaccgactacacccactcaatcggcattcaaaaaggccaaatctaacccccgcgacacgccgagccagacacacattttgacccttaacccacaatggtgcttttgcccacacggcgagcgccttcgatgagaagagcctcacgcccacccgctttttgtttccatgcgatcagcttatccagcatcttgcgcttcaacatgagcaatcacctcattacacgaaaacaacagtataggcatatgctattctacacgaaaacagaagtatagagatggccgattctacacgaaaacaacggtatggaaacatgcaccgaaccggctcacccccaatctctcccccatcacaccggcggcctgttcgattgtgcggttttgtgcgaatggctcacacggttcttagtgagaaccgttctctgcgcacctgaccctagaaccggatcagcgccttgatgaccttgcgctggtccatcgcctcgtaggcgtcctggatatggtcgaggtcgtactcggcggtgaacacgcggccggggttgatctcgcccttgagcaccgcgtccagcagaccctcatcaaggtcatagtggcgcacgggagccgggccgcccttgatgccgatgttgccgtagaacgtgccttcggcgctgatctccacgtcgtgcggcaggcccacacgaccaatcacgccaccgcggcgaatcaggccaatcgccgtgtcgaaggactgcttggagcccacgcattcgagaactgcgtccgcaccatagccgccggtcatctccagcaccttgtcaatagcctcttggccacgctcgggcacgatatcagtcgcaccgaattcgcgggcgagcgccgcgcgatcctcgtgacggctcatggcaataacgcgcgtggcaccgcgcatcttggcggcaatcacaccgcacaggccaactgcgccatcgcccatgaccacggcggtgtcaccgggcttgacctcggcagaaaccgccgcgtgataaccggtggacatcacatcggaaatggtcagcagcgatgcgagctgctcatcggaataatcttccggtgaaccgggcaccttgaccacggtgccgtccgcctcgggcacacgcaggtattcggcctgacaggcggagaagtagccgccgtgcgggcacacggattcgaagccggccttgcataccgggcacttgccgcagctgtatgggaatggcacaaccacgaaatcgccgggcttgacggattcgaccgccgcgccaacctcttcgaccacaccgatggactcgtgacccacctggctgtgtgcggcctgtccgctcagcccacggaagaaccacaaatcagagccgcacacgcacgtgcgcaccacgcggatcacgatgtcatcatcctgttcaagcatcgccttcggcacttcttccacggtcatcttgccaggctccacgaaaatcgcagctttcatggtttcagacatacgttcataactccttgttttccggcatcgagcgcttaaggcccgttatcctcgtgttctattaaacaataatcgccttgcattaaccaatagccataaaccatgtttcgccatacccatgaggtatggcaacaaccgagcaattcactgcgataggccaatatccgagatacgctcactgttcgattcgtcgccatgagtaatctggagaaccggcgatggaacccgcctgaactcgtttcgaaccgcacactgctgatagttcctacacacgatttgatattgcatggaatcgttgtgtcttcagcaggattcagcggtttcaggaaaggctattatggattcgcaatccccatccgcaggtgcccggccgattacgcacacgaccactcccccggcgcgcaagctccccgatattcatcttgatattgtgttggtcgtcttctgcggcggtgcgatcggcaccgctatccgctatgcgttcgcacagattcccgcggctggcagcttccataccggcacgtttgtggccaacatgctggcttgcttctgctatgcagggttgaccgcttacttggccggcgcttcccggttcggcgcacgttccaaagaacttgccagtcgcggactcggcatgggcgtatgcggtggtttgtctacgatgtcgacactcgcgctggaaggttttaccgcaatccgcgacggtcaggtggcggccggcattgcctatctactggtgacgttcgcgctgggtctggtttgtgcgtctgccggcgtgtgggcaggaacgcatctggccggctcctcgaacgtatccgccgaagcgtccgctgatacgaatgccgctacgaccagcaagggaggtaaggcgtgatgaccgtattcctaccaatcttggtctgcctgtgcggcggcgtaggcgcctcctgccgctatctgcttgacgtgaccatcaaaacgtactggcagcgcgcattcccactttccacgttcaccatcaatctcatcgccggattcctagccggtttggtcgcggcgctggcactcggcgggacacttgatgaaccatggcggctagtgctggccaccggtttcctcggcggcttctccacgttctcgaccgcaatcaacgaaatggtgacgctcttccgcaaacaccgctaccccaccgcagcggcctatctggtgctgtcgctgggtgtgccggtcgttgctgcggcctgcggttttctcgtctgaccgccacgccgattcccgacgcggtcagcggtatcattgcgaggtcgaacgtcacaggtacatccgggaggtatatgggcatggcgaacaatggagcggatgtgaagccgaatcaaggtgtgggcgccacaaatacctcgaccacaacgaatactgcggaaaataccgcgggcacggcaaccccgaagcaaaatggactcgccgtgctgggcaagtatgtgggtgtttccgccacgcagaccattgtggagtatgcgacgttcgccattctgcacttgatcggcgtaccctcacagatcgccaacggcatcgccgtggtgtgttcggcgacctacaacttcgtgatgaaccgcaacgtgacattcaaatcgtccagcaacttcacccgttccgtggcgctgttcgtgctgctgtggatctggaacttcacgttcagcacgctgctgatcggctggatgccgggtgcgaccgggctgagtccatatgtggtgaagttcattgcgatggcctgccagttcggctggggttatccgttgtgcaagtacgtgatttttaggtgacacattccaattgctcactgtcgttcgccttcgcctatttgtatttggagcgcttatcagaagaacagcatcgcaacacctgcggcgaagcacatgagcagaatcgatgtcaggaagctggcgagcatcggcttcttgcccttggaagcgatggccttgaagttcacgttgatgccgagcgcggccatggccatgccgagcacgatgtacgcaaagtccacgagctgcggggtgatggaggcgatgagcggcacgaaggtgccgatgatcgaagcgccgatgaagccgagcatgaaccacgggaaggccacagtcttcttgccggtgttctccacctcggagtgcttcttctcccaccagatagcgatgatgatggccgcgaacacgagcatgagcacgcgggaaagcttcatgatggtggcgatgtccaccgcgccgaaagcgtcgccggcggcgaccgcgtgggcgatttcgtgcagggaagcaccggcggtgatgcccagctggtccttggtcatgccggccagcgggccgagcgcgatctccagcaacgcgaacacagtacccataatggctacgatggccacggccatggtcacgtcgttgtccttctcgtcctgcttgtcctcaggcaccttgatggaaccggctaggcccatgacggcggccgcaccgcagatgccggtgccaccggcggtcaggatggcgagcatcgggtcgacaccgagcttgcgggcgatggcatagcacacgatgatggtcagcgtgacgaccacagctgcgatcggcagacacttgatgccctgcgtgaacagcacggcgaggttgagcttgaaaccgagcaggatgatgccgaggcgcagcagcttgttggaaatcaggccagcggcgtccttgacgcctgccttgcggccatcattggaaccgacgtaggcactgcggatcgggaactggatgatcataccgatgagcagcgcgatgataagcgcgccgaacaggctgaatccggggaactgcttgagccaggaggcgaacagcgaggccagcagagtcagaacgccaatgaacaacatgtcaacggtggtaatgcgcttccaccattttgtacagaactctctcacggtgtctattgaagctcaagcatttacatcggtcaaatcattgcaaccaatacatatcatcgattttgtcgatacctaattgatctccctctggtgagggaggtggccgccgcaggcggacggagagagagaaacaacgttcgcgacctcccctcagtcgactatctgactacccgcgcagcgcagcaataatcatctccgccaactcccgctgatcgtgcgtcagaccggatctcggcaccagcgcatagaaccgccgcacaaactcatcgccaagctcccgctgcaccggcacgcccgccggcacggcggcttccgaaatcaacgactgcccgaacccggcggacagcgccgccacaatcgccgcattactggacacttccatcgtgcgtgcaggcacaacctgagcggtcttgaaatacaaatccgtgtaataccgcacgccggaaccgtgctcgcgcaccatccacacgccgtcgggctcccccgccaacaccagccggtcctcgcacagggtgacgcggtccaccgaatcgttcacgatcggcttttccaccacgccgagctgcacggccttcatgctgacccgttcgagaatcgcatccgagttcatcacgtgtacggcgaagtcgaaactgtccatgttccgagccatcaccggcaacgccttcggcagcagaatcgccgcggtcgtgtgcgagaacgaaacggccagcggctcacgcgcctcctgcacgcgggcgatctgctcacgcgtatcccgccataatccgtcgatgccgatggcggtctggtacagcatccgcccggcctgtgtgggcgtcacgtcgcttttcgcattgcgcacgaacagcggcgcgccgaccatctgctccaattgggcgatacgcgacgacaccgtcgactgcgacaccttcagttcgtcggcagccagcgtgaactggcccacctcgtatacggcgaccagggtttcgagcagagggaacatggtttaactgtacgctgtatgatgcacgaatatttcaattagcttgggcgtagccctgggccacggacctggaccaccctcagtctcgctttgcgagccagctcccgccagcgggactccaatggttttcatatcactatgcttcgcgcagttttgcgagctgtgttttggccttgtggagcttggcatagatttcattgcgctgaacaggattcttgacgcgctgatggtcgcgggtgagcttgtccacttcggattcgagccgagcaatttcagtatggcgaatgatgcgcgcatccagattttcgatctccggcgtgcccagaatggtctgtgagcacagcgaggcccacagctcatcaatagtagagccggccagctccagctgggcctcccccgccggctgccaatcgccggcatatacccgatagatcggcgtgtggccggcacgccccggtatcgcccgacgcacggcgaacgcacattcctcacgtttgctgccctcgaacggcacgtcgcgtacgcacacgaacacgatgcccgatttacgctgcccggcaatcaaatcgatgacctcgttcggtatgccagtggctttggccgtaagcttcagtccgatgaccagcacttccggaaccagtttgccgtccgcaagcccagtgttaatcgaccggaccaacgccagcatggtaatggattcgatttcgttcaccaatcgctgcttgagtttgcctgaaatcggtgccttgcccacgaacaaggctttcggcagtgtgcctttggcttcgggaatcgccgtggagacgggcagtcccagtgaaagcgcggatacggaaccacagtgtgcggcttgcgaaccagtcatcatcgaccttctttcccggcctgccatcagtgtcataccctcgcagtgcagcagtccgtttatctattggaaagcaacactagcgcatccaggccggaagtcgtggtacatatccatatcctgctgcggttataggaaatcccctccgagtttcctcgaaggggatttcttaagtcgctagttcaagcgaagattcttgtctgatgataatcaggcgaggatcttggtcacacgaccggagccaacggtgtggccgccttcacgcacagcgaaggtcaggccctcctccatggcgatgggctgaatcagctcaacggtgaaggtggcgtggtcgccgggctgaaccatctcgacgccttccggcagctcgatgacgccggtgacgtcggtggtgcggaagtagaactgcggacggtagttggagaagaacggcgagtgacggccgccttcgtccttggtcagcacgtagacttcgccc

SEQ ID NO: 217 - DNA, 10882 bp, Unknown
  R101_18m  MAG No. k141_26998
agcacgtgtcaacgtggtgtacgcctccgattggaaaggctccacgttccagccgcttgccgatatatacgatggcaacagcacaagcaagaacacaaccgaacaatcggaatgatcaagccgttacaaccaggagatggaatcatgactgatgaaaccaaggaattcgcctccatcgaggatgcgacaccgaccacggccataccttccgaaaccgaagcgaccactgcgacaacaaccatggtgaccgtcgatgaccgaaccgataccacggtgctgccatccgcagctgatgatgacgaaacggctgtgctgcccgtcaccgacaatcatgcggatgcgtcggtctcggatgtggatacgcaggcgacaactgcctctccatcgcccatcgaaccatccacagatcggattgccctggaaacagttgccgatgccgtggagggggatggtgggccgattccatctgccgatgatgtaccgatgtacgcagcatcttcagcgcaaccttcctatgagcagtctcagaccgccggcaaaccatgccagcctggggggagcgccaagaacgtccagaatgctaaggatgtcaagagtgccaagaacatccagaaacagagcatcagcgcgcttactgtggtattcggactattaggcgtgattatcggcgtgatcgcgctggttttcgggtgcatatctccggatcggatgatttcgctgttctcgccgaatccgcaattgctgacggctattatctgcgccgtagtgggacttattctggtaatagtggccgttgtatgggccatagtcggtgccgtcaagaagagaaaatagcgttacaaccattgcattacggtcccagtagaagcacattatgacgggagccgaccgttctatgctgatggggggaggcatagtaactatgaaacggatttcggcgcggcgggtagcgagcgtcatcgccaccgcgatggcgatgacgctggtattcgccacacttggctgggcgatgatgccgcaatggaacacacggccctacaccaagcacatcgctatcgcttctgccgacaccaccatcacccctgcccatgcgaacattccccacgaggggcgatatagtacgcgtgaaacccgactatccatcaagaccggcgacggcgtcacgctacccgccgtactacgtgaaccggtcgacgctcccgggccacgcccggcttgtctgttcattcacgggtccggtaccagcggtgccgaggatttcggcgatatcgccaacgccatggcctctgccggcatcgtgaccttggtgccggccaagcgcaacgacaactacaccgtgctgcatcgcgactacccgcgttttgctcgcgaatacgggcgttcgctcgacgtgctgcgtggcataagcggcgtggaccccgccaaaaccggcatctacgccgaatccgaaggcacctggatcgccacgattctaacctcgaaacggcaagacattgcctttgccatacttacatccgcaccggtgttcaatggacgtgagcaaatggccatggctgtcagcgcctatacgcatgaggccggcgcgcccaagcccgtggtcaaagacatggccaaattgatgtcgctggactacgcgccattcgatctggcctatgccgactttgatgccgaccggtatctgaaatccctcaccatgccggtgctggtgaactacggcacctacgatacggccatgcccatcgaacagggggcgcagcggatcatcgccacggccaacaagtccggcaacgagaacgtcaccgtacgctattttgccggcaaccatcagatgcgggctggtgagggcttattcaccccgaacctgccattggccgaaggctatacgcaagcgctggaaaattgggtgaacggtgtgactgccggaaccaaagccgatggatgggcaacgccccaagtcgccggtgcgacacctcaccagcgcttcgccgcgccgcaacgtaccagatccggtatcgtcggctcgctcggcgtgctggccggtctgatggtggcagggcccgtgctgatcgtgatggcggcgatattgggtattggcttgactgtgttttcttggctacagacgttgctggccgggcgacgtagtgtggcgactgtgcgtgccatgcatgcgacgccgagtgggctgggagccgcccaacagcgtacgttgcacggcattgccggcttatctgccggtatcggcacagcggtgatggtgattaccgtgctgttgtatggctatatgagcgccgtaggcgtatcggctgtattggttatgcctcaaccgcggctgttttcccttgggtggagggcattgcaggtgctgaccgtgctgttggtcgtgctgttcgcgtgggaactggaacgtatgtggcggtatcgcgccagcattatcggcgtgcgtcgtgtcatttgcgtgatggtgacactggctgcacttgtcacattgacgatattgtctttctgggggttgttcagtctgtgatattcacggtcgttaccggctccttcccgaatatgtgccactgagtcgccgtgagcgtcacaaattcgggaaggtggatggggcgtgacggcgtggaggcactgtcgtcagcgctgagcggcttcagcctcatccaaagtgtcgaaaccgccgagctggactgtgtgcaacaaggtttcctcagtgatattgcgttgcgggctggctgcggcgcgctcgctaatcatcacctcgtagagctggaaggtccgttcggaatacgtaccaagctcgccgcgcagataggtttcgaatgaggtggcagatggtgtgtcttcggcggtggtgagtacgcgcatcgcctcgccgagcttggggtagcgctcgcggaaatccttggcccaggcgacctgctgggcgatgacctgttcctgacgggccacgcgctcttcagagggacgcggaatatacggctctatgttcttcgtgaaatcttccggcgcggtggaggccatcatgcggccgtatttttcggtcacgaggttgcggcccacgtggtcggccgcgtcaagatcagcggcatagctggtgagtaatggccgctcccatgtgaggaactgggccagccgcatctggtggaacaccggccagttgccttggcatgccgcgcgtccaccctcattgttggtgcgctggaactgatcccattcatggcgcacaatagcctcgcgcagttcatcatcagtcagttcgttggtcatcgacgttcctttcactaatatctccctctgatgagggagatggcacggcgaagccgtgacagagggagggaagcggcggctgtactgaggtccctccctcagtacagccgcaggctgacagctccctctgatgagggagctctaaagcgccggatcatcagagggagcttgaatctacaaacttttaagcaccggatcatcggagacgatgtggtcctcgacatacgggcgctgccattcgaggaaggtctcgccggacgtggtcaggtgttcgcgtttgagttccctgacgatatccaccgcaatctgctccacaacatcgttgattttctcgattgctggagccgcgcccttgccgccttcgccgaatccggccccgccatagcaggctgtcgaactcaatcgcatcacggtttccaactgttcgcccacgttcggcaacagcgcgaacatcgagccagacagcttgcgcaatgctgcgaactgccacttgtaatacggcatatagcccaccaccatcggcacgttaaccaggaacaccaacgaggcggtggcctgcacgaactcgtggatggacagccatgcggccgcgccgtcgccgcgcttcaacgaacgcggcagattatattgaccggcttgggcgatcatgcccaatcgcttggaaatcaaggcaagccgcacgtcgtcgggcatatccttgaacccttggcgtgttttggagaactgcccagtggggtctgcgaatacttcgccattggtggctgcggccagagtcgattcagccagcatcagccactcgtgcggcgcggtttgcgcgggcgcagtgcgatacccggtgatcgactcaaagaagtcaccgatgcggaacacgccgtcacggcggttggcaccttgtgcgcggggcgtgacggggaagagcggtgcatcaatcggagtcgtcatcgcttccgccacatcagaggacgccgcgcctgacttggcagtggcggcatcgtccgtagcggtaccgggggtgggtgcgtttgccgcatcgggtatgatggtggagcctgcacctgcggaggggaatgccccggaagcatcggacctggcatgcgcctcgaacgtcacgcggccttgcgcatccacgctgaacttgcgcggcagcgcctcgtaatcggcctcaagttgctcgccgatggccgcgtaatcctcatccgtaagccacaggcagaagcgcgggccgaaatcgtggtcctgcgaatacgcatcatcgaatccgtagcattccgagccatgacccaccagaccggaggcgatacgcccggcatactgcggatacttcgccgcaatcatcggcttgcccatctgcgtccagaacgcgcgggccagcttcagtccggacaccgggcatgcggaaacggcctcggccgcgcccgcagaaccggtcgacaccgaaacggtggatggggaagatgtcgcgtccgcaccggtcttgccctgtgccgggctgtccggcagccgtgatccggactggggcagcgcgcctgcatcgccggcaacacccgcattgtcaaccgtcaccccggccttcgccgcctcttcctcggcctgccgcagattgtcggcggtgatacgccagtagtcggtgtccttgccgtaacattcctcgatcacggccagcgcatgccggtatccagtaaccgcatccgcatgccgtctctcggcaaagcacacctgcgcgaagcccgccagtgcggaggcataatgcgcggaatgttccagatggccggtgcgatagatttccagtgccttggctgcatgccaatgcgcgccctccaacttgtgttcggtcagcagggtcaacgccagattcgtgtgcgagctggccacgtcgatatccgcgtccgggttcacgctcgaggcttcgataatgcgcagcgcttcacgcaactccagttccgccttgtcgggccgattcgtctcgctgtagagcatcgacagattgttgtgcagtgctgcgagcctacggtcggtgggtgccagcgaatgccggcagacactctgcgcctgatgatacaaatcctcggcctgatcgtattgttgggccgcgcgcatcgcggtagcgcaattgattagcgtggtggcccacgcctcggatgtgccggtggtcaagcccatacgagcggccagttccagcgcccgctgcacaatccactgattctccttgtgccggccctgcgagcgatagaagcccatcgtttcgttgagtacggtgagcagtccggcctcgtcgccggcgttttccgcgtccaccatcgcctgttccaagtacggaccggcttcggtggctgccgcgtggcgatcgaaaatcgcgtccagtccgttcaggaattgttgggtatcaaaggttgcgggcgattgatcggcatcgtccgtggcctggttcgcagtagaatcggcaccttgcgctgcggccgccgcatcggtgtcgtcggcatcgtctggaccatgcgcgaattgtgcggcgaattgtttgagcagtgcttcctcgtccataccgccagacctccctgaatcgtgtctgatttcagtctattaatactgtgaacaaacgcgtcagggagtttgctgtgagcttggtctcagtccaccttgatttcgcgcatgcgatgaatggcgtcggtatcggtttcgcagcgccacgagtagaaggccagcagccctacggcaagcagagccagcggcataccgcccagaccggtatagcgatagttcatcgagaaagtggtgagcatcgcgccgccgacaatcgagccgatggcattgccgaagttgaaggccacctgcacggctgcgccggcgatgagctcgccgccgccttggccggcttcggtcatcaacagctgttgcggagcggagatgaagaacaggccgaaggcgatccagaaggtcagcaaagcagtagtgccctggtttcccggcagtagcaaaaccatcagcaagccgatgcaggaaatcgtctgacccagcgcggcagtgccggcgtggcgccatttatctgtgatgcgaccgccgataagaccgcctatcaccatgccgaagccggcaagcatcatcaatagcggtaccaggttagacgaccagccaccggtcttctgcagccaaggggagacgtagctccaccagcagaacacgcctgcgttgccggtgaatacggcggccagaatcacccacggtccacgacgagtaaggaatttgaactgaccggcgatgccggcgtccttaatcggcgcaacgaaggggatccatgccagaactagcacgatggtcattgccgcccatgcagccagaataccgaatgcgaggcgccaggataggaactcagccatcaaggtgcccgccggtacgccgagcatattggctacggtttggccggtgaccattaccgatacggcttgtgcttctttgcccttgtcggccaaggttttggcgatgagtgtggcggtgccgaaaaatgcgccgtgcggcaggccggcaatgaagcgcgcgacaatcagcgtggcggcattgaccgagaacgcggaggccagattaccgataagcgcaatcgccataaacaatatgatgaggttcttcggcggcaccttgcggccgaacaccagaatcagtgtgccgaagcacacgccgatcgcatacgcggaaatgtaatggcctgcggtggggatgcccacgccggtggcggccgcggcctgcggcagaatacccatcatcacgaactcggcggcaccgagaatgaacgcgcccgaagccagtgcaagcagactcttcttcatggttcctctaattacttcagtattacttacaaaaacagtgcggcaatcgattgattcgagcgatatattacggtggtccgccaacaaatacgggccttgccgcgacgcggtttgtcgctgtgcgcggcgggttgtttaccgctgtccgatcgctggtctgattgttgggttaggaaacgaaaaaccggattgctgatttctcaacaatccggtccagttgtcgggctggcgggatttgaacccgcggcctcttcgtcccgaacgaagcgcgctaccaagctgcgctacagcccgtttggcaacagacgtaaatattacattgtggtggtggacaatgcaaatcggcatgtcgcgagtgttgcgtgatggtggattcgccgtgtgtacaggtctctcaagccttgtgcagagccggttttgcgtcatgtgagcgggtgttcagatggccgtacggtctgccgggctcataatcgccggccttgcgtacactgatgaatcatggctgaagttgtcgaaaataccgaaaacactgagaatgaaaccccggccgtcccgcagatgagcaccgtcgaacgtgcggaaatgctgctcgagcaggacgccaccatccgcgagaagatcaagtccggtgccacgctggacgaagccgtggacccctccaacaaggagttcggcccgctggctcaccccgagcaggtgcagatgcgcgtggccaagcgcgcgatgatgcttgaggccggcatcgccccctacccggtgcacttggacgtcaccgacaccatcgaggcggtccgcgccaagtatgacggcaagctcgaggctggcgaagagaccgaagacatggtcggcattgctggccgcgtgctgttcctgcgcaacgcgggcggcctgtgcttcgtgcagctgtccgccggtgacggtaccaagattcagggcatgatctccaagaaggagattggcgccgactcgctcaagcagttcaagcagctcgtcgaccttggcgatcacctgtacctcaagggccgcgtcatcgcctccaagaccggcgagctgtccgtattcgccactgagtgggctatcgcctccaaggccctgcagccgctgccggccctgcacaaggacctgaacgaagacacccgcacccgcaagccgtacatcggcatgatcgcggacgagaacatccgcaacatggtgcgcaaccgctccaaggccgtggcctccctgcgccgcacctttgacgaccacgacttcctcgaggtcgaaaccccgatgctgcagaccctgcacggtggcgcggccgcccgcccgttcaccacgcacatgaacgccttcgaccttgacctgtaccttcgcatcgccccggaactgttcctcaagcgctgcctggtcggcggcatcgatcgcgtgttcgaaatcaaccgcgacttccgcaatgagggcgtcgacgccacgcacgcccccgaattcaccatggtcgaggcctaccaggcctatggcacctatgattccatcggccagctggtcaaggagctcgtgcagaagaccgccatggacgtctacggctcgcacaaggtcaccctgctcgacggcaccgaatacgacttcggcggcgaatggaagaccatcagcatgtacgattcgctgtccgaggcattgggcgaggaaatcgtgccgaacggcggccctgagcatcccggcacctccgttgagcatttgggcgccatcgccgacaagctcggcgtggagcgcgacgacgtggagaaccacggcaagctcgtcgaacacctgtgggagcacttctacgaggacaagctttacgagcccaccttcgtgcgtgacttcccggtcgaaacctccccgctggtcaagggccaccgcaccaagcccggcgtggtggagaagtgggatctctacgtgcgcggcttcgagctggctaccggctactccgagctcaacgacccgatcgtgcagcgtgagcgtttcgtggcccaggccaaggacgcactcgccggcgacgaagaggcctgcgacatcgatgaggacttcctcgaggctctcggcgtgggcatgcctccggccggcggtatgggtatgggcattgatcgactgcttatcgccttgaccggtgccacgattcgcgagaccatcaccttcccgctggtcaagccgctcgttggctgattaggcatactctggctcccctcagagaggggagccagagttatatatgaaagggattgcttatgtctatcggcttgtgggttcggggcgcgcgtcccaagaccttggtcacttccatcgcgtcggtgatggttggggcggtgatggcgtacgtgcatatcgagcggtcgggcacctgcatcgcaatatatccagaaccggcctcctgcgccacggcccgtgaacagcagaccctgctgatggaccgattctggccggtgaccatcctgtgcctgctagtcgcgctgttcctgcaaatcgccgtcaactatgcgaacgactattccgacggcatccgcggcactgacgccgggcgtgacacggacgaatcgaaatcaggcaaaccccagcgactgaccgcatccggactggtaccggccaagcacgtactgttcgcggcgatgatttgcgctgccatcgcctgcatatgcggtgttgtggcggtcgtgctcgcccaagcatggtggttgctggccgtgggcgcggcctccttgctggccggctggttctacaccggtgacaagcatccgtatggatacgtcgggctgggagaagtcggcgtgttcctgttcttcggcttggctgcggtattgggcaccgaatacgcgctgtgcggcacggtggacgtcggcggactattgggtgctgtggcggctggcctgttctcctgcctgatcatgatggtgaacaatatccgtgacatcgacgaggatcgtgagcatggcaaacacacgctggccgtacggctgggggagtccggcgcgcgtacgttgctgattgtgtgctgcgtcatcgcatggatcatcgccctgctgatgtgcggtacattatggtggccgtggggtgcggtgctgttgctctcgggcaccggaatacctgtgcgcatggtctccagcgtgaataaacgtcaattccgcccggctctgcccgccgccagcttccagaccttgctgtttgcggtggtgctggcggttgccgtggcgctatgagagcgaaataataagacgaatactcgtgtttgggcgcacgcggctgtagactgaaccgtatgacttataaactagtactgctccgtcatggacagagcgcatggaataaaaccaaccagttcaccggctgggtcgacgtaccgctgaccgagcagggtgaagccgaagccaagcgtggcggcgagctgctcaaggagaagaacgtccttccggacatcgtgttcacctccctgctgcgtcgcgccatcaacaccgccaacatcgctctggatgccgcagatcgtctgtggattccggttcagcgtgactggcgtctcaacgagcgtcactacggcgctctgcagggcaagaacaagaccgagatccgcgaagagtacggcgacgagaagttcatgctgtggcgccgttcttacgccaccccgccgcccgagatcgacccgaacgaccagtacgcccagaacaacgacccgcgctacgccggcgatccggttccggaagccgagtgcctggccaacgttgttgagcgtgtgaagccgtacttcgagtccgctatcgagccggagctcaaggccggcaagaccgtgctgattgcgg

SEQ ID NO: 218 - DNA, 18305 bp, Unknown
  R101_18m  MAG No. k141_28182
cgttcctgcggtcggcggtcatgaacatacccatgtcggttccggcagtggggccggaaccggcggcgtgtcgactatcggccaggagtgtctatcagctagtatcagctggtatccgatatgggccgtggccctgcgccgcctgccaaaggagataaccgtgcgtgcatgacgtgacttcgcatggccaaaactgctgaccgcggacggacgcggcatcgctttcggtggcgactatagtcccgaccaatggccggaggaaatctgggatgacgacatccgcctgatgggccaggccggcgtcaacaccgtggcccttgccatcttcagctgagatcgcctccagcccatcgaagaccattgggatttcgactggctcgatcgcgtcatcgacaagctcggtgacgtgaccgtcgccggaccgcatgtgcaggtgcttgcctcgtatgccggcgaagaagcggatgagtgggagcttgacggcatggccgcgatcacccgcaacacgtacggcgaaggggaggcgtatttcctcggctgcgatctgggcgtgagcgatctgacgcgattcgtgggaggctggcttgccgcgcagccgcaggatggccggcagccggaagccaacctgcggtcgcccgccagcggcgtgacctctgacgttctgcacaccgtgcgtcaatccgacgacgccatattcgacttctatctgacacgtggcagatcggatgtcgaactgcgcgacatcgcaggggagccgatcgtcctgttccgggcggaacggggcagtgacggcggcgcgtatacggtgcatcgcaatggcgttttcgtgacgaagcgcccgaacccgtcggtgtagtcagttgcgacgaaacaggagggcggagccgcggacggttttgtgagacggtccgcggcctcaccgttggaagccgcggactcggatcatcagcaacggacgcgccgttgatttccacttccggagcaacgatggtgagctttgccgcgacgagatgctgcaggacggtgccgacgtacatggtgcccggattctcccttcgccgctgcgctgcctgccgtagcagatgttccacggccgcatcaacggaaagcgagttgtcggactccagcttgaatggtttgctggtgaagaacgcctgaattcgtttgacccagtattgctcgatctcggtgaattgctctgctgtcggacgtaattcattgatgagctcggcatagtcatgcatcagcgccatggtgccgcggctggttcgtcccttaaaggttgaaccgatggaaccgtcattcattactttttcaacgataccgacacgctcattcgattgtgtccaatactgctttctttctgcatgaacaacggtactcggcaaggcggtaacgatagtcgcaaaggctaagaagcccgtacataatcgttttttttgtagtgtttcagattttcagtagaatggcgacagccaaatcccgctggcttgctagtaaagcgttgtcctcggggggagttttgtttgttgttgaaagataacgcggcatcgaatagataggggaggcccggcatgggacgtcatcagcgtgcagaaacctccggactcatctccttcttgatttgcgccatcgttggcgcggtatcgatgaacctgtacatggaatacgcgccggccatctggcagctgacgcaacgccgattcatggtatgttcgggcatcgtggcggcatgcggcgtcatttccttcattattggctatgcgcgcaaatcacgttcattgaacctcaaacatggttggtttgcaccgattcgtcgcattttcgaaatcgtcgccctttcggtggtgtatgcctcgaccattttcctgtcgtcttttgcactcatcggtgcggccaacgacatgatgggcaatgccatcttctccggctatatctccagcgtctgcgccgccttcgccggcgtggtggggtacatgacctttgtacaggcggagatgatgaacgccaaaactattgccagtctgttgccgttcttcgtcatctccggcgtggtcaccgccggcatgaccaccgacgacccatactggtatcacaacaacttttcgcagctcggcgacagaaccacgtttgcggcccgtatgttcaactccacgctgattcttgccggcacatgcatcatcatcgtcagctacttcgccatctccgaactggtgaccaccgaacggctacagcgcctctggcacgaccgcaccaacagagatccgaatcgcggctacgaaatcccacatttcatgctgcgcatctccattctgtccttcctgctgatggtggccggcctggcattcatcggcatcggcgtgtttcggtacacgccacacaatctcttgcacaatatatgcgccaaaggcctgccgttcgtcatgctgctgctgttcgtgctcctgccgtggcttgcgccacgcctgtccaaagcagtgatggtggcctccgacctgaccgcgctcgtatgcgctgcattctgggtcaatatgatgatgggtcacaacaccctcaccaatgtggaggcgttggctggtctggcgttcctcggctggttcatcgtgttctcgcgccagatcgccgccatcgaggccgatcgcgcggccgctcagttgttgcacgcgcaggccatcgaaggcggttttgagcagccgtcttccgcacctgatcagcagatcgaatcccgcatcgctgccgaccggtgaataatttgtttgatagatttggccttatgactgaacgactcacgaatctctggcctgccccgctcgccgcacagccgttgaacgctacggtaacggtgccgggcagcaagtccctatccaaccgctacctgattctcgccgccctcggcagcaagcccgttactctgattggcctgctgcgttcgcgcgacacggaccttatgatgggcgcactcgaagccctcggtgtccgctgcgacgtggattccgcaaccgataccaccgtaacggttactcctcctgtatccggccgattccatggcaacgtcaatgtgttctgcggactggccggcacggtgatgcgtttcgtgcccggccttgccctgtttgcagatggcccagtgaattttgatggcgacgaacaggcttatgcacgtccgatgaagccggtgcttgacggtttggaacagctgggtgcaacggttgattaccacggcgaggttggccgtctgccgttcactattacgccgcctgcaaccttgccggctgcccaggcgcaggtcagcatcgattcgtccggttcttcccagttcatctccggcctgttgctgattagttccaaactgcctggcggtctgcacctcgcgcacacgggggagaagaccccgagcctgccgcacattcgcatgaccgtggccgatgtgaccggtgccggcggtgcggttgagaccgacgaatccgcccgcacatggacggttgaaccgcgcgcaatgcaactgccgagcaaggtgaccgttgagcccgatctgtcgaacgcggcgccattcctcggcgcggcattgatcgccggcggcacggtccgggtgcctcattggcctgaaaccaccacccagccgggcggcctgttgcccggatatctggagcagatgggtgccgaagtatcgttcccgaccatcggcggcgtgcgctattgcgaggtgaccggtgacggcaccgtgcgtgggctgggtacgttcgatttgacggcggccggggagattgcgccctcgttggcggcgattctggtgtttgctgataagtcgacagacatggttggtattggtcacctgcgcggccacgaaacgaatcgtctggaggcattggtcaacgagattcgtcgtgttgggggagcggctgaggaattgcctgatggattgcgtatcgaaccggtgccggcggagacgttgcacggtgccgtgatggaaacctatgctgatcaccgtatggccacgttcgccgcgatgctggggctgcgtattcccgatatcgaggtcatcaacgtggccaccacgcgcaagaccttgcctgatttcgtcggtatgtggagtggcatgctgaggcagtaaggggtcctgtgttctggtggaactcccctcagtccgctacgcggacagctcccctcagagaagggagccaagttatagggcctggatcccctctctgagtggatctgtccgccggaggcgactgaggggagtatgacgcaggggtagtggtctcatgaccatatacgaatgggggctgattccaatcggaatcagcccccatagtgttgcaactagagattagtgagatgcctaacggcggttacttacttggcgaaggtgttgccgtaggtatcggtgccagcctcggcgattgcggcggacttgcgggcgatggccagttcttcgttcgtcgggatcacggcgatgatcacggaggagtccggagtggagatgatgcgcggttccttggagcgggtggcgttcttctcctcgtccagcttgacaccgaacggagcgagcttgtcgcacaccatcttgcggaccacgtcgtcgttctcgcccacaccagcggtgaaggtgatcacgtcgcagccacccatctggtaggtgtagttgccgatgtagctgacgatgcggtgcacgtagacatccagagccagcttggcgtcctcgttgccttcggacaccagacggtgaacctcacgcagatcgccgtagccggtcatgcccatcatgccggaacgcttgttgaacagggcatcgagctcgtccacgttcatgtgggcgttgcggatcaggtggaagaccacagccgggtcgatgtcaccggtacggccacccatcatcaggccctcaagcggggtcagacccatggaggtctcaaccggcttgccggagacctcagcggaagcggaagcgccgttgccgatgtgcagaacgatctgcttcaggccttcagccggcttgccgatgacgtccggcaccacggaggagatgtactcgtgggaggtgccgtgggcgccgtagcggcggatgtggtactgatcggcgatttccttgttcagcgcgtaggtgctggcggccttcggcagctggaagaagaaggaggaatcgaagacgaagatctgcggaacgtccggcagcagggagcgcatgacttcggcacccttggcctccgggccgttgtgcagcggggcgagcacagccagatccttgacctggttgatggtcttgttggtcacgagggccggcttcgggaagatggagccgccctgcaccacacggtggccgacggcgacaatgccagcctcagacaggttcgggccgtactcctcgaagaagccgagcacgcgcttcagaccctgctcgtggtcgtgaatcggctcttcaagctcgtgcttttcgccgttgtactcgtgcttgtagtggccgtcgaccggctcaccgatcttctcgacgaggccggaagcgaggccttcgccggattcgagatcaaccagctggtacttgatcgagctggagccggaattgatgacaaggacggttttcgccattgtgggcatcctccattgtgattgaatgttcccgtgagacacgggttaccgttgattagattactcgttgcttgctacaaaataagcattacagtggctcccgctggcgggagctaagccgggctcactgcgcttcgatggcggtgagggcgatggtgttgatgatgtcctgcaccatcgcaccacgggacaggtcgtttaccggcctgttgagaccctgcagcaccgggccgatggccaaggcgccggaggagcgctgcacggctttgtagccgatgttgccggcgcacaggtccgggaagacgaacacgttgacgtgtccggccacatcgttgcccttggccttggtggcggccacggtgggggaccaggcggcgtcgaactggatggaaccgaccaccggcagatccggagccttctccttgagcagcttggtggcttcctcgaccacgtccacgtccgggcccttgccggagccgagggtggagtaggagagcataccgaccttcgggtcgatgccgaaggcacgtgcggtctcggcggactgcaacgcgatttcggaaagctgctcggcgtccgggttgaggttgatggcgcagtcggcgaacacggccacatggtccttgaagcacatgaggaacgcgcccgagaccagtttctggcccggcttggtcttgatgacctgcagggcggggcgcacggtgttggcggtggaatgcacggaacccgaaaccagtccgtcggcatagccgagcaccaccagcatggtgccgaagtagctggcgtcggtcagttgcttgcgggcctgctcctcggtcatgcccttcttggcgcgcaactcgcacagtttggcgaccatgggcttcaacacgttctcgtcgtccatggcctggaatcgggcgtgccccagactgttcagccccagttccttgccgcgggccaaaatggcgtccttgtcgcccacgatgatgaggttcacggtctcacgttcgagcaggtaatcggccgccttgatgatgcggtcctcctcgccttcgggcagcacgatggtcttcttgttgctcttggccttgccgagcaggtcgaattggaaggcgtacggcgtgaccggcgcggtgacgtccacatcgagcgcggcgagcacctcgtcgatgggagcgtgcttgcggaaggtctcaagggccaggtccttggtggattcgtcggtgaagggcacctgcggcaaagtccagaccggcaggccgtatttggcgagggtctccttgacggagaaggcgtgacgcggctcgcagccggtcacgaagatgccgagcaccgtattgcccgcggcgcgcatgccctcgatggacagcttgacggtctcgtcgagctcgtgcggccagcggtcgacggtgcacacggccaggaacaccccggccttcagatcggcggcgacgtccgcgttgaactcgtaggtggtcgggtcgttgacgtgggatttgtcggtgccgacgatcagggcggcgttcgcgcgggagacctccatggcgtagttgaactcgccgacgatgtctccgcgggcggtgtccttgtcggcgcgcaccttatgcacgtcgaggccggtggacagggccacgccgagtccggcattggaagcggcgagcaggatcggggtgaattcgtcatggttggacacagcagggcggaacaccatggtcttgtacttggaagtcaatgcgttgagcacgccgtaagcgacgacgttgcggccattggcgccttcagggctggcgatatatacacgggtgacggtcacgatgtttttgtctcctttgatgatcaacacgatagggaccacacctcattgtagtggcgattactgttatctctcacgccggtgtcgcgccaatcggaagagcgtccccttggcgatactttccggggaaagtatcgcactgcatgcattccagtccctgttttgcgacgcattcccgggaatgttgcacaaaagtcgcccgataggatagaaaacgaaaaaggccggtgtgtgaagcaccggccttgattgtggagctagggggattcgaacccccgaccctctccatgccatggagatgcgctaccagctgcgctatagccccgagtgaagctatccgattcatgggagtcacaagacccgccacgaaccagcggagaaaccaccatatcatccgatttgatggcttcgtcgtggagctagggggattcgaacccccgaccctctccatgccatggagatgcgctaccagctgcgctatagccccgttttcaattgttggcccgttgttcggacctcgtatacattacgacgagatgtcgattctggcaaaagccggcgtgtcgccaaatgacaaaagtgtgatttggcgacactttttggcttgtttccgccattattcaggcattgagccattcagttattgcttgaacggttccgaatgcaccggacctattggattagcaggggagtcgggaacatgatcagcgttcgcgttcccattcgtcggtgtcggcgatggccggaccgtgattgtagtccagcagacgccagcgcacagtgccatcgggattgtccatcggcaccaagcgcacccagtgcgcattgcgcaatgagaccaccgtggagaaggtcggatcgatcgcggaaatgcccaacagggtctgcaatgtctgcgcgatccatgcgccgtgcgagaacacgaacaggtccgtgtcgtctccggcacgcgtggaccagtcctcaagagcctccacaccgcgtttgcctacggcttccttgggttcggcaccatacttcagttcaccgccccgagactccatccaggaacggaagtcctcagggtagcgttcggccagttcagccacggcatggccatcccagtcgccgaagctgcgttcacggacgcgatgatcatcgacgggctcgattccacccaatacgtcggcgaaagcctgcgcggtggcgtgcgcacgcttcaaatcggagcagacaatgaaccggtggttgatttccggccgacgatcgacgtacaggcttttcaaggccgcggcggtctgcttgacctgccattcacccacggcgtccagcggaatgtcgacctggccttggagcttgtgagcggcgttgtaggaggtgcgtccatgacggataaggaaaatggaacgaacatgattggccatagtgacgatcctttcgattccagtgaggaaacagggaaaagggagggctgcctggtgccgtcaatgacgttcggcaacaggcagcccgacacacgaatatcagcgagtatcagcgaatatcagcgttatgtgattcgcacgttacgcggtggtgacggcagcagcgtccgcatgctccgccgtttccgggtgtgcgagttcaagatcgatggccgggcagtcgcgccagagtcgttcgagcccgtagaattcgcgcgattcctcgtgcatgacatgaatcacgaaatcaccgtagtcaagcagcacccactggccctcggtcaggccctcgcgagagcgcggctgacggccggagcacttaagggacaggtccttttcgatttcctcggccacggccagtacctgacgctcgttggaggcgccggcgatcatcatgatgtcggtgatgccgagcaggtcggctacgtcgaaggccacgatgtcggtggccttgatacggtctgcggcctcggcggccacgcggacggcgttgatggaatcctgaagtgcgggcatggttcagcgctcccaggcgggcttccagccctcgacgttgtgctgcgtgttctcggagtagaccatcgtgtcgctcggcacggcgtggcgcaccacggagccggcaccggtggtcacgttgtcgccgacctcgaccggggccacgaacaggttgccggcgcccacatggcagccggagccgatggtggtgcgattcttgtgcacaccgtcatagttggcggtgatggtgccgccgccgatgttggtgtggtcgccgagctgggcgtcgcccacgtagctcaggtgcggcaccttggtgccgttgccgatgtgcgccttcttcatttcgacgaacgcgccggccttggcatcctcgccgaactcgttgcccgggcgcaggtaggtccacgggccgatgttcgtgcgtgcgccgatgtgcgattcctgcacgcgggaacgctcgaccacggcaccttcgtccacggttgcgtcaatgagggtggtgtacgggccgacgatggcgtcctcgccgaccaccgtgtggccttgcaggaaggaaccgggcaggatggtggcgtcgcggccgatctggacatcgtcctcgatccaagtggtttccgggtcaagaatggtcacgccgtcgcgcatccagcgctcgcagacgcggcggttgtaggtcttggacagcgcggccagctgcacgcggtcgttcacgccttcgacggtgagcggatccggagcggcgaacgcgccgaccttgccagcggtcttggcggtttccagcgcgtcggtcagatagaactcaccctgcgcgttgttcgacttcagtccggcgattgcctcggtaagcacggaagcctcgaacacgtagaccgaggtgttcacttcctgcacggcgagttcgctgcggttggcgtccttctgctcgacgatgcgcagcacgttgccttcgcgatcgcggatgatgcggccgtagccggtcgggtcatcgaggatggtggtgagcacggtggcgccgttgccggaggcggtgtggaattcgaccaggcggtgcagcgtctcgctgtcgagcagcggcatgtcggaggcggcgatcagcaccgggccatcgaccttgccagcctcggtgagctgtgccattgcgcactgcacggcgcgaccggtaccgggaatgtcgtcctggttcacgatggtgacctgctcgtcataggagcgggcggcttcggcgacgcgctcggcctggaagtgcacgaccacggccagcgtgtcggggttcagggcggtcaccgaatccatgaccctgttcaggaaggtcttgcctgcaaaagtatgcagcaccttcggcttgttggaacgcatgcgggtaccctcgccggcggcgaggacgatggctgcggataatgccataactgacgtattcccttcgatcggaatgtctattgagggtggaaacacctcaaaacaatagacggccgcccggatgtcgagcggccgtcagccgttcccccacctggactcgaaccaagacaaagggttccaaagacccgtgtgctgccattacaccatgggggagtcgtgggctttcggcccacaagtgttcatttataccatactgtcggtatttaccgaaagactacgccatgtcgcgtctcgcatcgtgtgctttccttgaacaaacacgcacgtgatcaggcgaacaggaagccttgaccgtggtgctcggggtaggtgtcgaacagttcggcgaccgagccgtcctcgaatacggcgcggatggcgctggccagcagcggggcgatcgacaggacggtcaagccatcccagcgcttttcctcgggaatcggcacggtgtcggtcagcacgacctcgcgcgcaccgcagttcttgagccgctcgatggccgggccggagagcacgccatgcgtggcgaccacggtcaccgacttggctcccgcgtcctgcagcacgtggcatgcgcccgcgatggtaccggcggtgtcgatcaggtcatcgacaagcacgcagtccttgccggcgacgtcgccgaccacacggttggcgaccgcctggttcgggcgggtgatgtcgcgagtcttgtgcacgaaagcgagcggaccgccgccgagacgctgcgcccactgctcggccacgcgaatgcggccggcgtcgggggagacgacggcgacgttgtcgagatggccttggaaacgatcacggatgtagtcgaccagcaccggcatggccaccagatgatcgaccgggccgtcgaagaagccttgggactgcgcggcatgcagatcgaccgacatgatgcggtcggcaccggcggtcttcagcaggtcgaacaccagacggcaggagatgggctcgcggccgcggtgcttcttgtcctgacgggagtagccgagcaacgggcagaccgcagtaatggaacgggccgaggcgcgcttcaatgcgtcgatcatgatgagctgctccataatcgccttgttgatgggtttgtagtggctttgcagcacgaacacatcggcgccacgcaccgattcggtgtagcgcacgtacatctcgccgttggcgaaatcgtatgcggtggtttcaaggacgtcgatgccgagctgctcggcgacatcctcagccaatttcggatgaatccttcccgtaacgagaataagattcttatcgggcttcccttcaaggattgcgctcaccatgtctcccaacgtgtggtctcgttgatgcagtcttcagcatagccgttcttcacgaccggttggacaactcagcgttgcctgccgttcacctgccgcttgcgatccattgttcgatggcctgtttgaccgcctttgcatagatatcgctatccatgctcgggtggatgccgtcggagccgagcacctgcgcgttcgcgttggctgtggcattccaatccaccagcaccacattgtccggatgtgcggccgcatagtcggcaagcacctggttggtaggtggaatccacgtacggtctccgtgggcattgaccagtaccagcacgcggtcggggccgatcatattacgaatctggtccagctgatcaggggtgattgccgaattggtgccaaggccgatcagcacccattgccgcagactgccggcggacagatcattgccgatgagttcgggggcgaccatgatggagcgggaaacgctcgcgtcggtctgaatgccggggaagacttccgaaaggccctgtgatgaggccagcatcaccgaatcgcctatggcggtaatctgatcgccggtgggcatctcatgcttgggcttgggcggtgccggcacggcatggcgcagcagcacgtgttcggttttctgtatgcgttccagttgtgcggcctgttgctccagctggatctgcatggcggttttcgcaggtgcatgagtaatgccctgcgcgcagccgaccaacgacagcgccaggataacgtcaacggcaataacccgggccgcatgattcttcttgttcgtgcgaaggggcaccacgacggatatcaccgagtgcattgccgccggtttctccaccatcagccaggaaatcatcaccgcaatggcggtgagcaacgcggtcatgatgagaggccaaggccctgctgccttgaagatcttcggggcaagggcgctggaaagaatccacaacggccagtgccacaggtaaatgccgtacgaatacttgccgagggcggccaatggcttgaacaccatgaggctttgcatccaggaatcgtcggagatggtaccggcaatcagcagcacggacaacaggctggacaatatgatgccgccgcggaaggcgaatgcatcctgtttgccgataaccgtcatggtgaccaaggcaatcaggctgaggaatgccaataccggtgccgtcgcattccagatgcgatgctttacaggaatctgaggtaacggagcccggtacgtggcggccgaagcgctcgatctaatggtgcggggcatcggcacagctccctgacgagcgtggcccaactgaggagcggtgacccaccaggcgagagccacacccagcatcaggcccatgctgtgggtatcggtgccgaagtagacgcgggtggggtcgcccttgggcacgtacatcacccacatggcgatactgctgaacgccgcgagtcccagtgggatgagtgagggcagtttcgtctggcggagcttccacatcagccagacgatgaacggcacgatgacgtagaactgcatgagcacgccaatgaaccacagatggcgaaacacctgcgggttcatttggtcgaaatagctttggcctccggcaatggcgtaccagttgtagcagcccagcagcacggtgatgacctgatcgcggatggaaaccagaatgtcgtgatcgagcagccagccgacggagacggtgaccggaatcagcagaaacagcgccggatagagacgtactgcacgcttggggatatatcgcacgagattcagcgatccggttttcgccagagaacgaatcaaactgacggcaatcaggaatccagagacggtgaagaacacgtcgactccgtagaatccgcctggcagcagttgctgcatgcagtggtacagcacaatggctatcagcgccagtcctttaataccgtctagacccacgaaccgcttcacggataatccttctctcaccgtagtgctgatggcgtcccccgttctctccaacaaacggaaaacaagcccagcatggtagaggggagagacaatgcgacagcagcgaatcgtcaggccgcatgctgcatgattaccggcttgacgattcgcggcataccgcgcttaccggtggcgtttaccggtgatacagactcacccgttcgtacttcggttcgcagcacacgttgatgccgagtttgcgatacaacgcctcgtccgtggatgagatgataacggagaaaaaggcgtcgcagccctgcaactgtttgagcccgtcgatgacgcgagcggccacaggactggtggcgctggtgattgacaatgcaatcagcgtttcatccgagtgcaagcgtcggttcacgctgttgagatgttggcggcttgcagttcgatgtatttttcgttgtcgaatccctggcgcaaagaggtcggcatccctttccggacgacgtcgtaagcggaaaaattataccgggcatcgtcggcaacaaaaaagggattccccgatggagaatcccattcgtcacagagagcaattactcccattcaattgtggccggcggcttggacgtgcagtcgaggacgacgcggttgatctggcggcactcgttggtgatgcgcgtggagatcgtggcgagcacatcgtaggggacacgggaccagtcggcggtcatggcgtcctccgagctcaccggacgcagcacgatgggggagccgtaggtgcgctcgtcgccctggacgcccaccgagtgaacgtcggcgagcagcacgaccgggcactgccagatgtcacggtcgagaccggccttggagagctcctcgcgggcgatggcgtcggcctcgcgcagcaggtcgaggcgctccttggtgatctcgccgatgatgcggatgcccagacccgggcccgggaaaggctgacgccagacgatttcgtcgggcagaccgagctcggtgccgatggcgcgcacctcatccttgaacagagtgcgcagcggttcgatgagctggaacttgatgtccttgggcaggccgccgacgttgtggtgggacttgatgttggccgcgccgtcgccgccgccggattcgacgacgtcggggtagagggtgccctgcacgaggaacttgacttccttgccgcgcgcgccggcctcttcaagcacttggcgctgggccttctcgaacgtgcggatgaacttctcaccgatgatcttgcgcttgcgctccggctcggagactcccttcagggcctcaaggaagtcgtcggccgcgtccacggtgatgagcttgatgccggtggcggcaacgaagtcgtgcttgacctgctcgacctcgcccttgcgcagcaggccgtggtccacgaacacgcaggtgagctggtcaccgatggccttgtgcaccagagcggcggccacggcggagtccacgccgccggacaggccgcagatcacctcggcgtcgccgaccttctcgcggatcttcttgacttgatcctcgataatcgaggaggcgtcccagtcgttgggcagcgcggcgcaacggtgcaggaagttttcgataagcttctggccaagcggggagtgcttgacttccgggtgccactgcacaccgtagagcttgcgggattcgtccgccatggcggccacgggcgcgccttcggtgtgggccagcacttcgaagccggccggggcctgttcgaccgccacaccgtggctcatccacgtggtctgctcggcgggggagtcggcgaggatgccgtcggcgtcgtcgatggtggctgaggtcttgccgtattcgccgagagcggccttatccaccttgccgccgagctcataggccatgacctggaagccgtagcagataccaagcaccggaacaccggattcgaataccttggtatctatggtcggcgcgccgggctcgaacacggaggccgggccgccggacagaataatcgccttcggatccttggccaggatctcgtcgaccggcatggaatgagggaccagctcggagtacacgcctgcctcgcgcacgcggcgggcgatgagctgggcgtactgggcgccgaagtcgacgacaagcacaggaccgtttgccattgatattcccctaacgttcattggaattttacgtgggctgaacacccctgattatcactggtcaaggcgacaaggccgacacgcagggactatgtgcgcaaatcgaacaaactacatgcctgtagtcggacaacacgccgatttcgaacatgggaaatcgaacgtgcgctgttctagccagatgctagatttccgcatgcttccgccgttctgaaaaagtatgttgaaaaaactaatgttgacaaacggtcaggtgaaccgcacaaatactgaaatttccgcaacaatttcgaacacacccgcaagaaatcgttcaaaagtcgcgttgtcctcgtaccatgacgattgattgggaacggaaaaccttggcaccgcaagggtcaggaaccgtgaccgaacagaaataatcaatcgcacgatcacgtgcaggagtacaggagtacacatgacgagtcctgttattggcaccccttggaagaagctcaacgctccggtttccgaggaagccctcgaaggcgttgacaagtactggcgcgttgccaactacctttccatcggccagatttatctgcgttccaacccgctgatgaaggagcccttcacccgcgaagatgtgaagcaccgtctggtgggccactggggcactacccctggcctgaacttcctcatcggccacatcaaccgtttcattgctgaccacggccagaacaccgtgatcatcatgggcccgggccacggtggcccggccggtacctcccagtcctacctggacggcacctacactgagaccttcccgaagatcaccaaggacgaagctggtctgcagaagttcttccgtcagttctcttacccgggcggtattccgtcccacttcgctccggagaccccgggctccatccacgagggtggtgagctgggttacgctctgtcccacgcttacggtgccatcatggacaacccgagcctgttcgtcccggccatcgtcggcgacggcgaggccgagaccggcccgctggctaccggttggcagtccaacaagctcgtgaacccgcgcaccgacggtatcgtgctgccgatcctgcacctcaacggctacaagatcgccaacccgaccatcctgtcccgcatctccgacgaagagctccacgagttcttccacggcatgggttacgagccctacgagttcgtcgcgggcttcgatgatgaggaccacaggtccatccaccgccgcttcgccgagctgtgggagaccatctgggacgagatctgcgacatcaaggccgccgctcagaccgacaacgtgcaccgtccgttctacccgatgctgattttccgcaccccgaagggttggacctgcccgaagtacatcgacggcaagaagaccgagggctcctggcgcgctcaccaggtgccgctggcttccgcccgcgacaccgaggcccacttcgaggtcctcaagaactggctcgagtcctacaagccggaagagctgttcgacgccaacggcgctgtcaaggacgacgtccttgccttcatgccgaagggtgagctgcgtatcggtgccaacccgaacgccaacggtggtgtgattcgcgacgacctgaagctgccgaacctcgaggactacgaggtcaaggaagtggctgagtacggccacggctggggccagctcgaggccacccgtaccctgggtgcctacactcgcgacatcatccgcaacaacccgcgcgacttccgtatcttcggaccggatgagaccgcttccaaccgtctgcaggcttcctacgaggtcaccaacaagcagtgggatgccggctacatctccgacgaggtcgacgagcacatgcacgtctccggccaggtcgttgagcagctgtccgagcaccagatggaaggcttcctcgaggcctacctgctgaccggtcgtcacggcatctggagctcctacgagtccttcgtccacgtgatcgactccatgctgaaccagcacgccaagtggcttgaggctaccgtccgcgagattccgtggcgcaagccgatcgcctccatgaacctgctggtctcctcccacgtttggcgtcaggaccacaacggcttctcccaccaggatccgggtgtcacctccgtcctgctgaacaagtgcttccacaacgaccacgtcatcggcatctacttcgc

SEQ ID NO: 219 - DNA, 23849 bp, Unknown
  R101_18m  MAG No. k141_28555
aaaatttgtcagaattgtgaacgaggtctaccatgatgtacctgacataagcgagggggatgatctccacctcaatggaggactgaacgtatggctgagtcgaaccaaaggaccgcacgcgcccaaaaagcctcaaaggcccagacagcccaggctggcgccgccaaagccaaggcccgacaggaagaagaagcactgctgagggccgacacctttaccaatgctcccaaggtgtcccgccgcactctcaccaaggaggagcgcgaggcactcgccaagcagagggaagccgaaaccaaggaagccgagaaaatcgccagcgcatggtcgaaaggcggcctcggccgatggtgggcccgcttgcaatccagcccagacaaggttacctggggcatggcgatcgtggcgctcggcgtggtgtacggcgacatcggcacctcgcccctctacaccgcgcagaccttccttgccggtcagggagggcttggcagcgtaaaccgagaggccgtgctcggcatgctgtcgctggtcttctggtcgattacgctgatcaccaccgtcaaatatgtgctcatcgccatgcgcatcgacaacaatggcgaaggcggcatcttcgcactgtactcgttgattcgcaagtacggcgcatggctcgcgattcccgccatgctcggcggcgcggcattccttgcggattcggtacttaccccggcggtttccatcagttccgcagtcgaaggcttgcagaccctgccgccattggaagggttgttcgacgaaaacccaagcctgaccctgatgattaccgtcgtgatcatcgtgattctcttctccgtgcagtcgcgcggcaccgaaagcatcggcaaagtattcggctcgatggtgctggtctggttcagcttcctcgccatcgtaggcgtcacgaatctctctaacgactggtctgtgttcgcggccctgaacccggtgtacggcatcaaattcctgttcagcccggacaatgctgccggcatcgccctgatgggcaccgtgttcctctcgaccaccggtgccgaggcgctgtactccgacatgggccacgtggggcgcggcaacatctacttcacctggccattcatcaaggttgcgctggtgctcaactacttcggccaaggcgcgtggatgttggccaatagcgataacccgcaatacaccgcgatgaagtcgctcaacccgttcttccagatgatgaccccgaacgtgcggtacctggccgtgattctgtctgtttcggccggcgtgatcgcctcccaggccctgatcacgggcgcgttcaccatggtttccgaggccacccgcctcaactggatgccccatctgcaggtgcgttacccggcccgtacgcgcggccagctgtacattccggtggtcaacggcgtgttgtgcgtggccacgctcgccgtgctcgccatcttcaaggattccgaacacatctctgccgcgtacggcctggcgttgaccattacgatgatcaccaccaccgtgttgctcggcgtctacttatggcattccggcaagcgggtcggtgccatcgtgttcaccgtgctgttcttggcgattcaggctatgttcttcatcgcgtctatggccaaattcctgcacggtggttggttcaccatgttgctgaccgccgcgattctgttcgtcatgtacacgtggaatgagggcaccaagctcgaacgtgcgcaacgccgtcacatgcggcccaacgacttcctacccgcgctcgacaagctgcacggtgatttccgcatcccgtattttgcggacaacatcgtgtacctgacctccgactcggaaaccaagcgactcgacacggacatcttcttctccatcttcgccgaccaccccaagcgtgcccgtgcttggtgggcagtcagcgtggaaaccaccgacgagccgttcacccgtgaatactcggtggaggacttcggcacgaactacatctaccgcgtgcgcttccgtttgggcttcaaggtttcgcagtccatcccggcgtacatccaccagatcatgcacgacctgtccaaaaccggcgaactgcctaagcagaagtcgatttaccccaaggtcgacgccgatccggacatcggcaccatccgttacgtgctgattcacaaggccctgatgccggaatccaaggtttccgcacgcggtgccctgtcgttgcaagccaagtacgcaatccgccgcatggccggctcgccggttaagtggttcggtctggcaccttacaacccgctggtcgaggtgcagccgctgttcgtctccacccgccgcccaccgcgtctgaagcgcaccgatacggccaagaacatcacgacgcccacgccgactcgtgcagtggccgacccggccgccgtccccgacccgatggacaccacgtccgggcttgggcgattggtacaggagctcgatgccgccgtatcggccgaggaacggaagatcgctgaggccgctgccgccgctgcggtcgctgagcagggcgataagggcaaggccaagaacggcaaacccgccgccaagcctcagcgctccgccaaacagaagcgataacataccagtttgcagcggcgctgatgcgctctataaagaatgcctataacagtcgccgcacgtcgccacacggtttcggtaagttgaaataccatgtgcagattactgggatacgcgacggcaggcttcaacctgagtctcaacgccgtgttggggcaagacaatgtcgaggatttccgtgaactgtctgaaatccacaatgatggctggggtgtagcccagctttccgatcccgccgaagcgccgcacgtgcgcgacggtggcgcacccaccccggaaaccggcacccgaatctacaagtcgaccatcgcggcccgtcatgacagcacgtttgagacgctggccgacgaaccgtctcgcggtgccatctggcacctgcgcttggcaagctccaatctgccgctcatcatggagaaccagcacccgttctatgcgaacggcctgagcttcatccacaacggcgatatctcggacgccaatggccgcaacatcgtcaccaaccgctcatacccggtgaaccacagcgtgctcctctccaccggcggccgttccgactccgctatcttcttcgcggtgattctggaatacatcggtttcggcttcccgctcgacgaggccgtggcccaggccgtgcgcgaactgcgccaagcctacccgaagtccagctacaactgcatgattcagtccgaggaccagctcatcgccctgtgcgccgccggtcgtgagaagaccagcccgcgcatcgtggaaatctacgatgagtacggccgtggcgagcaggccgccgactaccgtgtgatgcgctaccgtgagctgcgcgacgacaacggcgactccgccggtgtggtggtctcctcttccggctatgagcaggaaggctggaacgtgctggagaacgaccagatgatcatcgcctccaaccgcaacggcacctaccgtctccgttccatctgaaatagcttcataagctccctctgacgaggaggcccctagagcctcaaatcatccgcatcccatacttctccgccaacgccggaatatccggcacgccatacttggccaccagatccagccatcgttgtttgttctctccgccaaatcgctcggctcgggccgtatacgcctcgacctgcaggaacttcggcggcactgacttgctatggaacttgtcggcgtacatcaccacttcctgctcgagattcatcggcacatagtcggctggtggcaatggcagctcctggcgcaccacatcctcgcgcgtaagtcccacgccggtatggttgcggcagaactgggcgatggactcgtccacgccctcgtcgagcagatactcgtagcccttaagaccgtgcagaatgtagcgtttcttgctgaatttgagcggttcgccgtcagagccgtcatgcttgaacacgcggtaggtgccgatgtcatgcagcagtccgccgatgagtactaaatgctcgtcgagcagacgcggcggcacatggccgccggtgacgcctgcggtgggcggtacctccgcgtccttcggtaatgtgcagcggcgcgtgaacagcgcgttctgccggcgcacgatctggcagccgatggtcgccacaatcacgcaatgcgtatgcaccagctcgtacgccgccttggacggcgcgattttgcggtgcaactcgtcgatctgctccagtgtgggaatatatccggtcatgattatcaggtttcgcctcgtacggtcagatttatcctcagattagcgcggcaatgagccgcatcaggattgtcaggagctgattcggacatctcgacatgcctatctccgtttcaaggggctgattcggcatcctcctgaggtctacttccgtttcaaggggctggtgcccaagtatacgcggcgtaaaaacggcggaatgacgttggcatgaagccgtttatactcggggtttggcggatgaccagccccttgaaacggaagtagacctcccggaacacgcaaatcagcccctcgaaatcgaaaaagctcacgatgtttggtatgtatccgaacatcgtgagcttcaagagcctgtgctggtgtgtctggtgtgtattgctgccggacagatcagatcttgaagagtgtgtcggctgcttcagcgagctcgcgcgacgcagtgagcacgataacgcaatgcttcgggtcaccggtgtgcgccagcttggccagcgcggcgaacacggtcacctcgtcatccgcgttcagccctcgtgtcggctcgtcgaggatcagcacttcggcctcggtgctgattgcacgggcgatggccaccaaacgctgctgcaccaaaggcaatgtgccgacggccacgccgctggtggcctcggagaagccgaccttggccagcagttcgcgggcgatcaccggcttgggcttcaggaagttgcggttggacgcatccatggcgtacagcacgttttgttcggcgtcgagattcggttgcacggcgtgcagctgcggtacgatgcccagacggtggccgcgcagttccacgggctcgagctcaacaatgttggcgctcttgttcatcaccgtgccagacaccggcgtggccaaaccgctcatcacgcccatcagcgcgcgacgtttggcgtcggcggtgatgcccgaatcggggtcgtcgctgatcagcagcgcgtatgcgtgtccggagtagcagaagaaattcgcgccatcgaggatgttgaccttgcccttggggccggcgaccgtcaccttgttcagggcaaaggtcgggtaggtcttgagcagaatgtcgtcggaaccgccgcccaccaacacgcgatcgatacgcgaggccagcgtcatggtgggttcggccgctttgccctgaggctccgcatgctcggccaatgcgtctttgtgatcggttttggccagtcggagtgtttcgttgacgcgggcggcattgcgctcggtcacttcggcggatgcgttgaccgaagcgatggcgtctgcttcggcctcactggtctcgtcggtttctccggtttcggcagatgccagtgcgttgtaaataccatcgtcaacagtgctttcgtcatcaacgtcatcgaaggtcacgctgaactgcacggagtcagccggaacggattcaatggtgtcgttcgtctcagtctcagaagtcacttcgtcagccgttgcgtcagtggtcttctcgagttcctgatcgttgttcttgtcgctcatgcctgtgcctccgcatcggcggttgtggtggtcgtcttattggcctcgccggcatcatgagcggtggcctcagcagcttcatcggtctcagcagcgccagtggtttcggccgtttcaatcgcctcagcctcgctcacggtgccccagtcgccatcggcggcgaacagcttgttcgcgctgaagaacgcaaggcgcagggcggcaagaatcgccaggatcaggattgaacccagaccataccagaccatggtccaaatcaggtccgatgtcaccgggatggcatggccggatgccagagcaggtccgatcggcttggcggcgaacgcgcctccgaccagaccaattacgtagaagggcagggtgacgatgaacacttccagcatgaattgccatcccaaacgcccgcgagtgacgccggacaccagtgccatgccgatctcgtcgtcacgcttgggcgcccacacgcctgacagcacgaggatgagcaacagcacgccgcccacggcaaccaacgcaatggtgccggtcttcgcgcgcgaggatagcgtatccagcggctccagagaagcgttgtaggattccagcgaaggggaagacacctcgtatcccttggcgggcagcttggacttcttgagggtggataccaaggacttgtatgtagcgggaccaccggtgtcgaacaccacgtccagatccggcaccgcccagccggaggcggtcttgtcgttggactgtgggtcgagtccggccttggcgaaggtctgatagttggtgaagatcgcgttctcgcggttgcgggcggccgtcaccggattggcgacggcggattcggatgtgtacttgtagatgccgcgcaccttgagcttggccgtggtctgggcgtccgaggcggccgccaccttgagcgtatcgcccaccttcaggttgttggcggaggcaaacgcttcagagaccagtgcgccggtggtgttcgggttggaggacttgttgtcgtagctcaggtccttgccgtccacgatttcgaaggtaccgaggtcgctggccttggcggcatcctcggtccagaaggctcgccaaatgagctggccgccggtctcatcatcggaggccgagcccagcgatccgccgtccagggccttcaaatcaccgctcacgcgggccggcacggtttcggtaaccgtaaagttcaacgagttggtggccgactggacgagcgtggcgtattcggtatatgaggtccacgtcatgtaatgcttggtggaagccgagtccgtagcggagaccttcttccacgtagccgcagtcgggcgaatggccaacgtggccttctgctgatcgtacgcggtggtgtgtgcgttggtatcttcttgaatgatggccagtccggcgactgtgccgaaggtgaccgccaaggtgatgaacgcggtcagggccgtacgtcctttagaacgtgtcagggcccgccaggcgttgctgaggacgaacatctaattgcctctcccgttctcctaagccgaacaaatcaatacggctttaactattgttgcgtttagtgaccgttttcttgcgcaatactgttatacccctcaatgaagtctgagaacattctgacagcgatgtggtggtcatgcggggatttgcacccggtatgggataaaccctcggtctatttcggtggcatcggtacactggcatgagatatgcgtggcgtcacgtgtgctccggcatgtctgcgattccggattcgcccggagtccggcatccggaagcgtggccttgcgccgttggataagagtatgagctgagcagattttcgggtaggataagtatgcgattcacttcagggcattcgagccataaggctgtggggcgtaggagaagccgccatgccggtaacgggaaatccaatcgctccgcatctacgaatagcgctgcaaatcagcagacgggtcccgtaaacctgaagactccccagcacgtgggtggcgacggccgttcgctgatcagccgtacgccgatatgggcgcgagtggtggttgtactgctgctgacgttgctggccagcgtcacctgtgtgggcacgctctacgcggcatccgtctcgagaatggccacggatgcgcagcgtgtgctgacatccgccgaaagtctggccaattcggcacttggctgcggcagcgataagagtctgtcggacatctcccaagagttggtcaatgccaccaatgatctcaacgaggagctgaacggcccgcagtgggacttcttccgcgaccattcgcgatttggcagcgacatcaccgctgcccgcgaaatgctggcttccgtggatacgctggtcaacggtccgttcactgatctgctgaacctgtccaaacgattgcagggcttctccctgaagaatggctcggtggacgtcagcgccctgatggatatgccggatatcgtcaagcaggcgcataaggatatctcgcagcagctcaccaagctcaacaaggtgccgactccgagcgtcgccaaggtggccaccgtgctcgaatccgaaaaggctgcgctcaagaccgtggattcgatgctcagcgaatacgatggcctcattaacttgctaccgcaactgcttggcgaggacggcaagcgcacgtatctggtgatggtgcagaacccggccgagctgcgttcggcgggcggcatggtgggcaccatcgccgcaatcacggcagataagggcacgattaccatcggtgatttcgccaccacttctggttgggacattcctgagaagccaatggatgctacggtgctgaaggagcgccaggtatttggcgacacttttgaccagtacccggccaccacgaccatcgaccccgaattccagcgtgtggcacagatgaacaaatacatgtggctgtatcagaaaggcaacgaagacgagaacgtagcgggtgtattgtcattcgatcccgtattcctccaggcattgctgggagccacaggcaaggtcaagctttcggacggccgagtgctggatggcaccaccacggtgccgttcttcgcttcagacctgtacacggattacccggacttcgagcagcagaacaacttcgtttccgaagcggctcaagcaattatgaaccatgtgcttggcaacgcgaatgcttccaccgcatccccgctgttgaaggcaatcagagataccagcgctagcggtcatttcaagctatggatggctgatccggatgagcaggaggcgctgattgccaccggacttatcgacgataaggccagtggcgagttgtctgctgacagtcaggtacctgaaaccggcatctatctttcggagctgcagcaaggcaagcaggattggtatctgaagacctccaccacggtcacaaaaacctgcggcgacgcctcggccagccggaacgccctgtattctggcgtgctggataagcgcatcacgacagctgtgcgtaacacgcagctgggtcagtttacggaagatcagctcggtgacgaatacacggtcaccttcaccatgaagaacacgctgactaaggctaaggccgaatcgttgcctgatttcgttaatggcggctcggagaatccagtgctcggtggcatgctgtaccgcgtggtgcttaccgccccgtacggtggcgaaatcaccgctgtgcaggctgatatagattcatggggtaccaacaccgcgagcctgtatgaccgtcagtacattatgttcaaccagcagtggatcgagcccggaaaagaattgacgattgcctataccgttcgggtcagcagcgatgccacacatccactgaacgtggtaaccacgccggtggtgaatgcggatggcgtcgagacgggctccaacggtaaggtgacggatgagtgcccggccgatacgaacggcgccgatggtgcgaacggcgccgatggtgcgaacggcgccgatggtgcgaacggcggcaagaacgacgcgcatgagggcgcgtcctccgatccctcggccggcctggacaccttggacaagctgaagagccagatcagctgcccggtcgatctgaagtccctgacgggatccatgtgatgaccatgcccgattccgtttccggcgtcgccgtttccgacgccaccgtttccggcgtcgccggcaggccgcgcgacgtgaactacgatctgctgcgcgtggtggcgatgtgcctggtcatcggcgtccacgtgatcaacaactacatgcccgtcaagatgaccctcgccggcagcgcggaaacggtgcgatccgtgctgttcgcgttgttcatggtctgcaatccgctgttcattatggtgtcgggccggttcaacctgacattcgatgccgaccggccggtgagcacccactcagcgggccgtctgccgggttctggctctgatgcccggacaggtggcggtgccggccaagccgatcccggtagcctcgcgccgtacgtgcgctactactacaaacgtttcgtctcgctgattgtgccgtatctgctgtatgcgggcggcatggggttcgtcgcctacctggtgattgatcatcgttcggttggcggcgctgtgtctggaacgttgtttgatctgttttccgggtatgacgattccgtctattggttcgtgttcatgcttgccgggtttgtgttggcgacgccgtttctggccgcgatgatgcgcgcgataggccggtcgggcgcctggctgctgatcggcctggccgccgccgtggccgccgccgagcagatctgcaatcttgccggatacccgttgacgttcctgcagtcgttcccctggcggggactgctggtctactatctgctcggtttcgtgctggaatactatccgccgtccacgcgggcgcggcgcggcttgtacgcgttggctccgttcgccctggcgtggaccgtcgccacgccatatctgttcgccggccagcagatgcaggtcggccgcacggtcacggttgcgttcgcgatggtggtggccgcggtgttcctgttcttccggtacgacgtgcatccggcgtcggcgcggctgcgcagggcgatcacctggctggcgggatactcctacacgatctatctggtgcattcgcccctgtccaaggtgctgatcggcccgcggatgcctgtgcctacagatggatggtcgtatgcgggtatcagcgtgttgatgttcgcagccacgctgctcgcggcgctgctatttgcggtgattgccgataccgtggtgcttaagcctgtgcagcgtctgctgcggaaggtacggctgtagattcggatacggcgctatgccacggtatcaaagccaggaatcccagcagcagaagcggagtgaacgtgaatttcgacatgcccatcagtacgcctacggtcatgagcgcggtcaatcgtccgttgccggcacgcggatcggccatgcaggaaaacagcagacacgcgaacaataggcacagcgcctgtgccatggaatcggccgagatggcgaacgaatagcggaagatcaacggcggtgagaccaagagtagggccgtaggcaagcgccagcgggggagtgcggccacggcggcgaacatacagccggcgcacaccagcaacatgattatttccgcgagtacgtatgtggtgccaggggtgagcgttgcggttgctcctatggcaaaggcggccaattgcggcagatgggcggcgggtgaattgaccgctgcattgttgtagggcgtgtccgcgcaggtggtgtttgcggtgctggtgctgttcgtgccataccgttcaagaaaatcggcattgacggcagacggatcgtaaccgtcgtaatggtcgatggagaactggatccaatcacggctcacgcacccgcccacattgccgctgcccgaatgcagaatgctggtcgagtcgaccggccgggccagcacatccccgttgacgatgccgtcgatgcgatacgtgtgcgcccatacgtctggaatatgcccggcaggcgtcaccgcaatcagcacgaaacccatcagcagaatcaccgcttccacgcagcgttcgccgccactcgtgagaacacagtcaaaggagcagaaacagcatcagaggcatcggaagcatcagacatatgtcccactatatgtgaggtgttggtggtagtagtgatgcataaaagaaatcggcctttcgctgtttggtgtgggtgaagcgggttaggcggtgacgacggtagggtagttttggtggcatggataccacaatgctgttctttctgcttttctattgtttttcacagtctgagctagacgctaaaagatggggacacaacaaccgtaggttgcgctccccatcatgtttctatatggcgcttagtcagtgtcttttgttgtatgcgaatctgttggtgtcaatgaggaaggtcctgcggtcgttcttggccatgacgtcgaggatgatgccggcgatgatgagcagcagccccgtgatgaccagcatcaccgcgccgatcagcgtggggaagtgggtgaccacgccggtcttggcgaattcgaaggtgacggtgccgcagagcacaatgccaacgatgccgatgattaggcccaatccgccgaagaaggggaggggcttgtattcgcggatcatgcggaagatggtgctcatgaccttgatgccgtcacctacggtgtccagcttggacactgagccttcggggcggtcacggtactggattggcatctcatagagtcgcaggttgttgttcagcgagtggattgtcatctcggtctcgacctcgaagcctcgcgagagtacgggataggtcttgacgaaggtgaagttgaacgcgcggtatccggtcatgatatcggtgccgtgcgcacggaacaggtggttgatggagccgcgcacgaggcggttgccgaagttgtggaacgggcgcttgttctcctggaagtatgtggaggagaggcggtcgccgatgaccatatcgtagccttcgagcaccttggcgaccatgtcgggcgcggcggcgatttcggccgtgcggtcggtggagttgttgtcgtacacgtagatggccgcgtcgggcagcgccgcacggaagtcgcgcaccaccttgccaatggtcacctcttcgttatagcaaggcaggagaacggcgacggtctcatttctgcctcaagcagggggcattgctatacgcgttgactcgtgtgatgaggacaaaatagatataatccaagcactgtaggaggggccgtccgctggccgccggcccctcctacagtgtggtttcgatgcggtaacgggggcgatgtttggattccatataaattttgccgacgtattcgccgacgatgccgagggagagcatgatgagtccgccgatgagccagatggagatcatcatggacccccagccggcgatggcgtggccgaacccgagcgagacgagcacgtacacgaacatgccaatcgctaccaggatagacagcagtccggcaccggtgacgaagctcagcggtttcgtggagaacgagctgatgccctgaatcgcgaaggcgatcatcttcttcaacgggtatttggattcgcccgcttcgcgctcgccgcgctcgtagtagactttgctggtctggtagccgagtgtgggcacgatgccacgtaggaacaggttgacttcgtggtattcgctgagcgcgtcgagcgtctcgcggctcatgagacggtaatcggcgtggtcgggtaccgtctcggcacccatccactcgaacaccttgtagaaggcttcggcggtggtgcgcttgaaccatgtgtccttcttgcgtgcggaacgcactccgtagacaacctcgtcgccgttgcagaatccgtcgatgaacccgtcgaccgcgttcacatcgtcctgcaggtcggcgtccatggagatggcggcgtcgcagccgtaggcgcgcgcggtcatgagcccggcgaggagcgcgttctgatggccgcggttgtgggagagctttacgccgccgaacaagtgtgcgtcgcgttcgtgcagattgcggatgatgctccaggtgccgtctttggaaccgtcatcgacgaacaggatgcggctttgtttgctgatccgtccggtttcggtaagatgtgcgactttggcggccagcacgtcggccgtgtgcacgagcccttccgcctcgttgtagcagggaagcacgaaatacacgaccggctggtcgcggcggtcggcgcgctcgccggaaccatcgccaccggcgctcgtgatgtccgatttctgcgtgtttgtctcgaagatcatcttcccatcctcatactcagttcgaagccgtctcatcccggtcccggcccatactcatgtgctatagatagtttacccgcgtaatgtcgtgcgtgatttcccgtgattttcttggttcggtcaatttcggtatttacatgttgatgcttgcgttcaggttcctgttgctgttcggcatgcgtgttcgtgccgcttgtcataaaccggttcttgatgtcatgagcttatcatgatgcaatcatgataagctcatcatagagtatttatcttcacgttatcatgagatttcagacgtgggtttgaagtcgattggaggcgaccgcttggatccatgtggccgcaacaaataagacaaatgagctgatcaagggggatgatgatgtggacgaatgacgatatcgccgaggtgctggaacatctacgcgtccaaggcaacgatgatgcccgtttcgaggcgaaatcctgtgctcggaccatcggcgccagcgtgtgggagagtgtgagcgcgttcgccaacaccaagggcggcgtgctgttgttgggaatcagcgaggacggggatttctcgcctgttccgggattcgacgccaaccatattgcatcgcagttcatggatggtatgggagatggcaatccgcaaggagcacggttgacgaatcctccggagtatgacgtttcccgatgcgagcagaacggctcgtcgttcctggtcatcgacatccatgaaaacggcattcagcacaaaccctgctatcttacggcgagagggccgcaaaccggtgggtaccgccgtgtggacgacaaggatttgagattgtcgccaaccgaagtgttcgaaatgacccatgccctgacgctcagttccgcggatcgtatggttgtccctgaagccgacgtctccgatctgaatgccgaggcggtggacagggtgcttgctgagcatcgtaattccaagacgctgcgcgggactgatactcgtcttgagcgcatgaccagattgaatatggtgaacaaggttggagaggtgcgtcttgcgggactgttggccgccggacagtacccgcagcagtactatcccaagctgatcattgacgtcgtcgcacatccgggtgtcgagaaatcggcggttgagggtccgcgtttcgtggatcgtgtgcaatgcgacggcaatatgccggaggcaatcgaacaggcggtggagaccatcgccaaaaacctgcgggctcccacgttcgtcgtgggggtcggagcccgtaccgatagcgagattccaaaggaggtgctgcgcgaggtcgtcgccaatgccgtggttcacagggaatatgatgcgcaattcctcggagaatccgtgaccgtggacatctaccccgatcgggtggaggtgtcgaatcctggcggattatggggtggggtcacgctggccacgatcggcagcggcgtgtcatgctgccgcaatgcgacgttgatgcagctgcttcatcagataccgtatgacgatgcgaatgatgtgaccgtggaaggcggtggctccggcatccctctggtgattcgcgagatgaaatcccacgcactgggggaacctgtgttccgcgcgactcccgatcggttcacggtcgttcttggacgctacggcgtggagcagcaggagaaccgtgactggcttgatcatgtgggcgtccccttgactcgtcatgaacgtatggcgttgctcttgttgaagaggcatggcgatatgacggttccgcagttgcatgtcgcgctgtatctggattccgacgacatcagggtgattctgcatagattggtccaagcggggttggccgatgaaatcggccctgatcggtacgcactagcggagaaggtcgatggtggggagccgaatgggggccgtaaggggcttacggcatcggaatccgcgatactgtccgtattgtcggcggatacgccacttgatgtccacgaaatcggccgtcgctcggggagaggccttcctacgacgcgtaaggcgttgagccggctcgttgagcgtggagtcgttctcgccactgcgccgccgcgcagcagaaacaggaagtatcttctcaaaagataggatgatgccgtcgccggaatgtgcggtggagttccgctgattttgtccgcttcgctccgcccgccttatccgccgcgcacattagactgagatgcggttgaaaacgttgggattacgcctattcccgcctgcctgttcccgcgtgtgagagtccggtcgaccatcggaacgcgtggcggtgtgcgggggcgcgggatgggtgcgtcaaggagttacgcatggtggaaaagaagtggctcgacggctcggattcgaagggcgcgacgggtgcggcgcgtgcgacgggcatgctgcgtgcgttgcgtgcgcgtgcggcggcgtccggtgcggggcgcggcgtgatcgcggcggtgacgtccgtcgcggcggtggcgatgttgggcgcggtgtgcgtcactccggccagcgcgctcgcggatgtgaacgccgatgcggacgcgtccggcgtccggtccgcggcctccgtgacggcctccgcggccgcctcggacggaacctcatccgacgcgcgctcgcaggcgcggtccgcgacttccgcgacgcgtccggtcgcgaacggtgtgacggtcgccgatgagacggctgccgacgcgatgccggacaatccgaatgccgagctgccggataaggtgtccgccgagatctccgatgacgcgacggtggtgtccgagcaatatgcggctacgccggaaggcgagttgaaggacatcgagacgggcgagacggtcaccgatccgaagatcgtgggcacggagagcaagcagcccgatccgttggcgaagacggatggcgagtcgttcattccggtgagcgccgcggatgtgaaagagaaggtcgctgcgaacggcggtgacgtgaacgcggtctcctcgaagacgcgtgccgacaacgcgtcggtgaagctcgccgcgttgcagaacaacgagtacggtgcgcactggggcacgtacaacggcacgcaggcgttcttcgacgcgcgcaacaacctgttcgcccagcaggcgaagggcgtgatcgacgtgtccgcgtggcagaacacgattgactggcaggcggtgaagaacgcgggcgtcgagggcgcgatcatccgtctgagctacggctggggcaatggcttcgacgtgcaggcgaagcgcaacatcagcgaatgcaagcgtctcggcatcccgttcggcgtgtacgtcttctcgtatgcggaaagtgcggccgacggcgcatccgagggtgcggacgtggtggacctgctgcgccaggcaggcgtgaatccgggcgacctgagttacccggtgttctacgatctggagaactggacgtacacggggcacaagagcccaacgagtccgagcgtgtacgacggtatggtgaactcctggtacggcaaactgcaggcggccggttacaacaatctgagcgtctactcgtacacaagctaccggaacagtgcgctcaacagcggcaacatccacggcaagacccgctgggtggcgcagtacggctccaccatgcagtacaccgcgttccccacgaacgaccgcggctggcagcgtctgaactcgaatggcggtaagacggtgtactacggtgccgatgggaagatgctgtatggtactcaatacatcaatggaaggttgtactactttgactcagtcactggagcgaagcggtaaacatggattcctgcgtcgcaagtgtccccagattcaatttgtaagtgcgacgctcgtctttgggtggcttgtcttcggcattagcttgccgagctcgcggtaccaaacctcgttgggcgtttcccagtccaggaccttcatggggtgtcgttgatctcccggacgatggcttgcaggtcctcgtccgtcaggtcgtcgaagctggttctcttgggcaggtagcggcggatgcgcccgttgcggttctcgttcgtgccgcgctggtatgaggagtaggggtccgcatagtaggtgagcatgccgagggcctcgtccacgagcaggtggcaggaggactccgtgccgttgtcccaggtccggtcgatgcgcgcgggcgcggggatgtccttgtggatgtcgtattcggcgcgcgccgtggccggcgcgcccttgtcggggatgaaccgggcgaacagcctgcggctcttgcgttcgacctgcgtgccgatgcaccgcttggacggggacgcgccgaccacggtgccggattcgaagtggccgaactcatggcgcgagtccgccttcttcggccggtccgtgatcggcacgcgcatcgggatgcgcccccccctcgccctcctgcccttcgaacgcgggcggtgccgcttgccgcgaggcaggtaccgcctgaggtccaacgccctctgcggtttcgcgtggatccgccggtggaggcattcgtggcttatccgcatgcgcgggtcgtcgggccattcgaccttcagccgtccctcgatgagtccgggcgtccatcccttgcgcaacgcggccgtggcccattcgagcagcgggtcgtacgccatgcgcatgggcttgcgcggctggcgagcgcgttgctcggccttcctctgcgcggtcatggccgagtagaacggacgggacgtccacgcgcccgtcttcagccgtttcggcctgtagggccggtaggagtcgttctcgttggacgcgaaccacaggccgcgccgcagctcgcggctgacggtggacttgtcgctgccgatcctcagggcgatctggcagatcccgagcccgtcacggttcctcaactcgtcgatccggatgcgttcctctgccgacaggtgggaataggctttcatatcgagtgcaacgctttctcttcggttgtggacttgaacacttccaaccatagacaggcgttgcgcttctatctagaacccggggtctcagtggccgtacgggcgcaacggtaccatagtgcccatggctgatgaagtgtttactcctcataacatcattgtgaccggtggctgtgggttcatcgggtcgaatttcgttcattacgtgtacaacaaccatccggacgtgcatgtcacggtgctggacgcgctgacgtatgcgggcaacctggagaacatcaagggcatcttgggtgaccgcgtggagttcgtgcatgggaacatctgcgacgccgagctgctcgacaagatcgtgccgggccatgacgcgattgtgcattacgcggcggagtcgcataacgacaattcgatcgcgaatccggagccgttcctgaagaccaacgtggagggcacgttccgcctgctggaggcggcgcgcaagtacggcgtgcgctaccaccacgtgagcacggacgaggtgtacggcgacctggcgttggacgatccggcgcgtttcacggaggagaccccgtaccatccgtcgagcccgtacagctcgacgaaggcgagctcggacctgctggtgcgcgcgtggcaccgcacgttcggggtgcgcgcgacgatctcgaactgctcgaacaactacggcccgtaccagcatgtggagaagttcatcccgcgtcagatcacgaacatcctggacggcatgcgtccgaagctgtacggcgatgggttgaacgtgcgtgactggattcatacggacgaccattcgacgggcgtgtgggcgatcctgacgaagggtcgtatcggcgagacgtatctgatcggcgcggacggcgagcggaacaacctgacggtgctgcgcgacatcctgaccgtgatgggcaagagcccggacgacttcgactgggtcaaggaccgtcccggccacgaccgccgctacgcgatcgactccaccaagctgcagaccgagctcggctggaagccggtgcacacggacttccagaagggcctggagcagaccatcaagtggtacacggacaaccgcgcctggtgggagcccgccaaggccgccaccgaagccaaatacaagcagcagggccagtgagcggaatatgaaaatggccacacctcgaaggtgtggcccctatagcactaagaaagatacacatatgaatttgaaaaagcaagcggacaatgccgtgatggcgagtcgttttcttgctgacgcgcggttccaagtgtatctcgattatgcaagacggcatgtggatacagtcgatcgggaacggctggtcgatctggcggtgaggctgtaccgctggaacgtggaggcatccgccatcacaatcggttatatcggctatatcgagatattcgtcagaaacgcaatcgatcaccggctttgcgaatgggtgtccgggcagcagataacgggcatcccggactggcttgaagccggcaaaagcgatccgatcgggaggatacgggctttgatcaacagccccgagcgcgactatatcgcggaggcccggaacacggcattgcgcaagcagcggcattggcgttccgaccagacgcatccaaggcacggggatgcgatcacccgcgacgacgtgttctcccaattgacattgggcacgtgggatggcatgttgtcccgttccggcaaggaccctgaactcgcccatgtcctcatgggcgcgttccccaacatcgcggatgcatgggcgtcggaactgcgtcgtatgccgaagggaaggcttcccggcaacgacggcgacccgtttgaggacaggctgcgcaaggaactggtggaccgcctcaaatcggttcgtaccatccgcaaccgtatcggtcatgatgagaaccttctgcgggtcgagttcgcgaaactgagatacgacatgttcttcatcctcgatgccttgggccccgaatgcccgaattgggctttccccgataaaggggaggccttgaaaacgcttaatcctgcacgctgcatagcaacgtggcaaaacgattctgaagatagaaagtagggaacgtatgtcgttcgaattcgagaaggacttgaaggtcgaggagacgaacatcccgggcctgttggtgttcgacctgccggtgcatggtgacaatcgtggctggttcaaggagaactggcagcgtgcgaagatgaccgcgttgggtctgccggatttcggtccggtgcagaacaacatctcgtttaacgcgacgaagggcgtgacgcgcggcatccacgcggagccatgggacaagtacatcagcatcgcgaccggtgagatcttcggcgcgtgggtggacctgcggccgggggagagcttcggccaggtgtacacgacccgcctggacccgtctcgcgcaatctatgtgccgcgtggcgtgggcaacagcttccaggcattggccgatggcaccgtgtacacgtatctggtgaacgcgcactggtcgttagagcagaagaagacgtacacgttcgtcaacctcgccgacccggagctgaacatccactggcccatcccgctggaggagagcgaacgctccgaggcggacctgcatcatccgatgctcaaggacgccaagccgatggagccgaagcgcacgctggtgacgggctgcaacggccagttgggccgtgcggtccgcgcgtacgcggaggcgcatggtctgcgtggtttcgagtacacggacatcgacgagttcgacttctccgacccggccgcgtacgacaagtacgattggagcctgtacgggacgatcatcaacgcgggcgcctacacggccgtcgacagggccgaaaccccggagggccgtccaaccgcgtggaaggcgaacgcgcagggcccggctttgctcgccagggtcgcgaaggaccatcacatcacgctggtgcatgtgagctccgactacgtgttcgacggcaccgcggacctgcattcggaggatgaggcgttcgcgccgttgggcgtgtacgggcagacgaaggctgcgggcgacatcgcggtggcgaacgctccggagcactacatcctgcgttccagctgggtgatcggtgagggccgcaacttcgtgaagacgatgatgatgctgtcggaccgtgtcgcgaacccggacgaccagctggagcaggtgacggtggtggacgaccagtacgggcgtctcacgttcacgaaggacatggccgaggcgatcttccacctgctggactcgcatgcccagtacggcacgtacaacctgaccggttccggcgcggtgaggaactgggcgcagatcgcgtcccgcgtgttcgaactgacgaacggcaacggggagaaggtcaagccgatcagcacggccgagtacttcgcgaacgcgaagtcgccggtcagcccgcgtcccgagcattccgcgctcgacctgtccaagatcgaggccgccggctacacgcccgccgactgggaggaaaccttggaagcatacgtgagcaaggaactcggcaagtaggacagatagggcaaaccggaaaggtctgtcagcccattccgacggcctgatgtcagtgtgaaaaccgcgcagaatgacctgcgcggttttctgtttcgccactgtcttggctaagctggtgtgagctgattacgactgtgaagaaagcaggtccttatgaaaggcatcattctcgccggtggctcgggtacgaggctgtatccgttgacgacggtgacatcgaagcagctgctcccggtgtacgacaagccgatgatctactatccgctgagcgtgctcatgatggccggtatccgtgacattctcatcatctccacgccgaaggacctgccgaacttcgaacgcctgcttggcgacggcagccagtacggtgtgaaattctcctacgtggtgcagccgtcaccggacggtctggcgcaggcgttcctgctgggcgaggagttcatcgcgggcgagccgtgcgcgctcgtgctcggcgacaacatcttctacggcaatggactgggcgccacgctgcgcaaggcgaaggcgaaggcggagaacggcgagggcgcgtccgtgttcggctactacgtggacgatccggaacgttacggcgtggtcgagttcgacgcggacaagaaggccgtgtccatcgaggagaaacccaggcatccgaagtcgaactacgcggtgacgggcctgtacttctacgacgagcgcgtggtggagtttgccaagcaggtgaaaccgtccgcgcgaggcgagttggagattaccgatctgaacaagatgtacctggaggcgggcgcgctgaacgtgcgtacgctgggccgcggatacgcgtggctggacactggcacaatggactccctgtacgaggcgggcgagttcgtgcgcaccgtgcagcgcgcgcagggcctgcccatcgccgtggccgaggaaatcgcctatgagaacggctggattacccgcgagcagctgcttgaggccgccgcgaagtacggcaagagcccgtacggcaagcacctcaaggatgtggccgacgacaagatcatcttgaaacagaagaatgcccgaggtggcctcatttgaaaatgagcgcgaagcccggagtggtgcctcgccggtggtgagtgcgaaatcctagtcctcgtcggcttgcggggtttcgcctccgttgtctatttaggaggcttctgctgttttcgtgggttagattgcgggttgtggcagtcgtatgtcgagtccgccgcatcggagcatgaccagggcgatgaggttgtcgacgtggtggaagccgtaggcca

SEQ ID NO: 220 - DNA, 8970 bp, Unknown
  R101_18m  MAG No. k141_28926
acgctgattgggcagttcggtgcagaccattatgagcatgtggctgaggtgaatttcatcgaaatgcctcaggcggtcgaaacggtaagcaaggccaaggacaccgaagacctgatactgcggttatcggtactttccggcacggaaattacgccgggcaagactctgctgtttcttgacgagatacaagcgtgtgaggacatgctcacgtggaccaaattcctgtctggcgccaaaggattggatgtcatcgtttctggctccctgctgggcattgatgtgttcaatgtgcgctcgatcccggtgggattcctgcagacgatgcgtatgtatccgctcaatttctatgagttctgcgctgcatgccggctgcctcagtccgctctcgatacgctgcgtgaatgttatgcggatcgacgggaggttcccgattatctacatgaacggctcaccgacctgtggtacaagtatctgctgattggcggcatgcccgacgcagtgcagtcattcgtggattttgccgatattgtcaaggtccgcaatactcagcaggccatattcgatacctatgaatacgacatcaccaaatatgtctccgatttggtggaacgtcgccatatcaagagcatttacgaggcgattccaagtcagctcaatgcggaaaacaagcgattcaagttctccaagttgggcaagaatatcaggttcgctcatatgcagacggcgttcgattggttggcgaacgcaggtatcgccttgcctacttcgcgcgtgcaggaccctgaatacccgctgacggagcatgccgacgagaacacgtttaaactgtacatgaacgatgtcggtttgctgacctcccgtttgatgcgcagtgtggacttagagattgtgaatcaccgatccagtatgaattacgggtcgattttcgagaatgcagcggctcaggaactgtttgcacggggattggaactgcattacttcaaccagaaccgtattggtgaagttgattttgtagtgcagcaaggtctggatgatatttcactggttgaaatcaaatcaggcaaggactatacgcggcatcgggccatgaacaacctgctggataccgacaattatcggtttgcccatgcctacgtgttccatgatggcaacgtggagactgttggacgaaccgaatacctgcccatatacatgctgggctgtttgagcgtgatatgacatgcgccactttcccgggaacgtgtcgctgattgggtctgttgcccggcctagcggttcggtccattgacccagcctgttacttcacccttgccgtccgcaatggagtgaaccgactaatccatatccgcaaaatcgacaagcgtcactgtaccgtcttgcgccgcgcgggcggcgacatgctcgtcgaagcctgatttggagaacagcatgtaatggctggtttcggggtgcagcagtctggcgcgattgcgcagcacttccaactgctgcagaccggatggcacgctgcgccatttgcattcgcagaataggagagttttcggtttttctcctgaagccacgatgtcaatttcctcctgactgcgggtggtcggattggcgccccaccaacgtccggcatcaagcatgaggaaaggcaatgcctcggtaccgttatgggaccatatccactgaacgcagatgtcttcgaacacctgccccataaagtcggagatagtgcgcataacacggtcggcggcgagatcggcatgaccggattgaatgagggacatgttgttcggcacatatcggtaccagaatcggaagaacgagtcctcgatacggtagatcgtcttgcgaggagcgtcctcgccgaaaggtgtctccttgcgaacgattcccagatcgatgagattgcgcaaataggtggcgcatgaggacgattccatatggcatgcggcggcgatggtgttcgaccgagatgccccggaggcaatggcctggattacggcgttgtactcggccggactgcgcagctcctgcttcagcaagttgtctggctcctcaaacagatagcagcttgggtcgaggatgttccaacggatgttgtctcggatgctgatgccgtcgtccagttgccgaagatactgcgggataccgtcggtaagtccgtaagcaatagcagcgtcctcgttgctgtatcttggcaagaacttgcggacatcggcatagccgaatggctccactttgatttgagcggtgcgtctgccgtatagagggctctcatacccaagcacctggcgctccatgaacgacatggaagagccgcataacaccatcatgagctgactgtcatccttatggcggtcgatggcatgctgcaggaccgaattgatggtccggtctgctttagccagatatgggtactcgtcgatgacgaaggcgatgcgttgctttgcggccagcgcgaacaccgcttccagtgcggattcaaagctgcggtatacgggcgttgtctcgaacgcctctgagcccttttcatacagagcaatgctgcggcttaacgattcgagattcttggaagcgctggattcgattgccgaaaagaaaatcgtggggcgatcttcgaggaagcggttgatgagtgtggtcttgcccacgcggcgacggccgtagaccacgacgcactcgaactgctgtgagctccagcggcgttccagtgccgaaagctccttatctcgcccgacgaacatggcccttgtctccttgctttgctgtctgccctggtgcacacgcgcaaattatagaatcgtaatttacttaattatgattctataatttggtcgactggtatgcaacaggtctcgagcgtgcattgccgcatgcgcaacgtttcgcgcgacacattccggggaatgcgtcgcgaattgggtcgtgccgcgttgctaatgcggggaacacgcagagttgcaggctgttgcgattggacgcaggccgtctagactaatacgcgtttgcgaaagtcgaacgtgcttcgaccgatgaaggagagctccggtcatgcgaccaatgacaggcgcagtgcgaagcacggctgatcgtgaatcgcggcggcagcgattgccgcgtgcggcgcaggagcatgccgcaccataccacaagcaaacaatccccaagaaacggtgatctcctcacatgtacgtcgatccgggaatcgataccagcgcaagcaatctcaaatgggtgctgccatattgcaaaccagacctgccccgcgtggtaggcgcgctcctactgttcatcgccaacaacacgatggccctgaccattccgattctgtccggtatcatcgtggaccgcgtcatcgtcggcggacatgccgacgaactgccacgtctgtgtggactgatgatcctcatgaccatcatccgcgtgggcgcgcgatacggctaccagatgtggatggagcgtttcggccagaactcggtctaccgcctcgtctccgacgaatacgagaagctgcacgagctcgacttcacgtacttcaaccacacacgcaccggcgacatcatgagccgtctgacctccgacaccgacgcgatccgccactgcctgagttgggtgagctatcagatcgccgactgcgtggtcatgttcgtgggcgccctgtgcgtgatgttcgctatcgattggcgactcgcgctcgtcctggcctgcgtcacgccgttcatttttgtgctcacgcgcggcctgtccacgcacgctcacccgctgttcttcgccatccgcaactcgctggcctccctcaactccatggtcgaagagaacatcgagggcaaccgtgtggtcaaggcattcgtgcgcgaaccgtacgagaccgaaaagttcgacgagcacaacgacgattacatgcagcgcaacatggccctggcctacaactcgcgcaagtacatgccttggctggacggcctcggcttctcgctgcagctcatcacgctcggcctcggcggctttcttgtcatcaagggctacatgaccctcggcaatctggtgagtttcaactccttcctgtggatgatcgacggcccggtgcgccagtccggctggctcatcaacgactggcagcgattcaacgccagctgcatcaagattcgtaagctgctcaccgaacagccgcgcatcgtggagaagcccgacgcggtcgaagccgtcaagcaggcggtcacgatcgtcgagcaagtcaagcacgatgatgaggctaccggagcgcccggtgcttccggaacatccggtgcccagcagtccgccgaacgcaagtcctgcccgctgcgcatcaagggcgacatccgcttcgaccacgtcagcttcgccttcccggacgacccggagaccccgatcctcaaggacctcgacttcaccgtgcccgccggctccaagctcggcatcctcggcgaaaccggcgcgggcaagtccacgctcgtcagccttatctcccgcttctacgacccgaccgtgggccatgtgctcatcgatggcatcgacgcacgcgactggccgctggccaccttgcgctcgcaggtgtgcatcgtggcgcaggatacgttcctgttctccgacaccatcggcggcaacatcggttttggtgccagcgatgatagcgacgaccgatatatccagaaaatggcccagatcgccggcgcggacaatttcatcaggtcgatgccgcagggttatgacaccgtcgtgggcgaacgcggcgtgggcctgtccggcgggcagaagcagcgcctgtcgctggcccgcgcgctcgcggacaatccgtcgatcctgattatggacgatacgacctcggccgtcgatatggagaccgaggcggagatccagaagcacctcaaggagatggacggcggcaagaccatcgtcgccatcgcccaccgcatctcgtcggtcaaggattccgacctgattctggtgctcgagcacggacgtatcgtcgaacgcggcacccacgccgaactcgtggccgcacacggccgctactgggacatctaccacaagcagctcggactccagtccggcgccgcacaggggttttagaagaggacttatggcacaacgcaatacattccgcgaggatgaggagctggaggagtccatcaacctccacgacatcgctcgcgtcggcaaatatatcaaaccgtatatggcacaggtggcgcgcattctcgtcgtcgtcatctcgatgagctgcatcgtcgtcgccgtgccgtacctgaccaagatcatgatcgacgaggcgatcccgaacaaggacctcggcaagctcggcatcctcgccgtaatcctcgccgcgctgatcgtgctgtacgagttcgggctgcgctaccgcacggtggcgatcacgcgcgtcggccagctcatgctcaaggacatgcgccgcgatatcttcacgcatatccagacgctgcccttcagctacttcgattcgcgcccgcacggcaagatcctgatccgcgtggtcaactatgtgaacacgctttcggacacgctgagctccggtctgatcaacgtgatctccgacgtgttcaccttcgtgatcactctgatcgtgatgttcgtgatcgactggcagctggccctgtggagcttgatcctgttcccggtgctcatcatctgggtgcgcgtgctgcagatcttccagcggcgcgccttccagaagctctccaacaagcagagcaacctgaacgcctacatccacgagtcgatcgccggcgtgaagaccacgcagaccttcgcgcaggagcaggcccagttcaggaccttccaggagcagcagggcgaggtgcgttccgcgtggatgcacgccgtgcacatccagttcctcatgtggccgggcgtgcagaccatctccgtgatgaccatctcgttcatctacttcgtcggcgtgatgggcttcgggggcgtgaacgtgaccaccggcgtgctcatcgcgtttgtcggctacgcgaacaacttctggaatccggtgatcaacatcggcaacttctacaaccagctcatcacctgctcggcgtacctcgagcgcatcttcgagacgctcgacgtcacgccggagatccgcaacaagcccgacgcggcggatctgccgcagatccgcgggcgcgtcgacttcaacgacgtggtgttccgctacgagaaggacggccgtaacatcctcaacctcgtggacttccacgtcgaaccggggcgcacgatcgcgctggtcggcccgacgggcgccggcaagacgacgatcatcaacctgctgtcgcgcttctacgacgtgtccgagggctcggtgacgatcgacggccacgacgtgcgcgacgtgacgctcgcatcgctgcgccggcagatgggcgtgatgctacaggacaccttcatcttctccggcaacgtgcgcgagaacatccgctacggcaagctcgacgccaccgacgaggaaatcgaggcggcggcgaaggccgtgcacgcgcacgagttcatcatggaactgcccgacgggtacgacacggtggtggaggagcgcggatcgaccctgtcggccggccagcgccagctcatcgccttcgcgcgcgtgctgctcgccgacccgcgtatcctgatcctggacgaggcgacgagcaacatcgacacgcgcaccgaggaggcgatgcaggccggcctgcagcatctgctcaaggggcgcacgagcttcatcatcgcgcaccgcctgtcgacgatcgagaacgcggatgagatcttctacatcgatcacggccagatcgtcgagcacggctcgcacgcgcagctgctcgccgccaagggcgcgtactaccgcctctacgagtcccagtacgcgatgattcgcgtggccagcggagcgccggaagagtgacgagatgttgcgcacaaggatgcgtttagcggcgtttcacatagcgggtgctgcgaccggcaccgattttgatgatcgtaccggagtccaacagtgatttcagcgtgcgctcaatggtggtggtgctggtatcgggcatgcgagcgagaatatcggccttggagagtggaactagggatcgatcaagcagtgcttcaatccgcattcccttggtggctactcgcggtgctccctgcgctctgccgcctgccgtgagattgatgcgttcgtcgaattccttgcacgcggacagtatgatgccaagcaggtagttcgtgaatggcgcataatcattggcgttgtcgtcccatccttgggtgcttgcggccagtgcctcataataagtgcttttactttgctcgataaggtgttcgatactgatgtatttgccgaccatatagccattgcggtacagcatcaggagcgtgagtagccgactcatgcggccgttgccgtcattgaacggatgtatgcaggtgaaatcgagaatgaacatggcgatggcaagcaatggatcggtatgtccatctcggattgcttgcgtgtaggcggaacacgcgcgttcgatcagtattcgatgtagtcgaatgatctcataccgcctcattttctgcatcatacgaatttttctgcatcatattttatcaaaatgaggtagaaaatgggctgatgaggtagaaaatgggctgatgaggcagaaaaggcggcaggatggtggccatctcgcttgccggttgcgctactttcccgggaatgttgcgctcgtggcaagagacggcaagttcaggcggccgagattggcgatacccgtcgtgtagtcgaacgtcttaccggactgccttacgagcgttgctgacggtagcctacactgagaaacagcctacactgagaaaccatgagcaagcaccaccatcgcgaccgtagctgggctccggcacctgaagcgttgccggacgacgcccagaccatcgacaaccacactcacgtggcctccgtaatccctttcgcgcgcgctatgagtcatgaggcgcaggagaaggggcagcccgaagtcccggtgtacgacgtcgaccaattgctggcgcaggcgcaatctgtcggcattgggggtatcatcgactgcggttgcgagctgccgcacctgatgaccgccgtccagatggccctcgatcatccaggtaacgtgcacgcggcgctcgcaatacaccccaatgagtccgtgctccacgggcatcgcggtgtgccggggccggatggtctgcctctcaaatacaagccttaccatgacacgtctttcgaggacgcgctcgccgaagtacatcgcctcgccaccacataccccgagcaagtggtggctatcggcgagaccggcatggacctcttccgcaccggcgaaggtgccaaggaactgcaacgcgaggctttccgcgcgcatactgccctggccaaggaactgggcctgcccatgcagattcacgaccgcgactcccatcgcgaggtcatcgaaaccctgctggccgacggcgcgcccgaacgcaccgtattccactcgtattccggcgaccgtgagatggccgagattgcgcgcgaacatggctggtatctgagcttctccggcaccgtgagctacaaaggcaatgacggtatccgcgaatcgctacggattgtgggtctgggccatgcgatggtcgaaaccgacgcgccgtatctgacgcccatgccgtaccgtggccgcaccaacgcgccgtacatgatcccctacaccttgcgggccatggccgatacgctcgacctgtccatcgcggatgtggcgcgcggcacccgcgataccgcccgcgccgtatacggactgtgagggccgggtgtgcggccgtcgcggcgatgtgttgacttgtaaaatttgtcagaattgtgaacgaggtctaccatgatgtacctgacataagcgagggggatgatctccacctcaatggaggactgaacgtatggctgagtcgaaccaaaggaccgcacgcgcccaaaaagcctcaaaggcc

SEQ ID NO: 221 - DNA, 27365 bp, Unknown
  R101_18m  MAG No. k141_30087
ggatcagctggtcaccaccgtgttggaggatgacgtggcctttggcccggagaatctcgggctggagcgcgagctcatcggcgagcgtatcgttgattcattgcaggccgtggggttggcgaacttacgccagtccgacccgacccgtatgagcggcgggcagcagcaacgcgccgccatcgccggcatgctggccatgaacccggcaatgctggtattggatgagccgaccgccatgctggacgaatccgcacgcgccgaagttatgcgcattttggatgatttgcaggcgcgcggcaccactattgtgcatgtcacgcatcatccggatgagaccgttcatgccgatcgcatcgtgcacatggaggccgggcgaatcgttggtgtcactgcagccgccgataatcgacccccgctagcggaggctgtctcgcaaagcgagaccgagggtggtatcggcacagaagccgcccccagtcgtcctacgaacgacagcccccgccagcggaagcgcgaagacggctccgaactgccgctgctctccgacggcatcggtgatatgacgaaccccattattcgcgtctcgcatctgacctatcgctatccttcggccaaacgggcggttatcgatgacctgtcgttcaccatcgcgcgcggtgaaaccgtggcactgatgggcgtgaacggttcgggcaagtcgacgctggtgcgcatgctgtgcgcgctggccgcgccgaccgccggcagcatcgaggtggccggcgttccggtggcctcgaccggcaaacgcggtcgcaacgcgcgtccgaagccggcgaatcgcaggcaattggcgcaattgcgccggcatgtgggttacgtgatgcagcatccggagcatcagctgttcgctgacacggtagccgaggatgtggcgtacggcccgcgcaaccaggggctcgccgaggccgaggtggccgaccgtgtgcgcgaatcactggacctgctgcatatcgggcatcttgccgaccgctcccctttcgacctgtccggcggacagcagcgattggtggccatcgccggcgtgctggcctgcaatcctgacgtgctcatcatggacgagccgaccgcgagcctggacgtccaggccaaggagcgcatccatgagctgttgcgcacgctcaaatcgcgcggcgtcaccgtgctcatcatcacccatgaccgagcggaggccaagcatatcgccgatcgcgtggtacgtatgccgattgccggcgcggctggtgctgagagcatctcggcaaccgagactgccttccccgccgagtccgtctcccctgacaaacccgcgcactcggtgatccaccgacttgacccgcgcgtgaagatggtgggtttcctggccgccatgttcacgatgttcgcggtgaacacgcccctccagcttgcgctgggcatcgccatcaccctggccgttatcgcggcggcacgcctgaacccgttacgggtgctcgaatccattcatccgattctgatcctgctggggctgatgggcgtggtcaatctgtttgtggtacgcaccggcacgccggtggtggcgctgggcccgctgagcatcaccgatcagggcgtggccatagccgtgctgtacgcctgccgtttcgcattggtgatcattctgggcgcggtgttcctcaccaccaccacgcctaccgccatgaccgacgccttcgacaccctgatcagcccgctcaaccggctcggcatccacgcccaggagatcgcgttggtcatgagtctggcattgcgattcattccaacgctgaccgacgagacccgtgccatcgtcgacgcccaatccgcgcgtggcggttccatcgaaaccggttcgctggcccagcgcatcaaggcgatgagcgcgattatcgtgccgattttcgccggcacgttgcgtcacgcggacaacctgagcctcgcacttgacgcccgctgctacgaggagagcatccgccgcacccactggcgtgccctgaccatcgccgcgcaagatctcgtgttcgccgtcgccgtcatcgcctacatcgccgccatcatcgcgctgtagggcggcaaacagcacagacagcaccggttgctatgctggtgtggttatacgaaagatgtaaggaaattcccatggcattgaccaagaagcaaatcaagcagctgcgcgcgatggcaaactcgctgaagcccctgttctatgtgggcaagaacgatttgaccgagtcggccgtcaatcaggccgatgaaaccattgagaagcacgagctcatcaagtgcgccgtgcaggacggttctggcctgaccgccaaggaagccgccgccgagcttgccgagcagctgaacgccgaagtggtgcagtccatcggcaatcgtttcgtgctgttccgtcgctcccggcgcgacgatgtggagcatatccgcttggtgcgcgagtagcgttcgctctgctcgatcccgtagcttgatatgagtaatggcggttggaatcagtccgattccaaccgccattactcatattcgcccagcgagcaccgtcactgatccaagatggacccgacgattcccgcaacaatggtcagaaccaaggaccccagtaccgaccaccagaaaccgtgtacgaagacgcccacgccgaacagactgaccgccagccagctggcgagtcgcatgaacagccaattgataatcaaggtgaccagcccgagagacagaatcgcaaacggcagtgcgatcagatgcacaatcggcttgattgacgcattaatcagcgccatgaacaaagcgaacgcggcgatgccgagaatcggaggctcccccaccggggtcatgccgggagtcaccgcgaccatgacggcggcggcgatagtcataatcaaccagctggtcaggaaacttttcatggcccaatcgtagcgcggcaggttttactattaggcaaaacgtgagatgatgttgtgcagaaacggtaagaaggtactgccgttcccgattgagaagggatagacccacatgactgataatcaacaacaaccgtacggttcggacagtgttccgcagccggcacaacctgcacagccggcacagccgtcgtacggccaagatgccgcacggcagcctcagggctatggcgccccacagcccgccgcatacgctcaacccgccgccggaagctacggccagcagcagccgcaatacggccagcccgccggcgcatacgctcagtctcagtacgctcagccgcagtatggccagcccgcacagcccgcagcgggctacggccagcagcccggctatggacaggcctaccagcagccgaatgcctacgcacagccgcaatacaccgccgctccgtatgccgccgccccggtgtggcaatcatccaagtccaagttggctgccggcctgttgggcatcttcctcggcggacttggtgtgcacaacttctatctcggcaacaccggcaaggccgtggcccagctgctgctgacgcttgtcggctggattctgctcggacttggcccaatcgcagccgccatctggggctttgttgaaggcatcatcattctgtgcagcaagcccggctcgccgtggcataaagacgccaacggctacgaactatcagactgagactgacctcgggccacgttcattgggcctctgatcaaccacgcctctgcaggtatcatctcgatgccgcagtcgtagcgggatgcgacacgccggccgtgtacatgagttcatgtacacccgatacaggcgaatcagtatcgcacgagattcaacagttcctgctgtttggcatagcgggaaacgttggtcagggcgatgcggatgatgtgttcggaagtcttttccaaatgattgccgccggccacatgcggggtgatcaggcaatgcggctcatcccacaacggactttccgccggcaacggctcaggctcagtgacgtccaatccggcaccgtggagccgtccattgtgcaaggcgtcggccaaggcctcgggatcgatggcgtcgccacgcccggcattgatcacgatggccgtggatttcagacgccccagacgatccgcattcagcagatgatgggtctgcggcgagcgcggcaccgccatcgccaccacatccgccaatggcagcagtgcttccagccgctcgaagccatacatcttttcaatgcccttggccggcacgtccgcatgacggcgcacgccgaaggtacgcatacctacggattgggcaagctgagcgaaatgcgacccgatgtcgccgacgccgataatcagtgcgatgccaccttccgggctcaataccgggccttcatcctgccactgatgatcacgctgattggaggcataccggttgaggttcttcatcaatgcccacatggtggcgaacatgtgttccgacacgctttggccatacgcgccgctcgcattggtgaccatggtgccgcgaggcagcacacccgggcggatgtacgcatccacaccggcgctgaaggtctgcaaccattcaagacgggtgtattgggaagcctgcgagaccggaaagttgccgatgactgcggtagctcgggagcgaagctcctcgggaacagcggccgaccagaccatgtcgccgcggtgcgcttcgtcgcccacgaattcctgcggcacatcgcgggccgccttggcgaaagcgcgccgttctccttcgttgagtggcaggcagttgacaatcagcttatgcgtgttctcaatacccatggttcaccaaactaggcggcagggcggatattatcgcgtgtttcctcatgctgaaccaatgccgaacccgccccgccggaccaatgccgaacccgccccatcaaaccccaccaaaccaagggacagcccattgcgcatcgaccgtagcgtccgccccgaaccgtacactcacaggtggttttgtgattccatagcgtgcagccaaggcagtacgattgccggtttatccgcacgcacaggtacctacgccggttggtaaaccttacattccatacattgcaaccgaacgtttaggagcatgtatgcctgagcagcatattgataacgagaagattcccacacgtcttatcggcgcgattgtggctgtcggctcacttgccttcattggcattctgaccgaaaccgtgatgaccgtgcttttccccgcactgatgcgcgaattccatgtcgacacggccactgtgcaatggattaccacgatttatctgttggcggtggccgccaccatgcccatcagctcgtttttgaagcgccgattcgcactgaaaaccatttttcttgcggctgtgattctggccatcgttggctcgctgatcatgatcgtcgcccaagccttcccgctgctgattgtcgcccgcattattcagggcattggctcaggcgtggccacgccgttgatgatcaacatcattctggagcagtctcctcgttcgaaaatcggccgattgatgggcgtaggatcgctggtcattaccgtggctccggccatcggcccgaccgtcggcggcgcggtgaccacagtgctgccgtggcgcgcgattttcgtcatcgccattccgctggtgctaatcgcagcatgcatcggcatgaagtgcattgagcagaagacaccgaccgaggctgcctatcttgacccgattcaacttgggtccattgttgtcgcgttggtcggtctggtgctggcgctcaaccaaggtggcgtggccatcagtgcggcggtgtccggcaagtcagccacacgctccggcattatcgccattgtcagtctgattgtgggcctcgccttgttgatcgtgttcgccatgagttccaagcgtgccttctccccgctgctgcgccttggcattctcaaggatcccgccgtactgttacacgcctgcgcatatctgctgctgccattggtcgccatcggctacggctatgtcatcaccaatgtggcacagctctcgctcggcaccacggcatttgtggccggctctctggtgctgcccggagcactggtcggcgctgtctgtgccccgcttggcggctggttctacgataagttcggcgcggtcaagccgattctgattccgatcggcatcgctattttgggcccagtgcttatgctggtgttctcgatgcagcttacgcccgtgctgctcgccggattctatttcattttcggtctgttctattccatcggcaatgcgaatgtgatgaccagtggcctgtcggaggtctctcccgagttcaagccggacggcaacgccattttcaacacgtgtcttcagtttggcggcgctgccggtaccgcactgttctccacgattctttccgtggctcaggccggcgcaggagaagaaggcaccgctgagtttgctcacgccactgccgtcggcggcacatggacgtttgccacgatgacggttatctgcctgattggctggtgctgtctggccaccgcgttccgcattcgcgcctcacgccggcgcgcctaagaccgtcagtccgcggcccgcgacgcctcccgcccggattcgtcaccgtgcagtatcgggcgaatcttggcaagacgctggctgacttcgtgttcatagccgcgatcgttgggatggtagtactcggtgccacgcagctcttcgggcatatattcctgtggcgccacggcaccgggccaatcgtgcgcatacttgtagccctcgtggttgccccactctttcataagcttggtgggggcgttcctcaaatacagcggaacagcgccgatcttgccggtatccacgtccgcgagcgcctggttaatggcgttatagctggcatttgatttgggcgcggtggccacggcaatcgtggcttcggccaaaataatacgtgcctcgggcatgccgaccagcgccacggcctgcgccgcggccacggtgacctgcaaaatctgcggggcggccatgccgacttcctcgctggcggcaatcatgatgcgacgggcgatgaagcgcggatcttcacccgctttcagcatgcgcgccagataatggatggcggcatccggatcggagccccgcatggatttgatgaatgcggaaatcacgtcgtaatggtcatcgccgtctttgtcgtagcgcacggtggcggtgtccattaccgtagccacgatttcggaggtgatgatgggtcggcgtgcgccctttttgcgggcttcgtcgccggtgaccgcgccagccgcggcctccagaatcgtgagactcttgcgtgcgtcgccaccggccatgcgcacgatatcggcgatggcttcgtccgtggctttgacctcgtccctgagaccgcggtcatcagtcagcgcgcgctgcaccagttcggtgagctgatcaggctccaatgactcaagcttgacgaccaccgaacgggagagcaacggtttgatgatggaaaagctcgggttctcggtggtggcgccgataaaggtcacgtcgcggttttcgacggcgggaagcagcgcatcctgctgggatttggagaagcgatgcacctcgtcgatgaacagtacggtttcccggccgcgtgacacgagccgttcgtgagcgcgggtgagtacgtcgcgcacgtctttgacgccggaggtcacggcggagagttcctcaaacacgcggccggattggccggccacgatggtggcgagcgtggtcttgccgacgcctggagggccgaacaggattacggagctcggcgcggtgagactgcctttgctggccggattggcgaggcggcgcagcggcgagccctggcccaacacctgcgtttggccaatcacctcgtccaaagtgcgtggacgcatgcgcaccgccaacggccgtgtcatcgactccggcgcatcagccgccccaaacaaatcgttctcactcataacgtcctatagtaccccagtgttcgaacagacgttcgagctgcaccttggcttccctcagagaggggagccaggaatcagttactcaccttgtagtcgtggaagactacttcgccggtgtcttgggtggcgtcaaggtccacgatgccttcgatggcccagtcgtggtcgccatcggaatcatcgataatctgacgcaccttccacgtatgctcgtcgttctcgtgcttgtcatccaacatgaacagttcgggcgagcgcgcttcggcgccgatgcccacgtactcgtgctcgtcgtagtagtcgtcgagcacatcttcccattcgtgcacgccgtagccccagtccttgtcgagcgcgccgagcttgtccggctggtcaaggtccataagccgcacacggcggaacaaggcattgcgcaccagcacggtaagaccacgacggtcctcgaccaccgcgctttttgcgccgggcgcggccagggatgccgcagcctcggattggtcagccgagtcaccggcgttctcccattcgtccaccagcgaggagtcgatggagcgcacgagcacgcgcagccacgagatgatgtcttcgagttgctcgtcacgcttttcgggcggcacggtgcgcgccagcgtgcggtaggcgtccgagaggtagcgcaacagggtgccttcggagcgggcgatgttgtatcgggtgatgtatccggtgaagtcggaggcggtttccaccatgtcgcgcaccacggatttcggcgacagccagtagtcgttggcccacgggacatcgtggcggtactgatcgaacgcggcttcgagcatgtcttccagtggcttcggatacgtaatctcctgcagcttatccatacgctcgtcatagtcgagtccgtcggccttcatatcggccatcgccttgtctcgggcctgacgctcctgggcacgcagcacctgcttggggtcttcgagcgtggcctcggccatggagatcacgtccagcgcataggtgtcggactcggggtcgagcagttcgagcgcggccagcaggaacggggagagcggctggtcgagggcgaagtcgtccggcatatcaagggtcatgtagtagtccttgccgccgtccttgcggtcctcggtttcgatgacttcggtatcgaacagggtttggaagatctcgtcggcccgctggtgcagatgctccttctggtcgggggtctgcgcggaatcgtcgatgagatcgtcgatacgggcacgggcgtcaccgccctgcgccacttcattgagcaccatcgaatgcgtgattttcaggtgcgggaccagggtctccggttcagcgtcgatgagcttatcaaacgtgctctggttccaggtcacaaaaccttccggcgccttcttgcgcttgaccttcttgagtttcttcggatctcccccggccttggcgatggctttctggttttcgatttcatattcgggagcctcggcgatcaccagtccctcggtatcgaatcccatacggccagctcgtccggcaatctggtggaattcgcgggcgcgcaggcggcgcatcttggtgccgtcgaacttggtcagggccgtgagcaccacggagtgaatcggcacattgatgccgacgcccaatgtatcggtgccgcaaatcaccggcagcagaccctgctgggcgagctgttcgaccaggcggcggtagcgaggcagcatgccggcatgatggatgccgacaccggtgcgcagcagtcgctgcagaatcttgccgaaggctgtggtgaacttgacgcctttgatggcttctgcgatggcttggcgctgttccttgctggatacaccggtggaggcgagcgcttgcgcggtctccaatgcggcgtcctgcgaaaagtggaccacgtaaatcggggtttcgccgttacggaaggcgagttccacggttttttccatcgggtcgagcgtgtattcgtagctcaacggcaccggtcgcggcgcgtcggcgattacatccacgtccggggtgtcgttcagatcggagagcttgtcggcgatggcgtccacattgccgagtgtggcgctcatcagcaggaactgggtctgcggcagcgtgagcagtggcacctgccacgcccagccgcgctccggatcaccgtaataatggaattcgtccatcgccacgaggcccacatcggcatgggtgccttcgcgcaaagcctgattggcgaggatttcggcggtgcagcagatgatcggcgcgtccgcgttgatgtggctgtcgccggtgatcatgccgacattgtcgcggccgaacacttcgaccaagtcgaagaatttctccgacaccagcgccttgatcggagcggtgtaataggagcggcggccagtgcatagggcggcgaagtgcatgccgagcgccaccagcgatttgcccgaaccggtcggggtattcaaaatcacatggtcgccggccaagaggtccataatggcctcttcctgatgcggccacggctcgatgcccttgacgtcttccacccagccgaagaaccgttcgtagatgtcgtcggccgtaagattccgttcgcgtccgtcgccgtcccattcgggggccagccgccccagggatccgtattccttctcgtcagtcataatgctcagtctacctagtggcctattccgacggcacgagccgccctccgtcgctatgcgacgcctcccgccagcgggcggagccatgcgaagagctgtgccatgcacttggctccgccaatgggaggatcgctcacgccaaccggcggcgcacctcgtcggggtccacctcgggttcgaggggaggccaggtcatgttcatgttcttcaaggtggtgcgcagcagttcggagaccacggctcgcgaataccagcggttatcggccggaacgaggtaccacggtgcggcggccgtgctggttttctcgaacacttcctgccaagcgaacatgtactcatcccatcggtcgcgggcctcgaggtcggagatatcgaatttccagaacttggtgggatcatccagcctcccaagaaagtgttttttctgttcttcctggcttaccacgaggaagatcttgaggatggcgcatccgctggcggccagttcacgttcgaaatcgttgatctggtcgtagcgggcacgccatacgtcttcgggataggtgccatagacgtgcggcatgaccacatcttcataatgggagcggtcgaatacggcaatccaccccggcttgggcaattcacgcttcacacgccagaggaagtcgtggtcgagctcctcggccgtaggcttgccgaagccatggtaatggatgcccatcgggtcgccttggctgaacacgtggcgcacaatgccgcccttgccggaggcatccatgccttgcagcacgatgagcagccgccgtgccgagcctttgacgccattcgcgtacatgagccgctggtatcgggcgatttcggaggagctgatcgaaatgaacttctcggcgtcctctttattgccgtcgaatccgggagtggaatcgccttcgacatcagtgacctgcatgccgtggtggaacataagacgttgagcgggcggcaacgaccatacggcgctgagcagttcactggatttcgccgcacgcgccagtcgttcaggcacgctggcactggagtcgatggtgtctatgcgatccaccgcgagctgtaataccttgtcgatccgtcgatcggttttggattcctttcccttgccgttcttgttgttctttcctgaggattttccggccgtaccccacttgccggcctcttcaggctcgttggttctgtcgtcgtccttggtcatgctcccgattgtacgtcttgtaactcaggagacctagcaacgtagcgacattcacatttcgcctgttactgcaaatctataggcatgcagtcgttcggaccgtaattgttggctttgcaccaattccaagcctcatctgtcgagtcgaagccctcaccggcaagaatcacatagtatttgtcggaattgctgctgtaggcgggccagtcacccgaccagataagcagtacgtttgaattcttgttgtgcatcgtgatgaattgcgcaagaatatcgcggtagttccaggtcttgccttcagcctccatacccttacgcttgctggacagctgtgcggtatacgtggaatagaacagctctgcggagtccttgtcgtgctcgacctgccaatccaatgccttgcttgcattattttcggcttcgtcatccgtaacgttgctgccgcttatcacgcctggatcagacgatccccagcaatatcttctttccggcagacccaccggaacgcggctgcgcagcgccaccgttgcctggcgccgtcgacaatgtcgaagtaggtgcggtcgccgtgttgaaacttgggggcagcggcatcgaacccgctggcacctgctggggagcagccggtaccagcgttgggccatccatcgactgaggacttgggcttggcgcagactgtgccatcggcgcaccgcattccgtgcagaatcggcttccctccggcatctccgttccgcaaacctggcacttcatactctctccgttctctctcatccctatcggccaatcccccgtccgtttgcagtacataaagaagcggcaaacggcccgaaacatacctgagccatcaggaagacggcacgatctgctacgagaaagagatcatcaccgaccggcaaatcgtcggcatcatgctgaagcatccgaccagcgcacgcggcttcaagcgctacttgcgcgccgcatcatgacgcttgaccacgatggtgacgccacccgcagcgaacagcgtcgccagaaccacaaccaacgcaaccgaggcaccggtatcggccgtacgttcggtctgctgtggcttggtgctgccattggcattgacgctaccgctatggttgccgttatccttgtcgtccgtcccggtggacactccggtaacggcaacgggcagagcgaccgtggtcttattggtcgcaccggtcactgtcaggcttatatcaccggtcttggttccggcgggaatcgtgaccttgagctcggcggtatcgccattcgcaacctgtgcttcgccgaccatctgctcgccgatggtggcggtcagcttcgtctcgtcaggcacgcccagcgaggtgagcgtgagcttcgagaagtgcagggtgaacgagccaccggccttgaccgcaccggtcgggataccggtgacggccactgcacggcggtcgtagcgcggggcaaccggattgttgtccttgagatagtcgatccaagcatcgcggtccaccagaccggtgtccttggtgttcgtgccttgggcgaaggcgcggaagttatcgccgccctccaacaggaagctgaacgaaccgatacggtagttgcgtttcaggtccagaggctcaccgttgacggtcaccgaggtgatgtgatggccttgcgcggcatccggatcatacgtgtagctcacgttgtgggacagtccgagttgcagatacgcgcgcgatggcgtgctgccgtccgcgttcgtccgccactgctgttccagcgcttccttgaactgcgcgccggtaagcgtggtggtccacaggttgttcaggaacggcagtacagcgttggcctgggcgtaggtgatattgccgtcggcatcgagcgtgcaggcgtcattggtgccggacttgcagaattcggcacgcagaccgccggggttgaccacaccgatttcggccgcgccgcggtcctcgcctttgagcgaatcgagcagcgcatcggccaccagattgcccatggtcgattcggaggcgcggtcgtcacgcttgccgtccttgaatgcggtggtgatatccgcagacaccttgccgaccttctcgccgcccttttcatcggccaccttaagggcctggtacacgatgtccttcaccttggcgacagtcggattcgcggcggcgagcaggccatcgttgtattcggcgtaatcgttgtagtgcggatcatttttgtcggcgggctgcgaagccacctgcacggccgtgttgccggacttgtcgtaagacaccgcaccggtggccgtgttgtaggtgagcaccacttggccgatgttggcggcatagctaccggtctggatgatcggccggttgttgtgcgcgggatcggtgtacgagtacttcatgtgggtgtgtgcagtgaagatcacgttcactgccgcatcggtatcgtccacaatcttctggaatacggggctggcggccttctgctcgtcaagcgtgggcttggccgtggcgtcatcttcattggaggctgcaccctcatggtattcggccacaatcacgtcagcctcgccattggattcgtcgccgtcggtgagttgcttggccacacggttcacggcttccaccggatcgccgaattcgatgtccttgacaccaccgggagcaaccaacgtgccggtttcctgagtgaccgcaccgatgatgccgaccttcacgccgttcacctcctgaatgctgtactcgggcagagccggggttgtggtgcccttcttgtacacgttggcaccgaggtaatcccattgggcgttgcgcgcgccctccttgccgatcacacgatcggcaaggtcggcatagccttgatcgaactcgtggttgcccaccgccgaagccttgacgcccaaagcgttaagcacatcgatggtcggctggtcctgctgcacagaagagttgaacagcgaagcaccgatactatcgccggcggacagcagcagtgatgagtcagggtattcgcccttgagctgctcgatggtggcggcgaacggcacggtgaggttcttgtcgatacggccgtggaaatcgttgaagttcagcagattgatggtggtgctggcgggaactggctgattggttgccatatagcccatacgcaatgaatggccattggtcacgccgtcgtctgcccagaacaccggcttgtacaccttgccatttaccaccttggtggcttcggtatcaggggtgatggcaaaaccttcggtgttctgcgtacggatttcatccggagcgtcggtcagcttggtcagctgcagcacaccgttcttgaactcgtaggtaccgattttggcaccggtgttcgcatcattgtcgctttgggcgagcagctggttgtgctcggcgtcccaagtcagatcgcgcggaccatcatagccggcgttcactgcggactgcggcaggtcgatgtcggccaccggatgcaccaggtcctcatcattcacggtttgcagtgcgaaggcgtagatatggccggttttctccagtgcggcgaagaacagaccgccgaaatcattgccgaaaccgtccgggtcgtaggtcattacgttcttcgggtcaaggttggactggaatccgttggcggtcaggaccgagtcgggaataaaggctatgccttccaccccaagattggcgtccgctccgtggcccagcgtcacgccgaactgtgtgagtgctgtgatgagattccactcgtgcgtagcggtcagctcttgcgctccgtcgccgttggcgtcggcggttttctcggtcacgtcatactgcaggatggaaggccgcggcacattcttgttttcgttgtcgcgctcggcgccgatgaatatgcccttggatgaatctccgttgatcagcgtgatgccttcggagtccacaccgcccttgccgtccttgaagtgcagctgcttgccgcccttggtctgaccgttgttggtgaaggtccagccatcagtgggatcctgctgccatgtgccgttctggtagacgaacttgttgatggagccagggcccttatcagcggtgttgccgagcgtggggttcagatcgttgtcggccgcccacagcacgccttgcttgccgtctttaccggcttcatacaccaaaccagacagattgccgtcagtgtggtcgccgccttgtcctttggcgccaaattcgccttcggcatccactgtggtcacatcggccaatcccgaccatgcgtccacggtcatggtctcgccggcgggcggagtcggagtcgggtcatcgaacacgttctgtgcaccgggcgtgggcgtatcggaaagcgcgaaagtgccatcgtccttacgggaccacgactgactgtcgctcatcttcttcacgccggttgtatcggtattccatgacgtggaatccaccacatcgctatcggtaaagtcgccgctggtagtggtcagataggcttcgtcggcatcggaacccaggccgggctcggccttgtcggggtcgatgtatgccaccagatatccgccggctttgatgacggtgtccgtattcgttacttcgctggtgccgatggtgtagtgcttcttggctttcttgccgctgtcgtagatgccccagcccttcacgtcaacgtctgtggagccggtgttcttgagctcgacccaatcgcaacgcttgctatccgggtctccggcagctttcgtattgccggcatagacctcgttgatgattacggatggtttggcagccgtgttctgttcggcagtggcctgctgctcgtccgcagccgcagcgggcacgccgatcagggcgatgctgctcagtgtcaccgcagcggtgagcagcgcgatggcgcgccgcgacatcgcggtgaaattgttggtgtggaacattactcccgttccttcctcgggttgtgccgccgcagcatgatgctcttcggcggatgacaccccgagagtatgagagagaaatgaagccgacaccgtatgaaggcaaactcggcagatctccaaactgaactttggctgaattactgctgaagctggttcttggatttgcgtcgaaccgtccgtattccgccgacaatcgcgattacagcggtaccgatggctacgctgatcaacgccggtcgttgcgcggcatggagggtggcgagatccggtccggccgcaatggcactgttttcacccgccgagctatccgacgccgggtgattgcccgcgtcggtgtactgggcattgaccacactcgggccggtaagcgccacttggtcggcggtctcgaccttggccacatcgccgtgcttatccaaggtgacgcgggcgcacagggctttggcccagttgatacgctgccagccgtcgctcgattgccatagggggtatccggaatccaaggcagtggctttcaaaatcgcgttgcgctgatcggcgtgcagttcgggataggccagtcgcagcacgtccgccgccccgcgcggtgccacgaaatcagcgccggactgggcggtgtcttgcgggaaggtgtaggtcaggcgtgcggtgtagacgcgcacggccgaggcctggtccgcgaccggctcggtggccaccgggtccagaaaatcgttggtgtagccgcccgaaccggaggccttggtgttggcgatgcaggcggcgagggtagtgccgtggccgtccgcggcgcagcgggacaccagatagtcccgcagctgccgggacgcgggcacgatggacgaagcgaattcgttatgccagtactgcccgttctgggcggatgcgccaatgcgcccgcccatgatgtcaagcggataatgcacgccgagcacgatgcggttgttgccggcctccgaagtgcgggccatgatttgcggcgcgagttcgggaatcatgccggccagcgcgataccccacgaataggcgccggtagtgtggccggaggggtaggaactgtttttctgcaagttcgagtagccgggcacgtgttcgagccatgagggtgattgcttgatgtcaagcgtggcgggcagtccggcgagatcgttagtgccgccgtagctgctttccgcacggttcagataggggcgcggatgcatggccgcacgttttgaggcgtaggtggaggccacgttaaaggagaagatatcggcgacggcgttgagtttcccggatttgagcccttcgctcatatatttgccaagcaccggaccgagcgcgtccggcatggcttcctcggcttgcagatcggagtcgacgagcgcacgcttgcgttgggcgttcaggccatccttatcgagattttcggcggctttgtggttaatggccacggccaaatcttcgtcgagtttcatggtatcggcgtcgagcaccttgccaccgtgttcggcatcggtgggggcctgccaatagttcttttcgtagtcggagagcaatgccacccaatccgggttgggcagctggtcggcctgtgcgattgcgggcgtcgcggctagcgtggccgccaacgccagcggcgcaatggtcgcaatagcaaaaacggaggataggtgccggaacatcttcatatgttccaacctatcctccgtgaaggctacgtagccggagcccagtcaaacactcagtaaattcttcgtgccggcttagcggcgattgagctgaccgtcaggcctctggcttgtcctcaggcttttgagactcttggaattcgccggtttccgggtcaacctgtgactcgggctgggtggcgtcatatccctgttcgtagcgggtgcgccgccagttgcgaatcgaggcgttggtgccacggtgatgcacatggtatttgcgcggcgcaccaccaaacggcagctcctcgagctccttggccaccgcgatctgattgacattggacgggtctccggcggcgatcggcgccacgggctcggcctcggtgggcgcggccgtgcgctgctgcatgcgcgaaggcagccattcggcgagcctcgacagcagccagcaggcgacgaagtagatcaccgcggccatgaccagcgtctgcaggatgttgaagtacatcgagccgagtcggcgcgattcctgcagcaggtcggtatacatgatgatcgagcctagggcggtgtccttcaacaccacgaccagctgggtgacggcggccggcagcatggcgtagacggcctgcggcacctcgatctccatcagcgactgcgtttcggtcaggcccaaagcgagcgaggcctcacgctggccgcccggcagattgccgacgccggagcgcacgagttcggcgaccaccgaaccgttgtacagcaccaaggccagcaccacggcccaataggacgggctgggcaggcccgcgaacgcgaaccatcgccagaagaagatcatgagcagcagcacgggaaccgcacggcagaactcgacgatcacggcggagacgccacgtaccaacgggttcggcagcagtcggcccacgccgaacaccaagccgaacaccacggcacccaccacggccacgatggtggccttgatggtcatccacagtccgggcaggtagaagtcggtccacgcctctcgttcgacggcgggcttccacagctcccagctgagctggttctcgccgtccggcgggttgtgcaggcgcatgaggataaacacgagcaccaccgcgaacagaatgcccgcgatccagttgacgatgcgaatggtgcgccggcccttgggacctggcgcgtcgaacagcacggaattcgaagtatcggccatatccgtcacctccttacggcgagtttgttggacaggtacgtggtgagcatgccgatggggatgatcaggatcacgtagccgagcgcgaagatcaggaagatttggatgatcacgtcgggacggaattcgatcatctcgctcatcagcgaggatgtttcggtggccacggatgcggcggcggccacggtggagttcttgagcagggcgatcagcgtgttgccgagcggtgccacggagcctcggaaggcctgcggcagaataatctcggtggcggactgcatgaagcccaagcccagcgctcgtgcggcctcggcctggccaatcggcacggtgttgatgcccgaacgcagagattcgcacacgaacgccgccgtgtacaggctcaggccggtgaccgcgagccagaagaagttcgtggtgaaggtgtcggagaagctgagcttcagctgcgcgtaggcacccagcaccatgaacaccatgatgatggtcagcggcaggttcttgaacagttccacatacgcaccggccacggccctgagcgaggaaatcggcgagatgcgcatcaccacaaggatcacgccgaggatcagggagaacagggcggaccatagggtcagttcgatattgaccagaaacgcgccgagcacgtcatactggctgaagagttccaggaatccgttcatcagttcttctccccctcgtctggagtgggcgggttgtagcgtacgtcgggcgtgtagttggtgcccttggtgttatcgctgatggcgttctcccacgagccgtcctgaatcatgtccacgatggcgttgttgattttggtggccagctgcgtgtcgcccttcttgatgcccacgccgtagtgttcctgcgtgaacggtttgccgaccaccttgagcttgccgcgcgaggcggaggccaggccggccaggatgatgtcgtcggtggttaccgcgtccacgatgccggagaacagggcagtggcgcattcggcgtaaccgggctgttccataagctggacttcggaggcgaacttctccttgacggtggcggcggaggtcgaaccggtgacggagcataggcgcttgccgttcaggtcttcggggccgttgatggagttgtcgtccttgcgcacgagcagatcctgtccggccacgaagtacgggccggcgaaggagacggccttcttgcgctcgtcggtgatggagtaggtggcgaggatcatgtccacgtcgccgttctgaatcatggcctcacgctgcttggagggagcttccttccagatgatctggtcttcggaatagccgagtttcttggcgatgtacttggccacgtccacgtcgaagcccacgtaggtgccggacttcttgaagcccaggccgggctggtcgaatttgatgccgatgcggatcttgccggtttcgtccgcgccgcaggcggccagcgacattgtgcaggccacggcggcgagcgcggcgatcacgcggcaaaccttccgtttgaacgtattggtgaatgtcattggattgcgtacccgtctttcagtgggttcgtcagtgggtgaggatcttcgagaggaagtccttggcacggtcggtctgcggatgctcgaagaactcgtcgggcgtgttctcttcgagaatctggccgtccgccatgaagacgatgcggtcggcggccttgcgcgcgaagcccatctcgtgggtcacgcagatcatcgtcatgccttcatgcgcgagttcgaccatcacgtcgagcacttcgttgaccatttccgggtcgagtgcggaggtgggctcgtcgaacagcatgaccttggggcgcatggcgagcgcgcgggcgatggccacacgctgctgctggccgccggagagctgggagggcatcttgctggcttgggagtcgacgcccacgcgggcgagcaggtccatggccagttgctcggcttccttcttgtccatgtgacgcaccttgatgagggccaacgtcacgttttcaagaatggttttgttggcgaacaggttgaacgactggaacaccatgccaacttcggccctgaggttcgcgagctccttgccttcctgtggcaggggcttgccgtcgatgcggatgtcgccggaatcgatggtctcgaggcgattgatggtgcggcacatcgtggacttgcctgagccggacgggcccacgaccaccagcacctcacccttggcgacggtcaggttgatgtccttgaggacgtgcaaagcaccgaagtgcttttcgacgtgggtcagttcgactagcggacggttcgggtcctctttgccgggaaccagcggggtcaatttggccttgcttggtgatgttgtgcttgtcgtgcgcgaacgcactgctgtttcattgttcgtttcagacatgagtgggaggataacacaccgacgtttccaacgtgttcacagtatgtccacacagttgctcagtcgatgtctcatttccgcatcagacatcgtgaaggcggcattgggcatcggcatacattctcgctgagtcgcgcatcgctcggcgtctgctgtgcgctgattgcctgctgcgtggcggctgagacgttgctgcgacggcaaagcgggcacgtgttgtcctatctgctgattccatgtttggccttggtgtcgttggcgttgctgccgtgtatgccgcagtcgggcgcatggctggcggtcactttgtattgtgtggggctggtctcgccgtttcccatgtcgtattcgtataaatgtgctaggcattttgagcgtggctagctgttcgcacacgatgagtgctgttatacggtggacgacactcccgaagcgcggtggataaccgggcgcggcacacgatatgccggtggataaccggttcgcgccgcttaagttatccccatttttcggttttgcccctgtgccaccgtggaatgcgctacgctcggcgcatgaacggatacaacgaagcgccgcacaatggcgaaatcaacaactatctgcgcaaagatcttgacgccaaagccacggccaagaacacggcctgttggaatctgctgggcaaagtgcgcacgaaacgcacgttgtgtttctcgctgtataccgcattggaattatgcggcgtggagttgccgaggcacagcacgttgccgcagaaggatttttatgtgacggtgaggagcaaggggacccgctcttcattggacaatgtcgactatcgcatatggaatgcaaagttcagcagtatcgctttttcaaacggcgtaacctgcatgcatcccatggatgcgtggatacagtttgcccaatatctcaacctcactgaattagtggtgctggctgaagcgctcatcagacgttatggatatgccattgaacaattcactcaacgactaacggcctttcaccgcgttattggtcgtgcgcgttgtgaggcagcgctgaagctcgtaaaaccatcggattccgttcaggaaactcgtacacgcttggcgcttatgcttttcggcctgcccctaccgcaaacacaatatggcattaccgattcagagaacggatacacctacaccgttgacatggcttatccacaatacaaagtcgctattgaatatgatggcgatcatcaccgtcgcttccgcaaacaatatgtgcgggaccagcaaaaacgtcgacgtctgcggcaattgggctggaccgtcatcgaggtgttcgccgatgacctgtggaataccgccaaacaacgtgccttcgcacaagaggttgccaccgcgatgcaaataccgcttcctggccgtcctcaaccttcatgccgggtattaatagacggcagccttaccatcaatgcacgcaaaggggaatacaggaggcggaaacaagcaaaacacaacaaagcctcacaacattaatcaaatacggagttgcgatcgctcctcatggggcggtaattcccccatggggcggcaattcccccatggggcggcaatttgctcatggggcggtttgaagaaattgtgaaaccgcggaattaagccattttgacctaccgccccatggggttttcaccgccccatgggttgtttaccgccccatgaggaagttaccgccccatggggggataatcggcaaacgccaagggggacaccgcatggtgcgaggtttgccgcatggcggaggtgccatcgggcggagtatttggcaccccttggcaggtatttggcacattgggccccacccgcaaaaagcaaatggcccttggaattattccaagggccatttgcggctaatagcaccggagcattactcctcgaaaattaatctacgcatgcggagaccgctgttcgaagccaaaggcgcactaaggtgcgtcgagtgctgaggaaaggcggtatacgctccgtagattagttttcgtcggcgtccgggtcgtagtcgacgccggtctcggcgcgctgctcgtcggaaatcggggccggagcaccggtcagcgggtcgcggccgccgccggccttcgggaaggcgatgacgtcgcggatggagtcggcaccggccaggatggacacggtgcggtcccaaccgagggccaaacccgcgtgaggcggagcgccgtacttgaatgcctcaagcaggaagccgaacttctcgtcggcctcttccttggtgatgcccagcacatcgagcacacgggcttggatgtcgtcgcggtggatacgtacggaaccgccgcccatctcctcaccgttgcagacaatgtcgtaggaatcggacatggcgtgctcgggatccttgtcgaacttgtcgatccaatccttggagggcatggtgaacgggtggtgcatggaggtccacttggagtggccgacagccacatcgtcatcatccggatcgtcggtgggcttgaacagcgggaagtccacgacccaagtgaaagcgaacttcttcggatccagcaggccttcgcgggaggcgagctccacacgcacggcacccagcagcagctgggcggactcgcgagaaccggcggcgaagaagacggcgtcgccttcctcggcaccgacggcctcgcgcaggccgttgcgctcctcatcggacaggttcttggcgacggggcccttgagctcgccgttttcgccgaagaccacgtaggcaaggcccttggctccacgctgacgagcccaatcctgccaagcgtcgaactgacgacgcggcgtggcggcaccgcccttgaagaccacggcacccacgtacggggcctggaacacgcggaacggcgtgttcttgaagtactcggtcagttccaccagcgggttgccgaagcgcaggtccggcttgtcggagccgtacttgtccatcgcatccttccaggtgatgcgcggtagcggcagctggacctcatagccggcggacttccagatggcggcgatgaccttctcagtcatggccatcacatcttcctggtccacgtaggccatctccatatcgagctgagtgaactcgggctgacggtcggcgcggaagtcctcgtcacggtagcagcgggcgagctggtagtaacgctcgacaccggagaccatgagcagctgcttgaggagctgcggggactgcggcagggcgtaccaggaaccgggcaccagacgggccggcaccacgaagtcgcgggcgccttccggggtggacttaatgaaggtcggggtctcgacctcggtgaagtccatgtcttccagcgcgtggcgggcggccttagccatgtcggaacgcagcttcagattgtgctgcatggacggacggcgtaggtcgaggtaacggtacttcagacgcacgtcctcgcccggcagcttgttctcggactcattctcgagagcggtggaaacctggaacggcagggcgtcggacttggcgaggatctcaatggtctcggccacaacctcgatcttgccggtggccagatgggtgttctcgttgccatccgggcgcaggcgcacttcgccggtaatctgaatcacgaattcactgcgcagcgggcgggccatatcctcgtcgtaaatgacgacctgcacgaggccggtcgaatcacgaaggtcgatgaaggccacgccaccgtgatcacggcgtcggtcaacccaaccggcgagggtgaccttctggccgaccagggcctcggtcacttcagtggcatgatgtgttctgtaagccgtctggctcattatcttgtttctcctcgatttttcgcgcgaatacgtcagatttcgacggtttgctgggcaaccacagtatccggctcccacgacgtgcaatcggcggcaacctgctcgcccgtgacgatgttcttgacctcgtcgccagcgggctctgcgccttccgcaccttcggcagcggtggccgggaaccacacgtacggaatgccgagtttgtccgcgtacttgatctgcttgccgagcttggccgcggtgggtgccacgtcggtggcgatgccgcgcgcacgcagttggttcgcaatacggttggcggccgggcggtcctcttcattccacacagcgaccagcacggcggccgggctgacgcggttggcgtgcgcgccggcagcgtgcagcatgtagctgaccagtcggctcaggccgatggacaggcccacgcccgggtacttgcggttgccctgggaggcgagattgtcgtaacggccaccggaacagatggaaccgagtgatgcggcaccgtcgaggaaggtctcgtagacggaaccggtgtagtagtcgagaccgcgggcgatcttcaggtcggcgatgacggaaccggggcggatggcggcggcctcgtcgacgatcatggccagggtatcaagtccctgacgagccagcgtgtatgcctcggaatccttggcgatgccgtgagactcgcacagcgcatcgaacttggcggcaagctcggcaccgtcggaggcggtgagctcggccaattcgaggcaggcgcgtgcctgtgcttcggtggcaccacaggtctcggtgagcagtcgggccacctcatcggcaccgattttgtcgagcttgtcgatctcgcgcagcacgccctcgacgtccgtcaggccaaggccgcggtagaagccttcagacagcttgcggttattggcgtgcacggtggccttggggaggccatacgcgcgcagctcttccagcgcggagaccatgaccagtggcagttccacttcatagtggtcgggcaggtcgccggcgccgatcacgtcgatgtcggcctgcacgaactcgcggaagcggccttcctgcggacgctcgccacgccacaccttctgaatctgccagcgcttgaacgggaacgccaacacacccgagtgctcgaccacataccggctcagcggcacggtcagatcgaaatgcaggcccaaccgctcttcaatcggagtgtcggattcatgaccgacctcctgcaaacggctcagcaggtagatctccttgctggtctcgccttttttcaacaaagaagcgccggtttccaccgctcgcgtctcaatgccgatgaagccgttgagctcaaaaaccttacgaagcgtatcgataacacgctgctccacaacacgttcggaggggagccactccgggaatcctgatattgatgcacctttagccacgaaatcaatataataggtgagggttgcgtcaaaacttcctggttcgcccgggatgggagacgctcccgcttatgcattctacgctttaaggagctggccatggccgacgaaactgtcaccgaacccgtaaacaccgctgcgcccgaagagcaggcaacgacacccgcacccgaagccagcgcggcca

SEQ ID NO: 222 - DNA, 11642 bp, Unknown
  R101_18m  MAG No. k141_30456
catcggcgcactcaccgtgccggtatatgagaccaactccgccagccaggtcagctggattttcaacgattccaaggtcacgctcgccatcgccgaggatgacggtcagcgcgacaagattgaatccgtgcgcagcgaggtgcccaccctgcgcaacgtgttcgtcatcgaagcaggcggcctgaacgccatcaagacctatggcgaaagcgtcaccgatgccgaattctgggaatacaagaacgcctcccacggcgacgaccgcgccaccatcgtttacacgtccggctccaccggcaccccgaaaggcgtggagctcacccaccgcaacttcgcgttcctggtgcgctccgccctgcagtacatgcctcgtgccggcgcatggcccaaccgccgtctgctgctgttcctgcccctgagccatgtgttcgcccgattcctggaattcttcagttttggcggcacgatttcgctggccttgagctccaatatgaagacgatggtcaaggacttcgagaccttcggccccacgctgctgcttgccgtgccgcgtgtgtacgagaaggtctacaatgccgcctcccagcgtgccggcagcggttttgcgggcaagatgttcatgcgcgccgccgagaacgcgcgcgaatggtccaaggccgagcagaagggtgagcagctgccgattaccggacgcatcgcccacgccttctacgagcaggtggtgtacaagaagattcgcacgattttcggtccgaacgccgacttcgccatcaccggcggcgctccgatggactccgagctttcccacttcttcaacggcatcggcatgccggtgcttgagggctacggcatgacggaaacctgcggcccggtgtgtgtgagcttgccagaggacaaccgcatcggcaccatcggcatgccgatgtgcggcatcaccgccggcatcgctgaggacggcgagctggtggtcaagggaccgctggtgtgcaaaggctaccacaacaaccccggagtcaccacccagcagatcaccgatggctggctgcacaccggtgatttgggcgatatctccgaagacggattcatttccatcactggccgtaagaaggacctcatcatcaccgccggcggcaagaacgtgtcgccgggtctgcttgaggcttccgtgatgacctcgcccgtggtcaaccagtgcttggttattggcgataagaagccgttcgtggccgctctggtcacgctggatctggcggatgccaacaactggttggaatcccagggcgccaaaccggaacccgatctggcctcgctggccaagaacgccatcattcatgccgaggtagagcgtgcggtgaacgccgccaacgagggcgtttcccgcgccgagtcgattcgtaagttcgagattctgccagacgaattcaccgaggccaacggcatgctgaccccgagcctgaagacccgtcgcgcgcaaatcgttgagcactatcgcgagctcattgacgacgtgatctacgtgccgttgaagaagtagctatcaactccctctgatccaaaaaataagctctctctgacgagggagctgtcagccgcaggctgactgggagagaccgcggctagcccgcgaaacaacaaggccgggtgcgacttgcacccggcctcagcttattcagtccaaaatcgccgaaacataatcggcggcggcctgatccagctccgcatcgccgatggtggcggtgccctgcaccaggaacggctcagcatagttcatgccgatcttgtacgccacgacctcaaacgggctcagcagctcctccatggtgtggctgtactcgccatccttgcggtacttggcggcgtcggaaccagtggtgaccaccagcttgagctccttgcccttgagtgcgtggcctccaccgtaggcccagcctgcggtgatgacctcgtcttcccattccttgagcagcgcgggggaggagtaccagtagaacgggaactggaggattacgcggtcggcggcctccagtagctcgtgctccttgtcggcgttgacggagaagttcggatattcggcgtattcgtcgcgtacgatgatgtcgtcctcgccttgtgcggcgagttcggcaagcagacgggcgttcactcgcgagccgtccttcaggtgcggatggaatacaagaatcagcgttgacatgggatttcccttctataactgctaccaatgtggcctaatcaccactatcgtatgccgggaagcagaactcagtccagtccggattcaggtgcgagccgcgggatgctgcggatgagtaattgatgcgggaaaggatgctgactgatgatttggcgctgaagcttcagtgggccgcatatacgagtcctaaagcggataggatgggatatgacgcggatatcgtcggtggactgaataacgggaggcgcacatgaccatgaaccgcatgctgatgtgccgtacccatccggtaatggagttcgagtatttcgaacgcggcggatacgccctgagggcaggggagatctacgacgagtcccgaatcccgatcggcatgtatgtggacggcaaacctgagcccaccggtgagtcgattaccgggtggtggcgttctcgcggcattcccatgacccgtgacggcatgcgttccgtatttgccggttcgggtatcacctcgacgaacgatctgctggaccgttccttgggactcagcctgtcggaccagtattgggtgcggcctctcgaccggcccgatctgacgtgggaaaaactgaactttttccacaacgattttgacgaacgacttgggcaggccttattcttcggtaattcgtcgcgcatcggcaacgtgaacaccccggatgtcaccagtgccggtgacctgccgaaacgttggattatcggtcccgatggcgtccgcagcctgatcaagggagggcgcaccggtcaggagccggacaacgagcgcatcgcctggcagacggcacgactgttcggcatcgaccatgtcgaataccgcatcggccgcgccaagggcatccgggtctccgtctgcgatgaaatgctcgaagacacgcaagagctgattcccgcagggcaggttatgcgcatcttccgacgcggcgacaacaccgaacgcaagatgatatggctggacgcatgtcagcaactcggcgtaagccgtgatacggcaaatgcggcgaccaacgattttctgttcctggattttcttctgcgcaacaccgaccggcattacaacaacttcggtctcatccgtgacgtcgaatcattcgagattcgcccggccccgatttttgacagcggcgccagcctgtggaacggcatggaccccgaagccatcaccaacgaagactacccggcgaagccgttctggctcgacgactacggcgatgcggacaacgcctactggcagttgggacttatcgacgattgggaccgttatgatttggggatgctcgacgaggtgcctgaactgatacgggcacagctcgccaccaaccgccggctgtccgctgacgtgattgacgccatctgctccgccatgcaggagcgcatcggcatcatccgcaagcttgcacgatgatgccgcgtcgggaggcaactcagtcgaggttggactgcgtgcctgcggtggcttcgttggcggcttgctcggcttgtgcctggtcgagcttggctcgtacgtcgttgagcaggccctgggcgcgcttggccaaggcctcgccgatttcccattgacgcatcgactggtcaagattgaggccgccggtttccagtgcctggacagcctgaatcagcttgtcgcgcgcctcctcatatggcatctgggcgatgagctcgcgttccttgtccgtcagggacgaagcgggggtgttcttgtcggtgggtgtggtgttctcggtcatcttgttctccttatatatacggtatatatgcgtgaatgcatatggtgcattacgcggttgcggttgcggatgtggcggtggcggtaatgacgccctttttcagggtgacggtgatgtcatccccggtactgacccgcgaagcgtcatccagcacatggccatcggaggactgcaccaccgcatagcctcggttcagcgtggattgcgggctgagtgcggtcagtgaggcgtgagctcgctcgacggtgagctgggcatcgtccacgatacgccgcaggccgatgtcaagccgctgcagggaatcgtcgattagccgctgatgcggttcgagcatggtatgcggttgggtcaggcttggccggttcgcatatccctcgataagtcgaatctcgttctccacgcgcgaacggacccgcagtcgcatacggtcgatggcaccttcgatgagctgcgactgctcacgcacatccggcaccacgcgcttggccgcatcggtgggggtggaggctctaagatcggcgaccagatccagcaacgtccagtcatcctcatgcccgatggaggagattaatggtgtggtgcagacatacgccgcacgaaccacacgctcatccgagaaaccgatgagatcctcaaacgagccgccgccacgggccacgatgatcacatccacgctcgggtcggcatcgagttgtgcaatggcctgaaccacttcggccgggcattgctcgccctgaacatgcacatggaccaccttgaaggttacggaaggccaacgaaggttcacattggtgatcacatcgccttccgcacgtgcctgaggtgcgcaaatcaggccaatagtcttcggaaactccgggagaggcagtttgtgatcggcatcgaacaggccctcgcccttaagctgcttgcgcaattcgtcgatcatggccttgaggctgccaccggctccgaccttgagaatcgtgtccccgcgcaacgacagcgaagtgcgcttcatccacaggttcggtttgccatgaatcaccacgcggtcgccctgaacgaactggctggccgcggccgcgaacctgccgaagccattgacttccatggcgatatcctcgaagtcgtcgcgcagcgtgatgtaggccgagccggcgcgacgggtattgatctgcgtgatctggccggtgacccacgcggacggccatcgttccacggcaccgtagaacttctggctcagcacacttaccggccacggattttgcgcgctggtttcagcggcgcgtgcaggcagctgatcgatagggcgaggctcattcggcagattgatggtgccctgatcaggcgcgaaagtgccttgacccggctcaaagccagccgaggccagtgaagcggcggtcggtggacggccggtagatgggtagcccattgcagtagtcatgcattccactataagtgcgttggttgatggcggtaaaaatttaccgtcgcctgaaaacggtgtgatgatgaatgcgagaaccgtacgaagcgatgtatcagacgatgatggagatggtctggtgcatcagaagaaaggagtcattatggcgaagaaacgggtgctatgaagaggagtgagatatgcgttgcgctgacgattgagagtcgtcagtgagctcgctgtgcgacacgcaagcagaaaaacagttacgctaatcacacacttgtggttttggcggaaaatagccgaaaaccctataaatagttcgacacaccgctgttgagcactagatataggggtggggatgccgtattcttctagaggttcaagaaaacgacatcaatgtaatttcgtgtggcccacgtcgagtgtggccaaaatgcggaactcaggagagtgttcgccttataggaaaggggtgcccgatgggcgcacaggtgttggaggaaatcgtcaccgataacgagaccaaggtggccgccaaggcctccaccgtgctcgttgagaagcgtgatggtcgtgtggtcgacttcgaccccatcaacatcatctctgcggtcaagtctgctttcggtgacctgaacaaggaagtcggccccgaagaagatgccatgatccgtggtttcgccaaccaagtcgaaggcgaaatcaaggggcgttacgccggccccgccaagatcgaggacatccagaacctcgtagagcacgccctcattgacgcccacctgtacgatgtggctcgcgcctacaccaactaccgtctcgacaaggacattcagcgcgccaaggccactgatgtgaacgaggccgttgctcgcttcattaatcatgacccgaccctgattcacgagaacgcgaacaaggattccaacgtctactccacccagcgtgatttgctggctggtgccgtgtccaaggctgccgcgttcaacatgctgcctccagcggtgtccaacgcccacatgaagggcgatattcacttccacgatgccgactactcgccgttcactgcccagtccaactgctccttgccgaacttctgggacatgttggccaatggcttcactcttggcaacgctccgatggcttccccgaagtccatcgccattgcggccacccagattacccagatcatgaaggacgtggcctccagccagtatggtggccagaccgccaaccgtgccgacgagcatcttgcccagtatgccaagaaggattacgagaagttcctcgaggaagctcgtgagaccatccccgacggcatgccggttgaattcgcccgtcgtcaggtcgagagcgccaagaagaacgagcccgccaagctgcatttcggttcccgcgaaccgctgccgatggacaccccgttccacaccgacgttgacgaacttgagcaggagcgtgaaatcctcgccaagattcgtacccgcaaggccatctatgatgccatgcagaccatggaataccagatcaactccaaccgtgtgtccaacggccagaccccgttcgtgactgtcggctttggtctcggcaccgactggttctctcgtgaggtgcagcgcgcaatcctgctgaaccgtattcgcggcctcggcaaggaacaccacaccgccatcttcccgaagctcgtctttactgtgaagcacggcgtgaacgccgacccgggtgacccgaactacgatctgaagcagctcgccctcgagtccgccaccaagcgcatgtacccggatgtggtgttctacgagaacatcgtcaagatcacaggctccttcaaggctccgatgggttgccgctccttcctgcagggttggatcaacccggagaccggcaaggatgaagaagacggccgtatgaacctcggcgtggtcaccgtcaatgtgccgcgtatcgccatcgaatcccacggtgacaaggctcgcttctggaagctgttcaacgagcgtatggaagtcgcccaccaggccctccagttccgtatcatgcgctgcaaggaagccaccccggtcaacgccccgaccctgttccgcttcggtgcgttcggtcgtctcggtgccaacgacaacgtggaccagctgttcaagaacgagcgtgccaccgtgtcgctcggctacatcggccttgccgagaccaccgcggtcttctacggcaagaactggattcgcgaccacggctgggatccggaaggcaaggagttcgcgctgtccatcgtcaagcgcatgaacgagctgtgcaagcagtggagcaaagcggagggctaccactattccgtgtactccactccggctgaatccctgactgaccgcttcaaccgcatggaccgtgaaaagttcggccgtatcgaaggcgtgactgaccacgacttctacaccaactccttccactacccggtgtggttgcagcccaccccgatggagaagctcagctacgagaaggacttcccgtactacgcttccggcggcttcatcaactactgcgagtacccgtgcctgcaggacaacccgaaggcgctcgaagccgtgtgggattacgcctacaacatcggcatcggctacctgggcaccaacaccccgatcgaccactgcttcgtgtgcggcttccagggcgacttcgagccgaccgaggaaggcttcaagtgcccggagtgcggtaactccaacccggacaagtgcaacgtcaccaagcgcacctgcggctacctcggcagcccggtccagcgcccgatggtgcatggccgtcacgaggagattgcccaccgagtcaagcacatgagcggcgaaaccggtcgtgtgacgctggacgacggcaccactcgcgagtggttcgaagaggccaagtagggttattcgtgagtaggctcccctctctgaggggagctgtcagcaaagctgactgaggggagtccgaggagctattccgaagctcccctcagtcgcctacgacgacagctccccctcaaagaggggaactaatgctttccgcaaggagggaatcatgccggagttgcatacgaccaagcccgaacccaagcgccatgactttgcggccggcgagaccgggcgtggcccctccgtaccctccaacggtcttgccaacgatccgaaagccggtcaatgggatggccggcgcatgtccaagcggatgatcgccgactacaaaaccttcatcgtcaccgacggagaaggcgtgcgcaactccctttacgtctccgggtgccccttccactgcgtcgactgcttcaacgcctccatctgggatttccaagccggccacgaatacacgcaaaaacttgaagacaaaatcatcgaagatctgaaagccccatgggtgcaaggcattacgttccttggtggcgagccattcctcaacactcccgtgctggtgccgctcgcacaacgtatccgccaggaattcggtcataccaaagatatctggtcgtggaccggctacacatgggaagaactcatgcgccccggagaaaccccagacaagcttgaattgctacatctcatcgacattctcgtcgacggccgctacctcagagaccagaaggactcgctgctgcaattccgcggctccagaaaccagcgcatcctcgatgtgtccaagtccctagaagccggcgaaccggtcatctgggccaagctccacgatcaagaacgagatatccccgaaatctatttgagagaccgcgaagccggcgaaggccaacaggcctcgtagtagcaggtccggaatgccgcactcagcaatatcgtcggaactgttggggaacgcccttcccgtgagcgaaatcaccatgcccggcgtcacgttgggcaggtggtcggactaatattccagaagaagtagccgggcgaagccgtccgcaggtatctgccagccgtcccgaaacggctcatgatgcctgaaggcgcacatacccggaagtcggaattaagaggaacacatggttgacatcgtcactgacgcgagcgtaaagcccgcttcacacccgaagcccctgcgtgtgggattggacatcggttccaccaccgtcaaggccgtggtgcttgatcagtccgattccctgaaagacaccctcttctccgattaccgacgccaccacgccaacgtgcgtgccaccgtggccggcctgttggtcgacatccgtaaagagctcgtggaactaggtcgaggcgatgagccgattcgcctgtctatcaccggttccggcggtctggcgcttgctgacaatctgcatgtgcctttcattcaggaggtcatcgccgaaaccgaggcgatcgacaaggaatacccgcaggccgacgtcatcatcgagctcggcggcgaggacgccaagatcacctacctgaagcccacgcccgagcagcgtatgaatggttcgtgcgcaggcggcaccggcgcgttcatcgaccagatgtccacgctgcttgacaccgacgccgcaggcctcaacgagatggccaagagctacgagaacctgtatccgatcgcctcgcgttgcggcgtgttcgccaaaaccgatctgcagccgctgatcaacgacggcgcggccaagcctgatctcgccgcctccatcttcaccgcagtggccacgcagaccattgccggcctggctgctggccgcccgatccacggtaccgtcatcttcctcggtggcccgctgttcttcatgtccgaactgcgcgccgccttccagcgtgcccttgaaggcaaggtcgacgagttcatcgtgccgaccgacgcccacctgtatgtggcctacggttcggcattgcaggccgacatggattccgacgatcagggccaccatttcgaggcctacacctgcgacgaaatcctgaagcgtttggacgagctgaagaacctgccctccaacacgcccaccatgccgccgctgttccccaccgaggccgaccgcgaggacttcaacaagcgccaccacaaggaacacatccacatcggcaccctcgaaggcgcgcatggcccgcacttcctgggcatcgacgccggttccaccaccatcaaggccacgctcgtcaatgacgaccgtgaaatcgtctggtccagctacgccaacaacgaaggcagcccgctgaccgccgccatcaacatcgtcaagaagatccaatccgagctgcccgaaggcgcatggatcgcacgctcctgcgccaccggttacggcgaaggcctcatcaccaccggcctgcacctggacgagggcgtggtggagaccatggcccactatcgtggtgctgaaatggtcagccccggcgtcaccgccgtcatcgacatcggcggccaggatatgaaatatctggccatcactgacggcgtcatcgactcgatcgccgtcaacgaagcctgctcgtccggttgcggctcgttcctgcagaccttcgccatgtccatgggcctgacgattcaggaattcacccaaaaggctctggcttccacccatccggtggacctcggttcgcgctgcaccgtgttcatgaactcctcggtcaagcaggcgcagaaggaaggcgcctccatcgaggacatcgctgccggcctatgctactccgtggtgcgcaacgccctgtacaaggtcatcaagttgcgtgattccggcgaactcggcgacactgtggtggtccagggcggtacgttcctcaacgacgccgtgctgcgcgccttcgagctgctcaccgaacgtcaggtcacccgcccgaacatcgccggcctcatgggcgcgtttggtgccgccctgaccgcccgcatgcactatcaggatgaggccgaccacttggacgtggtggttaaggccgatgggtccgaggaacagtccaaggccgagcccgcacccaagtccgagcccaaggccgcagccttcaagaagaccgagccggccaagcccgaagtccatgtcgttgtcgtggacggtgtgacccacaccgccagctccatcctgaccggcgacgcactcgacaacatgagcatgaccaccgagcgtgacgtgtgcaagctgtgccagaaccactgcaagctcaccatcaccacgttctctgatggttcgcgcttcgtgaccggtaaccgttgcgaacgcggtggtgacgccaagaagaagcgttccgaccgtccgaacctgtacgactacaagtacaagcgttgcttcgcctaccgccgtttgaccgacaagaaggccactcgtggcgagatcggcattccgcgcgccctcaatatgtacgagaac

SEQ ID NO: 223 - DNA, 20831 bp, Unknown
  R101_18m  MAG No. k141_31159
gtgctgctgtccgccgaattctttattcccatgcgtcagcttggctcgttcttccacgtggcgatgaacggcatgacctccaccaagcgcatcttcgctctgctggacaccccggagcccgagcatggcacggcgaccctgccggccaacgattccgattccgctgacgacggtctgacggtccgcttcgaccacgtcggctattcctatgatgatgccgggcacggcgactccaagtccgcatccgcaaagaccgataagcaaggtgaaaccagccccaattccgccgtcgctcctgcgctcaccaacatcaccttcgccgcacggcccggtcagttcaccgccattgttggcatctccggttccggcaagtccacggccgcctcgctgctcgccggtacactggccggttaccgaggttcgctcacgctgaacggcgtcgaggtatccgatttgtcaggcgaaacactggccggagccgtcactgtgattggtgccagcagccatctgtttgcgggcgcattgcgcgagaatcttctgatggccttgcccgatgacgagattcctgattcgccggattccgtggactcccgtctgtggtccgcgctcgagcaggcgcgcattgccgacttcgtgcacgcacagccgaacggactgggcatgccgattgagtccgatgccgccaacctgtccggcggccaacgccagcgcatcgccatcgcccgcgcgctcctgcatgattcgccggtatttgtgttcgatgaggcgaccagcagcgttgacatggaatccgaagagctgatcctggatacaattcgcgaattggcgcaatcccgcggcaagacggttattatgatcacccatcgcatggccaacgccgaacacgctgatcaagtggtggtgctcgaacacggcaagtcggttgagaggggcacccataccgagctgatgacggcggacggcgtctatgccaagctgtttaccacgcaggcagatattgagaacttcggagaaggccatgctcggcgtgtgctgcaggttggttcccgcaagcaggagctgtccgacgacagtcggactgagggtggcgcagcgcgcgtaagcgcagaggcgggtatgacggttgaccgcctgcagtcagctttgccgacggcttccgttggcgggagtgagcaggcctcggctgagactccggctggtgttgcaaatagcgattcgtcttccaaaatgagcacattccaagtgatcaggcgactgcttaaggaagcccgacctctggcaggactgatggcagcggcctccaccgccggcaccatcggccatctttcggccactttcctgcccgtgttcggcattatcgcggcatttgcacttaccggtaatccggtgtggggcatgggtgttgcgcccgccgtcatcatgatgattatctgtgctcttctgcgtggcatcacccgatacattgaacaatatctgaaccacaatgtggcattccatctgctcgcactcttccgttccaaggcgttcgccgcgttgcgcagactggcgccggccaagctcgcgggcaaaggtaagggcaaccttatcgccatgctgaccaccgatgtggaactgcttgagatcttctttgcccacaccatcagtccggtggccatcgcggtaacctccaccatcatctacacgattgtggctgccaccctaagcccatggatggcgctggcgttgattgccgcccacctggttatcggcatccttgtgccgcgattctttgccaccggcgtacgtaaccttggccctgccatccgtggcgctgccggagaactcgacgatgtgatactcgatgacatgcgcggcctggacgaaatcatccgatttggccgcggcgaggaacgtgcgcaggccatcgaggaccgtacccatgcgttgtggaaggatcacgccaaactcagcaaggtcaacggccgtttcaccagaatcagcggactcttggtggctgtgctcacagcggcttcggtcgccgtggctattgcctgtgccggcgcgaacccgcagagcattccggctctgattgccgccttcgtgctgttcgccggctcgttcggaccgactttggcgctcgccgccttgcccgctaacctgactcagaccttcgcgtccgctagccgactgttcggactgatggacgaggtgcccgctgtgaccgagaacggcactgttgtgccgcaggagtatatgggcatgcgtcttgatgacgtcacctttgcatatgcgggggagcatgaagtcctgtccgacttctcgcttgacgtgccgcagcatggcgtgctgggtatccaggggccgtccggccgaggcaagtccaccatgctcaagctgctgctgcgctactgggatccgcagcgcggtcaggtgacgttgtccggcacgccgttgcccgaggtcgatgtgcatgctcgccgatgtattcaggccatgatgagccaggaaacccacctgtttgatggctctatccgagacaatctgctgattgctttgcctgagtccgaggttgaagctgcaaatgttgcaggcaatggggaagtgggtgccaagaccgttgattcccgacagcagcagttggcggcgcaatcggcagagggcgatgccgttcaggtggcagcagctgacggtctcgatgctcgtttgcgtcaggctctcgccaaggcctccgtgcttgatctcattgattccctgcccgatggccttgatactcaggtaggcgagttgggcgaccgtctatccgaaggtgaacgccagcgtatcggtttggctcgtgtgttcctgcgcaatgctgatctggtgcttttcgacgagccgaccagccgtttggatgctttgaacgaggctattattctacgttccattcacgctatggccgtgggtgagcagcatgcagacaaggagcgcggcgcggctgtggtgctggtctcccaccgcgaatccgccatgcgcattgctgatgcggtactcaatctgtaactgcctgtaactacgcgggaatcacatcgcattgcgttacgttaccgcgttgcattgcggttcctcgcgggtggcggcgatgccatctccggtcgtcattgcgttgctgcgtttgtgttgcgatatgtgatgcggcaacgcagcaatgcggcaatgcaatgtgatgtggcaacgtggcaacgtagcgatgcaataacgcggtaacatggcaacatggcaatgcagtaacgcaacgcagcattcacgccttgatcaaagcgccgatgacgctgtcgaacgcagtgagactgaggggagccaaagcccaaaaccggcaaacacagcaccggccatgagccgatacaataaaggatttgattaatatgactactcatagagcatttaggtggccgtccctgctgacggaatccggccgcggcatcgcgttcggcggtgactacaacccggaccagtggcccgaggagacgctggacgaggatatccgtctcatgggtgaggccggcgtgaacgtcgtatcgctggcaattttcagctgggacaagatcgagccggtcgagggcgcgttcacgttcgagtggctcgaccatgtgatcgacaggctcggcagagccggcatcgccgtggacttggcctccgccacagccgccgcgccgctgtggctgtacgaatcccatccagaggtgctgccggtagaccggtatggtcataccgtcaacgcgggctcacgccagtcgtggcagcccacaagcccggtgttcaaggaatacgcgctgcgcctgtgccgcaaacttgccgaacactacaaggacaacccgtatgtgaccgcctggcacatgggcaacgaatacggctggaacaaccgctacgactactccgacaacgccttggccgcgttccgcacgtggtgcgaggccaagtacggtaccatcgacgcgttgaacgaggcgtggggcacggccttctggtcgcagcacgtgaacagtttcgacgaggtgctgctgccacgtcacatgggcggcgacgccatggtcaacccgtcgcagcagttggattacgagcggttcggcaacgacatgctgctcgacttctacaaagccgaacgcgacgccatcgagcagatctgccccgacaagccgttcaccacgaacttcatggtctccaccgaccagtgcgtcatgaactacgccaaatgggcggatgaggtggacttcgtgtccaacgatcactacttccatgagggcgaatcccacctggacgaactcgcctgctcggacgcgctcatggactccctcgcgctgggcaagccgtggtacgtgatggagcactccacctcagccgtgcagtggaagccgctgaacacacgcaaacgggccggcgaactcatgcgcgactccctggcccacgtggccatgggcgccgacgccatctgctttttccaatggcggcaatccaagtcgggcgccgaggcgttccactccgccatgctgccccacgcgggcgccgattccaaggtcttccgcggcgtatgcgagctcggtaaggcgctgaagaccctctccgacgccgggctgcagggcactgagctcgagcgtgccggcacggcgatcctgttcagcgcggaatccgaatgggccacacgctccgaaaccctgcccagcatgaaactcaaccactggcacgacgtgcgcgactggtaccgcggcttcctggatgccgggctgcgcgcggacgtggtgccgctcgcctacgactggaccggctacaaaaccatcgtgctgcccaccgtgctcagcctgtccgacgaagacgttctccgtatcgccgacttcgcgaaggccggcggaaccgtcatcgtcggctatgccaccggcctgatcgacgagcacttccatatcggcctcggcggctaccccggcgccggcaacgggctcctacgcgacatgctcggcatccgcagcgaagaattcaacatcctcggtgaagaagccgaagacgagcccagcgaaatcagcctgtccaacggtctgacgacccgcctgtggcagaatgacgtgacttccgtagccgcggacgccacagtgctcgcctcttacacaggtgagtccgccgccgactgggagctggagcgcacccccgccatcaccagccgcccctatggcaacggtaccgccatctacgtgggctgcgacctcaaccgtcacgacattgcccagttgctcaaagcacttggctcccgctggcgggagttgtcggcgcagccgactgagagtggtcaaactccaacctatcccaccacagatccccgcatcctgcacaccatccgccgatccgcagacggctccacccgcttcgatttctacctcaaccgctcaaaccagcccgtcgccatcaacggtgtggaaggtgatcccatcatcgcccaccgttgcgagactgacgccgttggatatacgctgaaccgcaacgccattcttatcgctaaaacgtcctgctaaaccgcgctagaatggcaatgttgtccggatagaggagtgcggcatgagcgacgagaaaacagccaagcgtcgagtgacgctacgcgatgtcgctcaggccgccggtgtatcgctcaaaactgcgtcgaacgtgatcaatggctccgggcgtatgacagatgagacccgtgccaaggtcgagtcggtcattaaggacctcgactaccgagtcaacgtggccgcccgcaacctcaaccgcgatcacaccggcttcatcaccctcgccgtgccttcgctgattccgccatatctggccgagctcgccaaccgcaccatcgaggccgcccgtcagcgcgactattccgtatacgtcaccacgtatgcggaaggctccgcggaaggcgcgcgcgatctgctgaagaagttcaactccacggtgtccgatggcatgatcctttccatgagcgaggtggaaaacatttcgcccgatgatctgaaggttgattttccgctggtcatcgttggcgcgcgtaccacgtggggcattgtggatcacgtgaccccagacgatgtatccgcagccgccatggccgcaggctacctgtatgaccgcggttccaccagacttgcagtgatcggtgcccgtgacgtttacgacgaagatgcattgctgaatgccgtagaaggcaacgcgcagctgcgtctgcgcggcatcatcgaagagacccgtaggcgtgggctctccttggatccgcagctgattggcaacaccgatcaggattggaccatcggagccggtgcccgtgtgacccagcggctcattgattccggcgtgccattcgacggtgtgattgccttgaacgatcagttggccatcggcgcattgaccgctctgcgcaccgctggttatgaggtgcccgtgcaggtgcaggtcatcggcttcgataacaacgaggaagccccctacctgcagattccgctgaccaccatggattcccgccttgactggacggctcccacggcagtggatcgcatcctcggacgcatcgacggcagcatcgccaagtccgaactgctcaccaccgaatcccaggtcatcgcccgcgcctccacacgctgaacgacattgctgtaatgctggtgctgctgcacgaagtcgttgttatatagatgtcccatggggcggtgatttcctcatggggcggtgaatccctcatggggcggtagctgaaaatggctctattctgcggaaggtaaaattttaccgaccgccccatgggcaagttaccgccccatgggattttcgccgccccatggatgtacgggtaaaggcggccgaattgcctcgtgccgcccccgtggatatgcaagttaaagagcatcggcagcatgactgaatgcacatagagcgtcccccgcatggttgtgccacgttccatggcggggtcgccgtggtgactgtcgccagtacacgccatgccacgcgagcacgttgttgccggtgttccatggcggaaacgtcgtgggcatacaccttggatgatggcgacgacgattccaacacagtgcccagtaaagtaaccgccgataacctcaagaaatacgacatcagcccgcaaggccaggccgatgagattcgcgcggtcgccgaggccgtgaacaatatcggcgacaatgatggcgatggcgaaaacgacggcctgggtgtgttctactgggagctcgcatgggtgcccgtgggcaccggcggcaaggcgctcgcctctctgcagacgttcaagtacattcacaccggtgccgtcaccgatcatgtgttcaccaagatagatccagtggagattaccgcgactgactcggattccatcgacgcgatcaaagcgcaattgccgagtgaggtggccgtacactatcaggatggggtggacgagaccgaaaccgtgacctggcaatccgctgcgcttgactggattcgtggcgcaggcacatacaccatcaccggcaccaccaacgctggccacgacgtgaccgtcaccatcaccgtcaccgccactcccgccaaggattacgtaacggacggcagcttcgagaacgctgagaatgataagaactggaccattgccggcaccggtgcgtccatcaccgaagacagtggcaacgccgccgacggcaagcgcgcgctgaagttttgggcatccgatgcctacagtttctccgccacgcagaccattgccggcctcgcccaaaaggaggtctccagtctgaccgtcacgccaagcaaaaccacctatcaggtgggcgatgccatcgatgccgaccatgatctcaaggtcgtgggcaactattccgcaggcatgggcaacgtgacgctttccgccgaccagttcacgctcgattacgatttctccgctcccgctgatgcggcgaaggttaccgtaacgctcaagtcgaatccgaatgtcaccgaaacctatacggttgcggttaccgctcgggccgaaggtggttccggcaacggctcggacggtgcgggtaatggcggggctactatcaatcccgatacgggcgagggcgataagaccaacggtgcgaatggcgacaagatcactggtgtgctgagcaataccggtagcgcggtgactgccgtgggtcttgcggttgtcgttctcggcgtggccggcggggtctcgcttgctttgcgtcgtaagcgctcctgatagagactgatgcggcattatgatgcggttgccggcagccggcaaccggctgccagatgccatctgtcggctgtcgtttatcggttgtcggctgtcagatgcgtctgtctcggcgcagcgatgcgattctgtcccggttcgtgcatcaatcgtttgatgtgggtaccaggacagaaatcactgtcctggtttgcgaaaacgggtgtttttcgcgtaccgggacaattcccgttgccccggtttgcacgtcaatcgttctacgtgagaaccgggacagtatgttgatttcgggattggctgtattccgccgattctgtttgtcggggtatgtggactttggggattgtcttgtcctggttctcgaaaatggcccgaaattgcgtaccgggacaacgatttctgccccggtgcaaacgtcaatcgattgacgcctgtaccggggcaaattcgcgcccgggaacaatagggcgagggccggtcgcaggagtagagcgtgatgttgtcatgattgcgcccggctctcccacacggaaggccgggcgcaatcatgccgtttggttgcagcacccgcacatcgcctgcataaccgtgtacagtggcgtgtagttgcagtacatgaaggagcatcacaagccatgaccaacggacacatcaatcccgccaacgtgccggacatcgccttgaaagacggccattccattccgcaggtcggccttggcatgctacgtatcgatgacgagggcgtggcccctgtcgtcgaatctgcgctggaagccggataccgccacatcgatggcgccgccggatacaacaacgaggccggcgtgggtcgtgcgctcgccgcttccggatacaacaccggcgccaagcgcgagaccctgtgggtcaccaccaagctgcgcgactccgagcagggctacgactccgcgctcaaggcattcgacaactccctgaaactcctccagctcgattacgtggacatgtacatgatccattggcccacgccgttcgactggcgcagcaccgacacctggaaggcgttcgtcaagctgcgcgacgaaggcatggcacgcacgctcggcgtatgcaacttcatgcccgccgatctgaagcgtctgcacggggagaccggcgcatggccggccgtcaatcagattgagctgcaccccacgtggcagcagcgcgaagtggtggcgttctgcaagaagcacggcatcgccgtggaggcctactcgccgatggcgcgtggcgccgacctcaacgccggcgacggcaccatcgagaagatcgccgccgcccatgaggtcagcccggcccaggtgattctgcgctggcacatcgaaaacggcacgatcatcatccccaagtccgtgcatgccgaccgtcagagggagaatctcgacctgttcggcttcgccctgaccgccgatgaacacgctgccatcgacgccctcgacggccccacccgcgccggccacgaccccctcaccttcacctatgcgtgattgatggcacgtcgtaacgcccactttcgccgtcgtttcaacgcctctggaccgctggagcgcgtgctgattctcatcgttctcgccgtagcaatcggcgtgaccatcggcctgttactgccgcaggtcagctccgacgtggccaaaatcaccggtggctacactgccaccggttcagccgccgacactttgaacgcgctcgccgtagacgacaaccaaagctcctccggctacgaccgcgattccttcggtttccgcaccaccgacgtcgacggcaatggctgcgacgtacgcgacgacgtgctcgcccgcgatctcacggacatcacctacaaatacgccggttcctgtgtggtcgagtccggcacactggccgatccgtacaccgcccagaccatccatttcgtacgtggccgcgccaccagcgccaaagtgcagatcgaccatgtggtggcccttgaaaacgcttggcaatccggtgcgcacgactggtccactgccaaacgccatgaattcggcaatgacccctataacctgctggccgtcgacggtccggccaatcaggagaagggttcggcttccgccgcctactggctacccaccaacgccgactaccgttgcgactacgtggcccgccagattggcgtcaaagacaagtaccagctcaccgtcacctcccaagaaaaggatgccatgctcgccgtcctccatacctgcccgggccaggccgtgcccgcagacgaataggggctaccgctcaggattgttgagcataggtgcctgcccctcgtcataagcgcgcaggagccgtcggagcaaaaatgtggtgaagtatggtgcggtgaacacgtgtttgctgctaccgatattgccggcggatagtttcacgccgaactgaatttccggataagaatccgaagcgattagcgtccgcatggatttggcggtgccttttttcgatttcacctccaccggcaccagccattcgcgcgtgcggacgaagaaatcctgttccagtgtggaatcctcttttttgtagtagtacaggtcatagccggattttcgtagcgcttcagagacgatgctctcgtacatagcacccttatagacaccaagattacgattggcccgcagatcatcactggcctcgtcgtcaagcatcgctacgaacagaccggtatcgccgaaatatatcttgaacttgttttcgtcataattgcctttcaacggcagttcaggataggacatacatcggcagatattcaccattcccgaggtttcaagccattccacgcatcctcgatagtctttgaaacgcgctccgctggcaaccttgctgatttggaacttcttgttttccttggcgagttgcacgggaatatggttgaacacgttgagaattcgtgcctgatcgggtccttgcgtgtatttgcggatatcctcctggtagtccaaaataagctggcgctgcaattgcagtgttccctcgaacgtgccagtgcgtatatgggaggcgacaaccgcaggcatgccgccaagcacgcagtaatccataaatgccgtggagaagacgttcatttccacttcagagaatggcgtagcatcacacaggtgggtgaacatgctttcgatgacggcctcatcgtatccgcgagcccacagaaattcttcgaagtccaacgatcgcatttcgtagtcggtcttatatcccacgctattgctttcgatttgcttatagctgatgcccaacattgaaccgctgcaaatcacatcatatttgccgtcgattttaaagaacttcagtgcagtggcgatatcaggatgggcctggatttcgtcgaaaaagatgagcgtatcgcccggaatgaactttttggctgggtcgatcagggaaatattgcggacgatggtattcgcgccataaccgtccgcagtgattgcacgatatttcggttcctcaacgaagttgatttccactaccgaacggtagttgtgtgcggcaaagtaatcgatagtctctgtcttgcctacttgacgagggcccttgatgattagcggggagcgattcgggtcggatttccatgcattgagataggcatcggctttgcgtttgagatacatgaggagcccctttccgaattactgctatatcaatgattttacactttcatgagcgagttttctaccgtctggcacatttcatgagcgagttttcggcggtttttcacatttcatgagcgagatggcgggaaatgccagctgccagtccgccggtcatccatcaatcgtccgcagattgtccgtctgttgactcgggaaacatgcctgcgctataactgtgcgcggtatgaagggaacaggtacaaacgatatggcagtaacacacaccgaagcagatgccactgcggcaaccgctatgacgaacgctgtggcagacatcgaacaggaaacaccggaaatcgggaaggaacgccagcttgccggagtcggaaccggggccggagcagggacgaataacaataagaagccgcatgaccatgcgctggccagcatccttggtcccgcgttcgtggcggccgtggcctacgtcgatcctggtaatgtggcggccaacatcacctccggcgcacgatacggctacctgttggtgtgggtgctggtgctcgccaacgccatgagcgtgctcatccagtatcagtccgccaaactcggcatcgtgaccaacaaatccctgccggaactgctgggcgagcgtatgagcgacgccggccgattcatgttcttcatgcaggccgaggtcatcgccatcgccaccgatctggccgaggtgatcggcggcgccatcgccctgaacctgctgttcggattgccgctgttcaccggcggtttggtgattggcacaatctccacggtgatgctgtggttccaaggcggcaagacacagaccacattcgagcgcatcatcatcgtgatgctgctgattatcacattcggtttcatcgcgggtctgttcgtagccccgccgaaccccggcgaagtggtcaaaggcatgattccacgcttccaaggcgccgactcggtgttgatggccgcctcgattctgggcgccaccgtgatgccgcacgccatctacctgcactccacgctggtgaacgaccattacgcaggcggcgaaaagccgtcgatcaaaacgcagctgagaggctcgaaaatcgatgtggcctgggcgctgttgctggccggcaccgtgaatctggcgatgctggtgctcgccgccaactcgctgcatggcatgtctggcacggactccatcgacggcgcacagcgggcgatcacgcaggtgctcggcccggtgatcggcacgatcttttccatcggcctgctggcttcgtcgctgagctccacatcggtcggcacgtacgccggctcggaaatcatgcacggtctgctgcacgtcaacgccccgatgtgggcctgccgcgtggtcacgctggtgccggcactgattgtgctgtggttcgccaaggacccgactcaggcgctggtcatcggccaggtggtgctttccatcggcatcccgttcgccgtgattccgctgatgcgatacacgcataacaaggaactcatgggcaagtgggctgatggaaccgtcaagcacgtgatctttatgatcgtcgtggcgctgattgtggcgttgaacgtgctgctgattgtcctgacgctaatgggcagggcgtaatagactccagctgaaatcctgcgatagcacaacataataagaagccccggtgttggaaaccggggtttcttattatgttgagaatggttggatctgccgtcagttcgcagccatacgccgcgcacgccgttcgcgcagcgcgcgcaaggaaataatgtctcgcgtacgaccggcaccgtcgcccttgacgccgaagaacaccatcaacaccattgccagacagatcattgcggagatgcgcagcgcccattgaatgccgaaaatcgaagcggcgacggcggaggcgccgccctgcttatgcaaagcggcaaacgtttccatcagaatcaccaacacgggtgcgcccacagcgcccgcaatctgacgcgcggtattcgtcaccgatgatccggcggacacttcgctcggcccgttcaggcaattcagggaccacgtggtaatcggcatcagcaggaaacccatgccgatctgacggatgaactggcagatcgatacccaccagatccacgtatccatcgccaccagcgacatgcccaaggtgccaagggtcaacacaatcgaaccgaacaaagccaccgggcgcgcgccgaaccgatccatcgcgcggccgccgaagaactgggagacgcactggccgatagcgcccggcagcatgatcagaccgctcatcgtggccgaatagccgcggtcagtctggatgtagagcggcatgatgaccagaatcgaactgaaggcgaaaaatgccagcgacgcggtaatggtgccgacggtgaacgaagggttcttcagcacttccaagtccagcagcggcggctgggggagtgccgactcgtccttggctacggcctcgcgataccgcttgccagcgcgcaggttgcgcatcacaaaccacacgatgccgaccagtcccacaaccatcggcccccacgtgaccggtgccgcgaatccataggtctctgaattggtgaagccgaacataagcccgccaaagccgatcaccgacaggcatgccgagaagaagtccgcgcgggccgaagggtcgtgtgaaccgaaattatgcagtccgaacatggccgccagcagcgagattacgccaatgatggtcatggtcaggaagatcgagcgccagccgttggcatcggtctgccagccgcccaaggtggggccgattgccggagccacgctcatggccatgcccaccgtgcccatggcaaagccgcgtcgggacagcgggtagatggagaacacggtgatttgcagcaccggccacatcacgcctgtgccggcagcttcgagcacgcgcccgaccaacacccatacgaagtttggccccaaccatgccagcacggagccgattgtgaacaccgccatcgagcagatgacgatctggcgggtggagaagcgtcgggtcagaaacgcggtcagcggcaccatcacgcccatgaccagctggaacacggaggtgagccactgcccggtggttacggagatgtggaattcggaaacgataatcggcagcgcggaactcagctgcaactgcgtgaagttgcccacgaaggtaatgaaggtcaatatcgcgatggagatgaacgccgcccggctgagtttgccgtctacatatgattcctcgcggctcagcacccgctgcagttcgccgcgacgatttttgattccccgagctccgttcattccactcacgtgcatactccactctcgctgatcgaccgcaacaacgcatcaggcagtttctcaaagcaaccccaacacgctacacccaggggtagtccgtcgagatgcaatgccgagatgactggccgcccggttgcagagcaaattagtcccgttattcgagacgtcaaaatgaacgtagttactatccgatcacgttcgctatgtggttttccaacaccccccccccctagcggttaggggtgtgatgtctgtaccatgttgaaggggtaaccccgtatacacccgtacacaggggaatccagagaagtgagagccgcgagacctgcggtatacggtcgaaaaggaagaattggtgtctgagatgtcatctatgagcagtaacggtcagccgtctacacgcagcagacaggccaatggcggtgaccgaaccaccgctcagctcagtgatatccgccaaaagcagctcagccacgtgctgtactggcgattcttcatcaatctcgccctcatgcttatcgacgccgccatgtacatcatcgccggagccacggtgctcaatctgcgtcatgaggcaatgccgttctattcaatgagattcggctttacgattgagtccaccatttatcttattattgtggccgccttctgggtgtggtcgctctatgttgtcggcatttatcaccgccatgttatgggtgacggttaccagctcaatgtgctgctggtcaaaggcatggtcgtgtgctgggtggtgcagtgcgcgttcaactacttctttaatctgggtctgaccctcacgtcgctctgcttggtggtgattgccggatggttgctcaccatggtggaacgcattgccagccgtgcattcattacgtgtagtcgtcgcaagggcgcctacgcttatggcacggtgatcatcggttccccgcacggcattggtcgcacgctacaattcctcggtcagcgtcggcaactcaactaccgcccggtggcagtatgcccgattcatctcaatcccgataccggattgattgaacagagcaccgaccatgagacactccgtgaggagatgcaaaagaacgagggctgccagctgcccgtactcgagtacagcgatcataatcttgctgaacagattattgacatgaacgcgcagaccgttatggtggctgacgagctgcatcgctattcggataattacgatatcttctccgtgcgcatggaatcgttcggtctggagattgccgtgctggcttccgccgctgacacttctaaccatgagattcaggttcgatccatacagggcaccacgattatcacgcaacgtcttgcgcaatacacgccagcccgccgtatggctaagcgcctgtttgacttggtgatttcttcgctagcgatcatctgttcgttgattatcaccatcccggtggcgatcgccatcaaagtcacggacggcggaccggtgttctacaagcagacccgtatgggcctgcgcggcaagccgttccagatgtacaagttccgttcgatggtggtgaatgccgatgcgctcaagaaggagctcgcaaaagaaaccggccagaccgaccgcttcatcttcaagatgaagaacgacccacgcatcaccaaggtggggcatttcattcgccgcttctccattgacgagttgccgcagttcctcaacgtgtggatgggcgatatgtccgtagtggggccgcgcccgccgctgcctgaggaatacgcccgttacaaccgtctgtacgccacccgcatgctggtcaagcctggcatcaccggtccgtggcaagtgtccggccgctccgatttgtctgccgaagagagcgaggcccttgatgtggcttacgtgcagaactggtcgattatgggagacattgtgcttctcttccgcacggtcggtgccgtgctgagccataaaggagcgtactgattccttcccgtttcgctgctacagttttgccgcgcccttgccgcaccgcccttgaacgtgattccagaaagataagtcgatatatctatgactgactcgaacataccagaaatacctcagccgccggcaccctccgagcggtcggaaaacgcggatggtcgccaagtgatacagccgtatgttgaccccgaggtacttgctgaagacgctcgagcggcggaacggcgtaagcaccgcaggcgcatgagccatgaacatatcaggcggatcaagcgcaaaaagcgcattcggatgatgctgattgtaatcggcgcactgctgttgattattgccgcgctcgcggcgtggctcggcctttccgcgctcaaagcgaaaaatgaagtggaagcagcgattcaggccgcaagccgcatccaatcacaagttcaagccggcgacaccgacaaagcgcaagccagcattgaagcattctcccagcatatcgacgctacgtatgcgcagaccaagcagccggtatggaaactggtcacattggtgccctattacggttctgacgtgaaggccgcgcgagacatggtgcacattttggaagacgtgtcgaacaacgcattgccgaagcttgccaaggcggcacaggccttggatttcaacagcatcggtatcaaagacggcacgattcagctgggggatatggccagcgtggcacaggatcttgccgccgccaatggaatagtggcggatgccagcgtagacatgggcaagattggcggtacgcatattccgcagattaccgaggcggtgcagcaggggcgtagcaagttcaaggagcttgccagcctgacggatacggccagtcggctggcggatgtgctgcccaagatgttcgacttggatagcagcgagggcagtagcagtggcccgcgaacctacctggtgctggcacagaacaatgctgagctgcgtgccacgggaggcattccaactgcgtgggccacgcttaccatcgatgcaggcaaaatcagcatgagcacgttcggcgatccgcctcgggatggcctgttcagccaggatgaagccgcgagcgtactgacggcggaagaacgcaatctcttctccaccaagatggccacggactacccggacatcaatttcactcccgatttcccccgcgtcgctgatatcgcgagtcagatctggcatcgagccggtcatgacgatgtggatggcgtcatcagcgtggacccagtgttcctgcagcggttattgaaggttgccggccccgtgacgctctccgacggcacggtgatgagcggcgacaataccgagcagcgaattctgaaccagatttatattgataccgatacgcaggcggagcaaaccgacttctttacgatggcggccagtgagattttcactcatatgctcaagaatgtggacggcaagaatcagcagctggtgcaaacgttccagaagtccgtatccgacggccatctgtatgtatggagtgctcatgaagatgagcagcggcgtatctcgggtacgaccatcgccggcgaattgcagtcgaaaccggttcatccggttacgggcgtgtacttcaacgatgccactatgggcaagatggactggtacctgaagcgtgaagtgaccagtacatatgacaaaacctatcccagtggcgccaagcaatacaccattcacatcaaactgacgaatacggccgatgccgccaaggtgaatgccgctccggatctgttgcgcggctatgaccataacggcaacccccgtacaggggagatcgaaacggtgctgtacgtctacgcccccgatgaagggcgcattgtggattggacccaggatttcgatcagttcgctgtgcacgatggactgacggtgggtgtgaaaaccgtgacattgcggccgggggaaagtttcgagaccacggtgcatgtgctggccagtcctgcggccgatgagaatgaaatgattttgagacagacccccttggttgattaaaggggcaacccctatacattaaggtggaatcatgaataaggaagaacggagtatggctgtggatgaagctgaacaggtgcaagatggtaatggagtcaccattctcgatttattcaatgcggtaagaaagcatgtgattaccgcagtggtcacactggttattgtgatggtggcaatctgcgcgtacacctttacccgcactccgcaatacaccgcgacttccgaactcttggccacttatcgcagttcagcggctgcagcgggcgcatccagcaatgcaggcgagctgagctctggcgccaattacatcaatagccagattcaaacgtatccgcaattggtaaaaaccgagtccgtattgcagccggttattgatgatctggggcttgacaccacggtaaagggattggctgcgagcgttaccgcttccaacccggaggacaccatgctggtggatatttcggttaataatccagacccgaagcaggcgtccagtattgccaattcggttgccgaaaacctgagaaaacaggttacttccacgatttacagcgatgagggcgataagatcatctctcccgtcaacctgactgtggtgcagcaggcgtacgctccggcttcccccagctcacccaacgtcaagctcaatctggcggcaggtcttgcggtcggtgtcattctcggcatcgtggttgcctttatcaaggatttgctggacacccgtgttcgccgcgattctgatgttaccgctgttatcgatgctcccgtactggggtcgctgagccgcaatgaggcttatgccggtacgtcgccggtgattatctcccgcccggcctcccgcgaggcagaagagattcgacgcctgcgcaccaatgtgatgttcgtgctgcccgatgagccgttatccaatgtgattgtggtgacttccaccggaccgtccgaaggcaagaccatgctgagcgtgaacctggcgaccgcatttgctgagaacggcagcaaggtactgctgatcgatgccgatgtgcgcaacccctcggtgagcaaggctctcggcattgagggcgcagtgggcttgacccatctgattaccaaccgtgtatcgtcgcatgatgcgattcaacgctactggaagccgaacttccacgtgcttcctgctggaaaacaaaccatgaaccccagcattctgctgaattcccgcgctatgaaggcactggttgagcaggtttccggagcctatgactatgtgattatcgataccgcccccatgcaggtggccaatgatgccgccgtattcgctaaggatggtccggaactgttgttggttgccggcttgggcgttacggagaagaaactgctgaagcagaccgggcgcgaactgagcacactgagcatcgatcccgtgggcttggccatgaattacggcgagacggagaagccccagaagggtggctattactattacggcgacgagtctgacgacaacggcaggaagcgccaaatccagcacaaaaagtctgaaaagacgaaggactgagcacatgaaatcgcagtatgagatcagcaagaacggtagcaacatgatgtccgataagggccgtcatgtcagttttgtgggggttgtggcgtgagtggggtgtcggctgttcagcatgtgttcgttgtggggtcgaaggggattccgggcagttacggcggttatgagacgttcgttgatcgtctgactga

SEQ ID NO: 224 - DNA, 2502 bp, Unknown
  R101_18m  MAG No. k141_31448
acgctgcggcatgttgtcccggctattgcccacgcccattcccagctctccgcgccattcccgcaatcacgtctcttccccggtctcaagcccatgagacacttggagccatgactaccatcatcatgcgcacctctgagggcgatatcaccatcaacctgttcgacgacaaggccccgaacaccgtggccaacttcctgggcctcgccaccggcgagaaggaatgggccgacccgtacaccggccagccttcccatggcaagttctacaacggcctgaccttccaccgtatcatcaagcagttcatgattcagggcggttgcccgctgggcaccggtaccggcggccctggctacgagttcgacgatgagatcgacccgagcctgaagttcgacaagccatacctgctggctatggccaacgccggtctgcgtcgcggcatggacggcaaggtccatggcaccaacggctcccagttcttcatcaccaccgtgccgaccccgtggctggacggtcaccacaccatcttcggcgaggtcgccgatgacgactccaagaaggtcgtcgataagctcgaagcactggacaccgatccgatggatcgcccgctcgagccggccgtaattctgtccgtgaacgtggccgagtaagaccgacacatatacagcaaaggtcctgattggtattccagtcaggaccttttcgtattcttggctccctctctgaggggagctggcgccgcagacgtctgaggggagttccgcaagcccgcgctgctcccctcagtcagcttcgctgacagcccctcccggaggggagccaagcaacggcctacttcatcttgcgcagtcgaggttcggcggattccttggcaccggtgatgcggtacacgtcgaacacgccatcaatcttgcgcacggctgccagcaacgagttgagatgctgcggatcggccatttcgaagctgaactggctggtggccacgcgatcggaaccggtggcgatcgtaccggaaatgatgttcacgccatggtcggaaagcacacgtgtcacgtccgaaagcaggtttcgtcgatccagcgcctcgacctgaatcttgaccatgaacaggcccttggtgctggtccattcgacttcgaccacacgctcaggctgcttgtttttcagatcgatcatgttctggcagtcggtgcggtgcacggatacgccctgattacgggtgatgaagccgatgatattgtcaccaggcaccggcatgcagcaacgggccagcttgatccacacatcgcccacgcccttgacggataccccggtggagctgctggaagtcttgcgctccacgggcttgagcggcagagcctcctgctcgacctcctcatcgacctcgtcggccccggcatccttgaccagatgcgagatgacgttctgcgtggagatctgcccatcaccgatggcggcgaacacagcgtcggcgttcgggaaattgaggtcgtcggccacaccgatcaatgcctcggtggtcagcagcgcattgaccggcaagttacgtttgcgcatagcgcgggtcagttcgtcgcggccttcctcaatagcctcggtacgacgttccttcgagaaccactggcggatcttgtttcgtgccttcgggctcttgacgaagctcagccagtcgcgcgaaggaccggcggtatcggacttggaagtcaggatctccacggtgtcgccgttgtcgagcgtggtgtcgagcggcaccaaacgcccgttgacgcgcgcgcccatcgtacggtggcccacttcggtatgcacggcataggcgaaatcgaccggtgtggcatgggccggcaaagagacgatcttgcccttcggcgtgaagacatagacttcggacgagccgaggtcttccttcagggaaccgaggaattcgttggaatctggggtttcgctggtccaatcagcaagctgctgaatccatttgagattgtcggcttcggaaagctcctggttcttctcgtcacgcctgcggtcggacttgtccggcgagctcagggcgcggccggcctggccgttttccttgtatttccagtgcgcggcgatgccgaactcggcgcggcggtgcatgtcccaggtgcgaatctggatttccaccggcttgccaccggggcccaccaccgtggtgtgcagcgactggtacatgttgagcttcggcatggcgatgtagtccttgaaccggccgggaaccgggttccaccgcgcatgcacggcaccaagcgccgcatagcaatcctgaatggtgtcgacgatgatgcgcacaccgaccaaatcgtagatgttcgcgaaatcatggccgcgcacgatcatcttctgataaatcgagaagtagtccttcgggcgtccggtgacgtatgccttgatgttctgctcgtcgagatcctcgttgatctccgccagaatctgcttcaggtacacatcgcgctggccggctcggcgagccaccagcaccac

SEQ ID NO: 225 - DNA, 12971 bp, Unknown
  R101_18m  MAG No. k141_31914
atgccgacgaccggaccacggcggtcttgtcgtttggcgccatatcccgtgtttgccgcgttcgtcggcggcgaaagttgccgttatgttaacagacgtcagatgtcttattgcagaatggtaaacaaacattttcggaacgataacggtcggcgaagcccgaaatattgccgatattcaaggctggtgaagtataggcagatcagcgcggaggggccttgacgagtgaattcctcaacacgccgatttgaaatcagacatcagacgtcttaccattaaggaggttcgacaacgatgttggtggttccccgcaggagtcccgcacaaaccgcaatggtccgccgtaacgcggaaaggccgaagcggacgcaggccggggaacggtcaatgaagcaattaggaaaggatcgcgtcgtctgtcggacggtgattcgaaattcactcaatgatgaggagatcgcatgatcaagagaaacggaaagttcaaggccgccgtggccgcggccgtcgccagcctgatgctgctgtccggatgcggtggcggcacccagaccgccgcgaagaccggaactgccgtggcggacaccattaccgcccaggttgcctatgcgagccgcgacttcagcccgtccaccacctccggcgccctgccgatggccgcgaactggcacgtcaccgaaccgctgtacgcgctggactacagcacctacaagccctatgccgctcttgccaagggcgatccggagaaggtctccgacaccgagtacgtggtcaccctgcgcgacggcgccaagttctccgacggtaccgccgtcaccgccaatgacgtggtcagctcctaccagcgcaccaccgccaccggctcgctgtacatttcgatgcttgacttcatcgattccgtcgaggcgaagtccgacacccaagtgacgttcaagctcaagaaggcgttcccgctcttcaagcagcgactggcgttgatccagatagtcccgtcgtccatgagcgatgccgacctgaagaacaagcccatcggctccggcccgtggaagtacgccgagatcaccgaccagcaggtcaaattcgagaggaacgacctgtacaacggctcctacccggcccaggccaagaacatggtgtggaacgtgaccgtggacgacaccgcccgcgtcaccgccatgcagggcggcaagaccgacatcatggaaatggtcccggcccaggcgctccagaccctccagtcgtccggctccgagctgaagaccgcgcagggcttcaacctgccgttcctgatgttcaacaccaagaagaagccgttcgacgacaagcgcgtgcgccaggccgtgttctacgcgatcgacgtggacaagctgatctccaaccagatgagcggccaggccgaagcggccacgagcttcctgcccaaggattcgcagtactaccaccaggcgaagaacgtctacaccaaggacacggccaaggccaaggaactgctcgccgaagccggggtcaccacgccgatcagcttcacgctgtacaccaccgaccattcctggatcacccagctcgcaccgcagatcaagaacgatttggccgagatcggcatgaacgtcgacatccagtcgatgaagtcctccgcgctgtacccgtccatcacggacaaggacgacgctgactactcgatggtcctcgcccccggcgatccctctgtgttcggcaacgaccccgacctgctgatgaactggtggtacggcgacaacgcctggaccaagcagcgctccttctggaagggctctgacggctacaaccagctacatgagctgatggacaaggccactgccgcttcttccgattccgaacgacaggagtactggaaccagtgcttcgacctgctctccgaagagctgccgctctacccgctgttccatcgcaagacaaccacggccgtcaggaagggcgcgttctcctcttgggaggccattggctccaccggcatcaacctggtcaaggccaagctgaactgacgcaatccacatatgccatcaccggctgaaccgaacggacggcaaggcaaccggggcgtcctgcgaacgtgcggatgccccggccccgcccgcggcgcatctgaaccgccgatggcgcacgcataggagcttttacagtgagcaatctgttacgactgttgggcaggcgtctgatcgccttgccgttcatggcactcggggtcgcctttttggtgttcttcctgatgtccttctcccagtacgatcccgccgtcgcggcgcttggcgagaactccacccccgaggcgctggccgccttccgccacgagatggggtatgacctgccgtggtggcagcagttcttcaactacatcgtcggcctgttccacggcgacatgggcgtgtacggcgtcaacaaggattccgtcgcggcccgcgtggcccaggcgttccccgtcacgctgcagctgaccttcatcggcctgatcatcgccatcgtgttcgccatcgtgttcggcgtgctcgccgccctgtaccgcgacacctgggtcgaccagatcatccgcgtggtttcgatcatcgccatcgccaccccgtccttctggctcggtgtgctgctgatctacgtgctgcagatcaagatggcgtggctccccggctccggcgacctcgtcccgttcacgcaggaccccggcgcgtacctggcccgcatggccatgccgtccttcgccctcggcctgcccgtggccggccagctgacccgcatcatccgcacctcgatggtcgaggagctcgacaaggactacgtgcgcaccgccatcggcgcgggcgtgcccaagagcgtggtcgtctcgcgcaacgtgttccgcaacgcgctgatcaccccagtcaccaccctcggcatgaagatcggctacctgatgggcggcgcgatcgtcatcgaggtcatcttcgccctgcccggcatgggcaccgcgatgttcgacggcatcaacggcaaccagccgatgctcgtccagggcgtggtgctcgtcgtggccctcgcgttcatcatcatcaacatcatcgttgatctgctctatgtgctgatcaacccgcgaatcaggacggtgtgacgatgctattcggcaagaacaaggcggccgaggccgcaagcaggcccggcgtcaaattcaatcgcttcagcaagatgaccgtgggaagcaagatctccttcgtggtgatcgcgctgctcatcgtctgcgccgtcttcgcacccgtcctttccccgcacgatccgctcgagatcacgatgagctaccaggcgcccaccggcgaacactggttcggcaccgacaatctcggtcgcgacgtgctctcccgcgtgctctacggtgcccgctactcgctggtcatcggcctgagctcgatcgtcttcgcgctcatcgtcggctcactgatcggcgcgcttgccgccgtgacccgcacgtggatctccgagctcatcatgcgcgtcatcgacgtgttcatgtccgtgcccggcatcgcgctcgccgccgtgttcgtctcgatcctcggccagtcgatggtcggcatcatcatctcgatcggcgtgctctacgtgccgcagatcgcccgcatcgtcagggcgaacatcatcagcgagtacggcaaggactacgtgcgcgcggtcattgtctccggcgcccgcgccccgtggatcctcttcaagcacgtcacccgcaacatcgccgccccggtcatggtgttcaccaccctgtccgtcgccgacgcgatcgtgttcgaggcgtcgctgtccttcatcaacgcgggcattcccgagcccaccccgacctggggcaacatcctgtcctccgccaaggccggcgtgatcttcggctactggtggcaggccatgttcccgggtctggcgatcatgatcaccgtgctgtgcctcaacatcctgtccgagggcatcaccgacgccatggtggccgccccgacggccccggtgaccaagtccgccgccgacgccgaggccgagcgcagggaggatcgcctcctgaccgacccagtcgccgcctacagggagcaggccgaatccctggccgattccctcgccgcactcaaggaggccgaacttaagcgcaccgaccggttcgagccgacgagcacggccgccccggtcatcgaggtcaaggatttgtgcatcaagttcccgcgccacggcgacgtgaacgtggtggaccacgtgagcttctctgtgcgtcccggcgagaccatgggcctcgtgggcgagtccggctgcggcaagtcgatcacctcgctggccatcatgggcctgctggacccgaaggccgagatcagcggcgagatcctgttcgacggcaagaacctcgtcggcatggatcccaaggagcacaacgccctgcgcggccacgagatcgccatggtctaccaggacgccctctcctcgctcaacccctcgatgctgatcaagtcgcagatgaagcagctcacctcccgcggcggcacccgctccgccgaggaactgctcgagctcgtgggcctcgatcccaagcgcacgctggaatcctacccgcacgagctctccggcggccagcgccagcgcgtgctcatcgccatggccctgacccgcgaccccaagctcatcatcgccgacgaaccgaccaccgcgctcgacgtcacggtgcagaagcaggtcatcgacctgctcaacgaactgcgcgaaaagctcggcttcgcgatgatcttcgtctcgcacgatctcgccctcgtggccaaggtggcgcattccatcaccgtgatgtacgccggccaggtggtcgagcagggcttcaccaaggagatcctcaccgatccccgccacgagtacacccgcggcctgctcggctcggtcacctcgatcgaggcaggggccaagcgcctgcaccaggtgcccggaaccgtgccgtccccggccgacttccccaagggcgatcgcttcgctccccgctccagccacccggacgttggcctcaacacgcgcccgatcttcgaacgggtgcccggcacgcatcactattacgccgccctgccggccgatgccgacgtcacgcccgccgcggcgacagtttccacccaggaaggaggtgcccgatgagccacgccgccgaaacccccaggaaggatcccaacgttccgatcatcgagctcagggacgtcgaggtggtgttcaccacccgcgccggatcggggctgttccacaagaacaggatcaccgcggtcaacaaggtgaacctgaagctcatgcccggccagaccatcggcatcgtcggcgagtccggctgcggcaagtccaccacggccaacgtgatgtgcggcctgcagcaggccaccagcggcaaggtgctgttcaagggccaggacgtcacccaccgcaccgccaaggagcgcatggacatcggccgcgtggtctccgtggtcttccaggacccggcgactgcgctgaacgcccgcatgagcgtcatcgaccagctgctcgacccgctggtggtccacaagctcggttccaaggaggagcgcgacaggcgcgcccacgagctgatccgcatggtcggcctgcccacctcggtgctgggcgccctgcccgggcagctgtccggcgggcagcgccagcgtgtcgccatcgcccgcgccctgtcgctcaagccggacgcgatcatcgccgacgagcccacctccgcgctggacgtctcggtgcgcgcacagatcctcaacctgctctcggacctcaagaggacgctcggcctgtcgatggtgttcatcagccacgacatccaaaccgtccgctacatctccgacgaggtgatggtcatgaaccacggcaccgtcgtggaacgcggcaagacgatggacgtgatgcgcaacccgcaggacgggtacaccaggatcctcatggacgcggcgccctcgctgctgcatcccaccgcggccgaatgcgcgtgaggccttcctcgcgttgaaatcgcgttcgcccgattccaacgccgaataatttcagcagtccatttttaatcctcaaagacaatcctcaaagaagggacacatcatcatggcaacccaattccgcggggtcattccccccgtcgtcaccccgctcaccgcttccggcgaagtggacaaggccagtttcgcccgctcgatcaaccgcatgatcgacgccggcgtcgacggcctgttcacgctcggctcgtccggcgaggtggcgttcagcaccgatgcgcgtcgccgcgagatcatccagaccgtgattcaggtcgtggacggccgcgtgccggtgttcgtcggctgcatcgacaccgaaaccaaccgcgtgatcgagcatgcgaaggaggccaaggagctcggcgcgtccgccatcgtggccacgtgcccgttctatgccctgggcggcatggccgaggtggagcgccacttccgcctgattcacgccgccgtgccggacctgccgctgttcgcctacgacatcccggtgtgcgtgcataccaagctgccgggcgacctgctggtcaagctgggcagggacggcgtgctcgcaggcgtcaaggactcctcgaacgacgacgtggccttccgcttcctcgtggacgacaacgccaaggccggccatccgctcacgctgctgacgggccaggaggttgtggtcgacggtgcctacatggccggcgccgacggctccgtgccgggcctggccaacgtggaggccaccggctacgtacgcatgtggaaggccgccgaagccggcgactggaccacggtcaggaaggagcaggactggctggccgcgctgatgcgcatcgtcaccgtgccgcagggcgtggcgggcttcggctccggagtgggcgccttcaagaccgcaatggcgctgctgggcgtgttcgacaccaaccagatgcctgatccggtgctgccgctcaagggcgagaatgtgaaacgcatcgccaccgtgctcgaggagtgcggcatgaagctggaacgcacccccgaagaggtttccgcctccactgaggcctgattgccgcacaaccatatgcgttgcgcgaatgcccgcccgcatgcaagcgcgtggcggcgttcgtgcggcgcaacgccaataggctcatacgaaaggaattgccatggctgaagtgatcatcgtcaaatccgagcaggaggccggcgaactgtatggccgttgcgtggccgatctgatcaaggccaagccggacgcggtgctgggactggccacgggctcgagcccgctggcggcgtaccgggcgctcgcgacaatcgtcagggacgagggaatcgacgtatccagggtgcgcggtttcgcgctcgacgagtacattggcctgccgctgacgcaccccgagtcgtaccatgcgaccatccaccgcacggtggtcgagccgctgggactggacccggccaaggtgcacgtgccgggcgacgcgctgaacggcaccgcgctggaggacggcgacaaggtcgccggcgccggtgcggcatatgacgcggcgatcgaggccgcgggcggcatcgacgtacagattctgggcatcggtaccgacgggcacgtgggcttcaacgagcccggatcgtcgcttgcctcgggcactcgcgtcaagacgctgaccgagcggacccgcatcgacaacgcgcgcttcttcgacaacgacatcaaccaggtgcccacgcactgcatcacgcagggcatcggcacgatcatgaaggcccgccacctcgtgctgctcgcgttcggcgcgggcaaggccgaggcggtcgcggagaccgtggagggcggcgtgagctcgtactgcccggcatccgccctgcagctgcacccgcacgctacgatcatcgtggacgaggcggccgcctcgaaactgcgcggcaaggactactaccggtattcctacgagcacaagcccgcctggcagaagatctgaggaaacgcagatgcaaaaacgctatcaggcgacgatggtcgcggatgcgctcgccgccagggcgggaaccttcgtcattcgcaatgcagtcaaggccgatgcgcgtggcgtgcagctcaacgcatgggtgagcgtgacggacggcgtaatcgacgccgtgggcacgagcgacgctgaccttgaaacccgcatcgcccatctcagcggcggggaccaggtcgccgaggtcgatgccggcggcatgctcgtgacgcccggctacgtggacatccatgcgcatggcgcctgggagcgttcgttcgacgacggtgccgagggcatcgccgtggcgcgcgcgtaccacatgctgcacggcaccacccgccaggtgctctcactgatcaccaatccgctggatgtgatggcgcggaacctcgaatgcgtcaggtccgtgatggcaacgcggcccgacgtgctcggctcgcatctggaggggccgttcctggcgttggcccgcaagggggcgcatgacccgaactgcctgtgcgatccgaccccggagcgcgtggagcgtctgcttgaggccgccgacggcacgctaaggcagatcaccatcgcccccgagcgcgaatgcggcatggacgcgatccggcgcttcgccgcggccggcgtggtccccgccgtgggacactgtgacgccgactatgacgtcgcacgccgggcgatcgacgccggcgcgggcatcatgacgcacatgttcaacgcgatgaacggcatccaccaccgcgagcccggcccgattccggccgcggtcgaggatccgcgcgtcacgatcgagctgatcaacgacggcttccacgtggccaatcccgcgcttcgcctggcactgggtttcgcgccgcatcgcattgcgttcgtcaccgacgcgatggccgccaccggttgtgcggacggcgcctacaaactgggcgcgctggacgtcaacgtggtgggcggccacgcccggctggtgtcgaacggcgcgatcgccggctcgacgctgatcctcgaagtggcggtgcagcgcgccgtgcgcgagctcggcatgggcctgaccgacgcgctcgaagccgccacgctcaccccggcgcatgcgctcggccttgatcggccgaaccccgtaaccggcgcgccgctgggcctggtggcccccggctacgccgccgacctgctgctcaccaatcccggcacgctcaccgtgaccgcggtgtggtgcgcgggccgtcggatcgtgtaacgggttactttttgaaggggcgtgtcgcatgtcggtcgggccgactggattgcccgcgccaatcggcccgcggtttcgggtttactgctcctggacgatgcgacgcttgagaatcgattcgatcggctcgtaatggtcgaacacggcctcgcggtagtcgtccacattgccggccagcgccgcgttgagcatgcggtgatgggcgtcggcggtacggtcaagttcgctggaaaccgccagtccgagctgggggagcacggccatgtgcacgagccacagggagcggaccatctgcttggccacggtgttgttgagcgaatcgagaattcccctgtgaaattcgatgtcgagcccggtgaacgtcttgccttccttggcttcggcgctcatgcgctcggcaagttccgtcaggcgcggctgctcggttcccgccagggacgcgcagacctcctcggcgcatcccaggtcgaggaagcgccgcagttcgaccacgtcctgcagatcggtgaaattcttgccgaccgacgccatcgaccggaaggcgagcgtttccaccatagggtccagcgacagggaaccgacgaaggtgcccttgccgtgctccaccttgacgatgttcagcgcctcgagcttgcgcacggcctcgcgcaccgacgaccgggacgccccgatggtgtcgcacagctgcgtttcggtgggcagcacgtcgcccggttgcagacgttcgcgcagtatgtacgacttgatcgcgtccatcgtctcgtcgcatcggctgcgggaagagacctgcgtggtcgaccagttgcccagggacaggcgcgccagcgcggccagctcctgcgtactgtattggccttgcggcgcgtcgggttccgtatccgttgcgcgtgagcccgccgtggctcggtctgctgtgccgttcatgatgactccttgtcgtccgtatggttggccgcgacgcccttatcgtggccatgtgaaaaccatgcaagggggatatgcgtaatgtaaacccccgtcgtctctatttcccacaatagtcccaattgtgaaccttcacattctacgtcgtgcgtcgtttcacatattgccatgcattgatagacatgatgatgggggtgcacgcacaggctgcccgtccaggtccgtccgccgtcctcgctcagtcgcaccatgccccgtccccggtatggcatcatctggctggcgttggcgaacagcaccgcgtcagtgccaagctgcggcaccgcaagggcgttcggctggctgaagatctccggcaaggcgggatcgaactcaagctcgtcccaggtatcgccgccatcgtggctgaccgccttgcccacgcgtccgctggcgtgctggttgcggaaaaacgccactacgtcgccgtccgcgcgctgtacgaacgtcgtttcgctggtcgttgcgtcgtcgtcgcgcatggtggctggatcgacgacggtcccgttgatctcgcgcccctcgttgatcatgcgtccgcgtcgccaggtttcgcctccgtcgtcgctgatcagtgctccgccggaatagtgggcgcggctctgcccgctgcaatagaacggcatgagcagacgaccggcatatggccccttgtccagctggatgccggttcccgggcatacgcccatgaaatgcatccattcctctttgaccattgcgtcaatgaggaatggcggtgaccaggtctcgccgtcgtcgtcggaatggatctgcgcgatgtagcaggtgggaaccgcatgccagcgttgcgacgggtcggcatgcatgggacttcgccacacgtcgccggcgtcggccacggcgtccagcgtggtctcattgccctgagcgtcccgcagacgcagaacgccgtcgcggttcacgccgatgccgcgctcgcagttggtcaggccgatgcctccgggattgagatcgatcaataccgtgatgcgtccgatgctccggtccactacggagcaggagtcgagcgcgctggccccgtccagcccgtcctcgcgtccgggcatgtcgatgaccgtctgcatcggcatccagttgcgcccgccgtcggttgacctgcggatgacgaagttgatgtggttgggggcgtcgttgctgatcgccgttcgctggtcggccccggcgatcagcgtgccgcggacggtgcggatcagcgagggtatgcgatagctggccgacccggcgtatcccgcgtcgaacagcgccgtggtgaccatcgggggagtgtgagcgagccgtgcgatctgcccgtcggtaagcgcgtggacgtacaggcctccacggctgacctcgcccatgagccgcaccccggcgatattgcgccccacggtgaaagcgtcgatgccttttcggccgtggcgtggaccggccagatccgcgaaccacatctggcccggctggtgcagcacgctgacgccgtccataaagaggtcaacggcgccgcgcgaggagcggacggccagatcgtgccagcctccgtcatcccaatggcccggcgcgtggcatgcgatgcccgctccggattcgtcccgcatggccagcgtcagtcctccggcgccgatggcgacggtcatgcgctcgcttccatcgacgccggccgcgaggatcgtgccatgctgtccgcggccgcgcaggcggaatctcgcatggacgctgcccgcatccgccagggcgatgcgatcggtatccctgggggagagccggtccgaggcgaagacgatatccggcttggccgccgcggcatgctcggcgatgcggacggcgtcccaatccacggggtcgacgaggaacgcattgcaggcaatggcattgggtgagccgaggtcgaatgcgcccgatgggtggacccgtgagggattgagattgccggcgcaggcaaagcattggtatccgtccaggtagatgcgcgtgccgaacgcgccgaaggtcaatgcggcctcgtgtatcgttccaggatcgaggccgaaggcgtcttcgatgtcgaggctgacgtgggactgcgcatttgggtcggccgggtccggggacagggaccgcgccgtcagcgtgaggtgcccgtcacgcacggccaggcaaaggtatggggcggcagtgggaattccgtcggcggtggcggggacctgcgcccgccagatcggcccgtccgcacgtacggagaattcggcgatgacggtgcccgcgccgtgtgggaaatccgttgtctgccatggtgccatgctcgtcgcctcggtcttgtgatgggttgtcgtacgtctcgatatcgagacatcagacatctgataagttaatcgtatcatatggatgccaatgaaaattggcccccgttgtctagatgaaagtgcaacaccctttagattggagattgtccagataaccagtgaaggggtgtcgcaccttgggtcaagtgtattcgcacctgtcggaagaggaacggcggatcatccggatagagatcggcaacgggacgagcatacggcggatcgccggcctgatcggcagacacgtctccacggtcagccgcgaaatcaaacgcaacacatggttcccgtccaacgagaacgaatcctaccggccggtgccacatcgccggccccgcgcgccggaaggccggacgccgccgcgccaggaccggcgtcacgcacgacaacggcgccgagttcgcccgccacgcggaactgcgcgaacggctcggcatggccacctacttcaccgccccgtacc

SEQ ID NO: 226 - DNA, 22807 bp, Unknown
  R101_18m  MAG No. k141_32428
ccacccacggtgttgaacacggaaaccagctgcggcatgtcggtcatcttcaccttcttggcggagacgacaccggccacggcaccgatcaggatgccgacgaccagcaccaccacggccacgacgttcacgaagcccttggcgaagagcacgatgaatgccatgagcacggccacgaccatgccgaacgcggagatttggttaccctttcgggcggtcttcggcgagttcatgaaatgcagaccgaccacgaacaggacggcggagaacaggtagacgaaccatgcgacgatgtcgatggcgccaacggttgcggaggtcattacttcgcctcccccttcttctcgttcttgctggacttgaacatctcaagcatgcggtcggtgaccacgtagccaccaacgacgttcatggtgcccagcacggcggccaggaagatgaacacgtaggccagtgggctattggcttcggctgccacgatcacaacgccgacgataacgatgccgtggatggagttcgcgccggacataagcggcgtgtgcagggtggcgggcaccttgccgatgacctcgataccgatgagcagcgcgaggacgaacagggtaatggaaacgacgagagtaggcatggtattccttcttccttacttctcggacttctcggcatcggcagcagctgccgtggcggcggcgcggccggcaaccaccagcgcgtcatcaagttcttcggtgagatcctggccgagcttgccgtcacgcacgaagtgcacgaggatgtcggccacgttgcgcgaaagcaggttggatgcggtggtggcgacgccggaggccaggtagggagcgccgatcagcttgacgccgccctcggtgatctgctcgccgacggcggagccctcgacgttgccgccgaggtcggatgctgcgcagtccacgatcacggcaccacgcttgagacccttgacgccggctgcggtgagcagcaccgggggcttacggcccgggaccttggcggtggtgatgatgatgtcaaagccggcggccttctcatcgacggcagcctgctgctgagcctgctcttcggcgctcagcgcgcgggcataaccgccctcgccctggcccttggagaagtcaagtcccagatcaaggaacttcgcgccgagggactcgacctcgccctgggaggcgggacgcacgtcgtacgcggtgacgaccgcgcctagacgcttcagcgtaccaatggcctgcaggccggcgatgccggcaccgagcaccagcgccttagccgggcgaatcgtgccggcggcggtggtcatcatcggcaggaaggaaccgtaagcatcggcggcggtgatggctgccttgtagcccatcacggagttctgagaggtcatctcatccatggactgggcgctggaaagcttacggggcaacttttcgatggcgatgcccaccagaccggccttctcgagcgcggccatgtaatcggcatcggtgaaggaaccgagcatgccaatgacccactggccggccctgagcttggctacggtctcggcggacggtcggtccacaaaaccgagcgcgtcggcttcggcgagcacctcgtcgcggctggtcaccttcgcaccggccttttcgtaatcctcatcggtgtattcggcggcaatgccggcaccggcctcaataatcgaggagactccgctcctcttcagccgggtgacgatatccggcgtcaacgcgacgcgggattccgtttcggacgtttcattcaaaacgccgaacaccacggtggcttctgggttttgcgccatgagagccctttcttgttctacttcaaaatggacatggttatccgcatagaaagtgtagtcggaaggtaaaggccatgacttgagattccgccaatcgaaacagaaacgaacccgaaattagtgagaaatacgaatgtgtccatgtgcattgcggatgaattgctcggaagtcgtccaacaatcacccggcatcgatcagcaaccaaccgctcagtaattatcgacaatcaccgtttcgtagctcacggttactcaacaatatcgggacctgtgcaatattttgccacgcactcccctaacccgccagaatcctacggttgcgtaaggtgacgagttcggtttgggcgattacaatttgaactttgagaagcgttcgcctcatggctggacgacactgaaaggtttacaggagcaagacttgtcggttatcaattccttcacgcagcacactatcaatctcacccgtaaggcgctcaggttgggatccgacttcgtccacccggtccacgacgacaccccggacgagcccgattacctgtctaacgccgacgtgccggtcgagaccaatatcgctttgcctcacagcgacgattgggacgacggccacctgaccgtcaccgacatcgaccccgccaccggcctgctcaccacctccaccgaaggcaatccgccgctggacgaaggtacgtccatctacgacctgtatgcggaccgcgccgaacgtatgggcgatgagccgctgtacacctacaagtccggcaacgattgggtgaccgtcaccgccaacgagttcctggctgacgtgcgtgccgtggccaagggcctgattcattacggcctgaagaagggcgatgccgtggcattcatgtgccgaacttcctacgactgggacctgaccgacgcggcgatcatggcgtgcggcggcgtgctcgccaccatctacgacaccgattccgccgagcagattcgcaatatcgtcaacaactccgatgcccgactgctgatcgtgcaggacacggacatgcgtaagaaggcggatgggtccgtcgaagagtgcccgtccctggagcacatcatcaccatcgagaccggtggcttggacgaaatcaaggcctacggcaccacggtctcggacgaggagctggacgagcgcatcgattcggtcaagaagaccgacctgtgctccatcgtgtacacctccggttccacggccgcgccgaaaggcgtggaaatgacccatgagcactactgccagaccgcgctgaatctgccgacctacatgcccgatctgctgcacgacaagaggaacaccatcctgctgttcctgccgcaggcccattccttcgcccgcgccatcaactacatcgtcgtctcctcgaacgtccgcatctacatcgccaccggcatcaagacgctgatcagcgatctgcaggtggccaagcccactctcatgatcgtggtgccgcgcgtgctggagaaggtgtacaacgccgcgtcccagaaggccggacacggtccaaagggcgtggtgttcgcctccgccgtggtggccgcgcagaactatatgaaggaagtctccgccaatggcaaggcaggtgcactgacccgcactcgccgcgctgccttcgatccgattgtctactcttcgctgcgcgaagtgctcggcggtcgcgtcaagtggattgtggccggcggtgccccgcttgacccggaactgctggctttcttccgtggcgcgggtgtgcctgtatacgagggctatggtctaaccgagaccaccgcaccgtgcgcgttcaacccgctgggtacgccgttccacgctggttccgtgggcatcgcattccccggattctccctgcgcatcgccgaggacggcgaaattcaggtcaagggtcgtgccgtgttcccgcgctatcacaagaacgacgaggccactgagctgtcgttcaccgaagatggctggtatgccaccggcgacttgggccgtatcgacaacgatggcttcctgtacatcaccggtcgcaagaaggatctgattatcactgcaggcggcaagaacgtctcccccggcccgatcgaggaggtcatccagcgttgcgagatcgtctcccaggcgttggtgctgggcgacaaacgcccgtttatctccgccctggtgacgttggacgagaagtcgttgcgcccgtggctcgccgccaaggggcttgacgagaacatgtccctcgaggacgcggcaaggaacgccgccgtgcgcgccgaagtgcagcagtgggtcgatcgggccaacgagggagtctcccgcgccgaatccgtacgcaagttcatcatcctgcccgaggagttcactcaggagaacggcctcatgaccgcttccatgaaggtgattcgccccaaggtcatcaagcgctactccaccctcctcaacacccagatgtacaccaagaagaagtaaggaggactcgagtacagcaaaagggagattccattggaatctccctttgttataaccggtcgaaggccgattcctagaagccgaggcgttctagttgcttggggtcggactgccagcctttggctaccttgacgtggaggtcgagcttggctttttggccgacgatgcggttgaccggggtgcgtagcttcttcttgacgtaggtgaggttcgaggcgcccttgccgatgatgatcggcttctgtgagtcacgctccacgtaaatggacacgttgacctgcgccttgccgtcatagccctgaccggtctcgttgtcttccggatagtcgatggaatcgaccaccacggccagcgaatgcggcagctcgtcgtccagggtctcaaggaacgcaccgcgcacgagttcggcgatggtgtcttccggacgctcctcgctgatctgatcgtccgggtacatctgcgggccctcgggcgtgtgctcaatgagcacgttcttcacttcagccagattgtcgtgcttcagggcgctcaccggcacgatgtccgagaaatcggcgaaatcgttgatttcgatgagcttgttgatgagttgctgacggccaagctcgtcgatcttggtgacgatggcaatcagcgggatgcgccacttgaacgtaccgtcctcacgcttggtggcgaagtcggtacgcagtcgggaaagaatacgcttgtcgccggggccgatttcctggtcggcgggcagcaggaaggccaccacgtccacatcggccaaggattcgtcgaccacgtcgttcagacgctggccaagcaacgtacgcgggcggtggataccgggcgtgtccacgagcacgagctgcgcgtggtcggcggtcaggatgccgcgaatcgccttacgggtggtttccgggcgagaggatgcgatggcgatctgcttgccgatcaacgcgttgatcaacgtggatttgccgacgttcgggcggcccaccacggccacgaatccggagcgatacggcacgtcctgcttggtcacattctccgtttcaccggtcgcgtcgacttcggcaacgccggcaacatcggaagcatcggtgacgtcaatgtcatcgacgtcgttcgtgctgttgttctggtcggtcatatcactccttgctggcggtatcatcgccttcgacgggctcgccgtcagtttcctcatgggtcctgctattttcctcgccgccctcgacgtgcgccggttcgacgacgatggtggacaccttcttgcggcgtccggcggagtccacggcggtcagtcgcagaccgcgcgtcacggccgaagcaccgacaatcggcacgcggcccagaatcttggtcagcaggccgtacacggtatcgacatcgtcctcatcaatgtcgatctcgaagatctcctccagatcggcaatcggcgtacgggcgggcatcttccacttgttgtcgccgattttctccggctcggtacgctgggtgcggtcgtgctcgtcttccagctcgccgacgatctgttcgatggcatcctcgatagtcaccatgccggcgatgccgccatactcatcgaccaccacggccacatgttggcgggaacgctgcatctcatggaacaggtcgtccaccggcttggattcgggaacaagcagcggctgccggacgatggattcgaccgtgcgctccatggccgccgggttgaaggcggtggcgcgcacggcgtccttcaaataggccacgccgatcaggtcatccacatcctcaccgatcaccggcacgcgggagaaaccggagcgggagaacagtttcagcgcggaagacagtgtggagtcgcgctccatgcagatcatatcggtgcgcggcaccatgatctcgcgagtcaacgtatcagacagggtgagcacgttgcgcaacatttcggagacttccggatcgaagtcgttggactccaccagtcggtcgatggcggccttgccctgctcgagctgaatcttctcaagctcctcgtcgtcggacagatcggagtccttggagcggcggcccgaccccttggaaccggacttgtcgccaccgatgcgtgcgaacggcgtgagcttggtggccaacgacacgatgcgcgagttggaaatcatgatgtcgaccggcttggtcatgccggcggtgcgcgggcggaccagtacggagaccacggctacgataatcgcgaacaggaatccggcgagcagttcaacccacagttccgcaccccacagggatgcgatggaagacaccagtacgccgtcgagcacattgcaggcgatgcggaagaacgcacagctgccggcggtggcgtaacggtcggcgatgagccgttgcacgcgatgaatcttgtcgatcttcttcatcttgaggaactggcttgcttcggagtcggtctgcacctcgaggatgagattgttgaggctggctcgcgttacgcgggccacggcaccttcagcggcggccatggtcagcgaaagccagacgaacagggccgccacaagtacgagaatgacggtgacggcgatcagcgtggtactggaatactccataatgatttttcggtgtccttgaatgtccttgaacggtagagaataatccgaatttggtgtgattgatttggaagtttatttggaatcgaggtcgcggccagcaccgtgcgcggcgtcgtacagggccagcgcgtcgggtgtgccggcgggcagcgtggcctgcacgttggcatcgtggcgcagggcgaagaaggtgagcagcagctgtcgctgcaggccgaacatctggcgctcctgctcgggggtcacgtggtcgtagccgagcaggtgcaggatgccgtggatggtgagcaatagcatctcctgcatggtgctgtgcccggctgcggcagcctgttgggcagcgacccacgggcagatgacgatgtcgccgagcactccttccatcatggttttgccgtcgcctgggcgcagctcgtccatcgggaagctcatcacgtcggtcggaccttcgaggttcatccaacgcatgtgcagttcggcgatgggatcgggatccacgaacatgatggtcaggtcggactgggtgctcacgcgcatctggtcgagtacccaaatacccaaatcggagaagaccttggggtcgatgacccactgggtttcattggtgacgtcaacgctcatcgtctgtctcactttggttggttgaatccgcttgctggcgggcatcgaagtcggtatggttgcggcggcccttgcgttcgatgtcgcggtggtcgccggcgatggcggagtgacggtcgtaggcggccacgatctggccgaccagctggtgacgtaccacgtcctcggttttgagatgcacgaatgcgatgtcgttgatgccgcccaggatgcgttcgatggtggccagtcccgagcgcggcacggtaaggtccacctgcgagatatcgccggtgatgaccatcgtggtgttgaagcccagacgggtcaggaacatcttcatctgctgttcggtggtgttctgagcctcgtcgaggatcacgaacgcgtcgttcagcgtacgaccgcgcatgtaggcgagcggcgccacttcgatggagccgtcgtccatgtaccgcttgagctggtcggcgccgagcatgtcgccaagcgcgtcgtacagcgggcgcagatacgggtcaaccttgtcgttcagcgtgccgggcagaaagccgaggctttcgccggcctccacggccgggcgcgtgaggatgatgcggcgaatctgcttgtcctggaaggcacgcacagccttggccacggccagatacgtcttgccggtgcctgcgggaccaatgccgaaggtgatggtgtgcgattcgatggcgttcacgtaggccacttgtccggcggttttcgcacggaccggcacgccggcggcaaaggtgatgacgccgggaaccgtgggctttcggtacgtcgggtcgtgggagccggcagaacgtgcatgggcgcgttcgtttgaggtcgattgcgccagtttgtcatgcaccgggccgtgacctggatgttcgaggcgcacgtggttcttgagcacgttctggtcgagcatgcgacgcacggtgtcggcgtccataggcgcggtgtaggcggcttggatgatggtgttgaccaaatcctcggcctgtgcggcctgggcttcggtctgcttggagcgggagacgatcgccacgcggttgccgcgcacgataatcgtcaggtccggaaaggcgcgctccacctcgcgaatgacctcgtcaaccgggccgagcacggcgacggggtcaagttggggcgggatggtgatggtacgtgtagtcgttgccacgaagcggatattcccctactactcgtcgagcttttcgccggtcatcacgtgcgcgtgcacgtggaagacggtctggccggcgtcgagaccggtgttgaacaccagtcggtaggcgccgtgaaattccttgtcggcgatgttctgcgcgatggagacgatgtgggccagctcggtcgggtcgtcggcggcaagttcggcgacgttggcgtagtgcttcttgggcaccacgagcacgtggaccttggccttggggttgatgtcgttgaatgcgtaggtcgtctcgtcctcgtagaccttgctgctgggaatctgccctgcgatgatcttgcagaacaggcaatcgtcggattcgctcatcatgctccttggtttgatgttgctacgcaccagcttagcgcgtgggcgttactcgtaacgtcccaacacccgagacaacagcgacaacgctacaggaccggccgtcgcggctctcagaatattgtgccccagtacgcagctcaccgctccggccttgacgaaatcagctacctcctgctcactgatgccgccctcaggcccgaccaccacactgacagtccgcggccggccgtcctggagcgtgcgttccaccaactgcgtaaccttctcctccacgccggaccacgtatcggtagcatcctgatgcagcacaatcaccacatcgccatgcacgcaggccctgcggcagatggccacgacctccttgctggacgcgcacgcctccagttgcggcttaaaagcgcgccgcgactgctcggtggcggcatccagtaccgaattccacttcttgtccgtacggccgaccttccacttggcaatggatcggtccgcctgccatggcaccacttggtcgacgccaatctgcgtagccatatcgatggcctgctcatcatggccggttttcgccaatgcctgaatcagcgccaaacgggtgagcggctcgggttcgcgccccacttccacaacttcagcaagtccggcttcaggatcggccatcactgcctggattctcaagccgttgccgtcggaaagttgcaggccgtcccccgccttgagtcgcatagcctgcacagcatggcgcttgatgtgcgcgggcagggttagcttccagccggcgtgaagttcgtcgctgttcaccgggacatcgtcgacctgcgggtcgaaaagaaaaagggcatcagtcatgacttcaaggctacacgcgacacgccgggcacacgcgcgaattgcatccctgtaatttcatgctaagctatttactcgttgtccaaacgacacctgcccgggtggcggaatggtagacgcgctagcttgaggtgctagtgcctattttatacgggcgtacgggttcaagtcccgtctcgggcacagataaaccccttgcattgcaaggggtttttcgttatctgcacacacgaaaggccaccaatgcagttcatcacgctggacaccgttgacgacccgcgcgtcgaagcgtatgtgagcctcaccgaaatgcagttgcgcaatcgcttggaaccagccaagggcgtgttcatcgccgagtcccccaaggttatcgaccgcgcgctggccgctgaccgcgaaccgctgtcactgctggtcgaggaaccttggctggagggtatgaaagacaccttcgacttcatcgacgggcgctggggcacggacattcccgtctacgtggcctcacctgagcagctcaagcgactgaccggctatcgtctgcatcgcggcgccctatgcgcgatgcgacgctggccgctgccctccgtagccgaggtctgcaggagcgcccgccgcgtggcagtaatggaaaacatcgtggaccacaccaatgtgggcgcactgatgcgttcggcggccgcgctcgatgtggatgccgtgctggccacaccctcctgcggtgatccgctgtaccgacgagccgctcgtgtgtcgatgggcaccgtattccagattccgtggacccgtatcaccgggttcaacgacgacggtaccgaaaacaagcattactggccgttccagggcatcgacgagttgaagtcgctgggcttcaccaccgtggccatggcattggaggatcgttcgatttcgttggacgagctgacacgccgtctgcacgcgcctgccgaagatccgacgcatatcgacaagctcgcgctgatcttcggcaccgagggcgacggcctgtcccaccatacgattgcccgcgccgatttgaccgtgaagattccgatgagccacggcgtggatagtctgaacgtggcggcatccagcgcagtggcgttctacgcgacacgctaaggaatcgcacgcgctccgaaaaggccggatccttaaacaaatctacgaaactgttcatcgcaagttcacggcacgcgggggggaaagccttgcatgttcgaatttttctgcaattattaactatgtaaaccgaatgcaaggaagcatccggcccagcagtgcggtgtcgaaagacgctcagtaacagagaggacagttacgatggccaagaatcccaagattctgtcgattgtgcttgcaggtggtgaggggacccgcctgatgccgttaacccgcgatcgcgcgaagcccgccgttcccttcggtggtgtgtatcgtctgatcgatttcccgttgagcaatctggtgaactccgggtaccgtcaggtcgtggtgctcacccagtacaagtctcactcgcttgaccgccacatctcccaggtctggcgtttctccccgctgcttggctcgtacgtctcccctgtgcccgcgcagcagcgtctcggcaagcactggtacctcggctccgccgacgccatctaccagaccatcaacatcatcgaggacgtccagccggacatcgtggtgatcgtgggcgccgatcacgtctaccgcatggacttcgagcagatggtacagcagcacatcgagtccggcgccgagttcaccgtggccggtatccgccagcccatcgaggaatcgaaccagttcggtgtaattgaggtcgatcccgatcacccgaacatgatcaggaacttccaggagaagccggccaccaccaccggtctgccggacaatccgaaccagattctggcttccatgggtaactacgttgccaacaccaaggccctgttcgaggctctggctctcgatgagaaggctgccgacaccaagcatgacatgggcggcgacatcgccccgtacttcgcttcccgcaacgaggccggcgtctacgacttcaactcgaacgagattccgggttccacggtcactgatcacgcttactggcgcgacgtcggtacgattaagcagttctacgatgcgcacatggatctgatcgcctatgtgcccgagttcaacctgtacaaccaggattggccgatttacacgatgtccggcaacctgccgccggccaagttcgtgcacgccggccgcgaccgtctgggccacgccaccgattcgatcgtctcccccggtgtgatcgtctccggcggtgaagtgcaccactccgtgctctcccccaatgtgcgtatccactcgtgggcacagatcgtcgattccgtgctgttcgacggtgtaatcatcaaccgccgcgcccgcgtgtacaaggcgattctcgacaagaacgtggtcctgaccgaaaactccactgtcggcatcgataccgagcacgatctggcccgtggcttcaccgtcacgccggacggcattacggttgtcccgaagaacaccatcgtcgatgactgattgaccagtccagacttggaaaagccccgcatcatgcggggcttttctcgtatagagctccctcatcagagggagcttactaagcgctatcagtactttggcatgttgtcgaagttgaagccaagggcggcgagctggtcgcggccttcgggcgtgatgcgctccatggtccagcgcgggtcccacgtccagtcgatgcggaactcctcgaccagaccggccagcgtggatgcgcattcgtcctcgataaggtcggtcagcgggcaggccggcgtggtcagcgtcatcgtaataatggcgcggcctagctcatcgatctcaatgccgtagaccagacccaaatcgatcacgtcgatgccaagctccggatcaatcacctgatgcagtgcctcgcgcacgtcttcggcagtggcgcggccgatatcgtcaatcgccttgatcggaatctcgctgccatcggactgttcgtcatcccggcaaccgcatttgccatggtgaccgccacacgcacaggtgtcatcgccggacgcagcagagtgctcgatcgggcgtccgttcgggaagcccttggccaaggccgggttggccatcacgcggcgagcggcctcctcgtcctgcaggacgccgttgacggcatcgaaaacggacggctgtggttcgggaaccaaattatcgttggacatatttcctcagttctttgcagcgagggctttggcgatggagtccttcagcccttcccagcctagcagagcgcatttgatgcgcatagggtatttcgacacgccttggaataccacggcgtcgccgagcttttcttccaggttctcgtcgtccagacctgcaccgcgcgattccatcagcttgtggaatgtctgttccagacccatggcctcgtccacggttttgccgtccaccagatcgaccatcaccgacaggctggcctgcgaaatggagcagccgtggccgtcccacaccaatcgcttgatggtgtgcggttcgtcatcggagacttcgacatggatggtcgcctcgtcgccacaggtcgggttgaactggtgcgattcaccgggcgtgcagtattcgtggctggcttgcacggtgacattggccgccgcgtccgcggactgttcgaccgccgcgttgggcgcaaaggattccttgccatgcggatgttttgacgcctcgaggatgacctcttggtacatctgttcgaggtcatccccgctcataccgaattcgttcatggtgttctgttttactccactccaaagaacttacggatgcctttggccgcttcgaccaatgcttgggcatcttcgaccgaattgtagacaccggaggaggcacggttggatgcgtataggccgaagtggcggtgcaccggctgggcgcagtggtgtcccacgcgaatcgcgatgccctgggcgtcgatgaactggcccacatcgtgcgggtgcacgccggccacgtcgaacgccacggtaccgatgcggtccacgttttcgcgcggtccgaggatgcgaatgccatcaatgtcgccgagcttcagcagttcggcggcgatggtcttctcatgggcctcgatgttctcgagcccgatgttcatcatccattcggcggcgacgcctgcggccaccacttgggcgaccggctgggtgccggcctcgaagcgggccggaggggccatgtattgggcttcgtggtccatgtaggcgagttcgaccatggagccgccgaagttggccggcggcagggcttcgagcagttcgcgcttaccgtacaggaaaccgacgccggtaggaccgtacatcttgtgcgcgctccaggcagcgaagtccacatcaagcgcatggaaatcgactttgaggtgcggtacggactggcaagcgtccaagatgaagatcgaacctacttcatgcgcacgcttgatgataggggcgatgttggtgatggcacccgtggtgttgcccacgtgggtgacggccacgaccttggtacgctcggtgatgacttcgtcgaggttgtccgtacgcacacggccgtcctcggtcaggtcgatccacttgaaggtggcaccggtacggtaggccagctcctggaacggcagcagcaccgaatgatgttccgcgcgcgagacgacgatctcatcgcccggcttcagggcaaaacgcttggcggcttctcccccccggcccagcgacgcattgccgaacgcggtggcgagcaggttcagtccggccgtggcaccaccggtgacgacgacctcctcttcaccttcggccgtattcgcgccaacgagcttggcgaccttggcacgggcctcttcgaaggccatggtactacgggccgccagctcgtgggcaccgcggtgcacaccggcgttaatcgtacgataaaaatccgcctcggcgtcgatcaccgcattcggcttctgcgaggtggccgcggaatccaggtacacgagcgggtgcccgtgaatctcctgattcagaatcgggaactcgccccgaatctccttaaaatcaaccattatgttcccctacttacgtaacaattgtacgaaacgagtgggagtctgacatggcctgttcgtgaccgtaaagacttggcctagcggcccggagcgtgtcgagaatagggcatgtcagactcccacggtcacggactcaggccagcgcggactcggaatcagcaccctcgggcaggtactggtcgtagccgttctcttcgagttcatcggccagctcagggccgccggtcttgacgaagtggccgtcggcgaacacgtgcacgatgtccggcttgatgtacttcaagatacgggtgtagtgcgtgaccatgaggatgccgaactggttggcttccttggcgcggttcacgccttcggacacgatgcgcagggcgtccacgtccaagccggagtcggtttcgtcaaggatggcgaacttcggcttcagcagttcgagctgcagcacttcggcgcgcttcttttcaccgccggagaagccttcgttcacggaacgggaggcgaacttcgggtccatcttgaggcgcttcatggctgcggacaggtccttggcccactggcgaataccgggagcctcgccgtcgatttcggtcttggcggtgcgcaagaagttggtcatggacacgcccggtacttcgaccgggtattgcatggccaggaacaggccggccttggcgcgctcgtccggagtcatcttgaggatgtccttgccgtcgaggagggcctcgccggagtcgaccacgtacttggggtggccggccaacgtgtaggcgagagtggacttgccggaaccgttggggcccatgatggcgtgggtttcgccggagtggacggtcagggtggcacccttcaggatcggcttgatgccttccttggtttcgacgtggacgtgcaggtccttgatttcgagtgttgacattgttgtgctcctaaaaatgctgttcttacttgtcttcgaggacctgtgccatggcgtcgttttcgccacgggccagtcggcggtcaatcacggtcatcagatgttcggagatggcaggaatgccgatctcctcgacgagttcgccgaagaagccgcgcaccacgagcttgcgggcgtcggtttcggggatgccgcgggattcgaggtagaacagttcctcgtcgtcgaagcggcccaccgaagaggcgtgaccggcaccgatgatgttgccgttttcgatttcgaggttcggctcggaatcggcgatggcacccggggtcaggaccaggttgcggttgagctcgtaggagtcggtgccgggggcggtgggctggatgagcgcgttgcccacccaagtggagtgcgcgcccttgccgtcaagcgcgcccttgtagaccacgcgggacttgcagtcggggtggttgtgtaccaccattgtgcggtgctcgatgtgctcgccggggtccacgaagtagatgccgagcatgttgaggtcgccttgttcgccgccgaagtcctgatccatgcggatgcggacgatgtcgccgcccaaggtcacgacggagtggcgcagggatgcgcctttgccgacgtggatgcggtggttggccacatgcttggcggttttggcccattcctgaacgaacgtggtggagacgtgcgagtccttgccggtggtgatttccacgccttcggccagtcgtgcgtcaccgtcgtgttccacgacgacgtccgcatgagccttgtcggcggcggcgatcaccagatggaaggcgtcgaggtcctcccccgcgccgtgcaccttgacgagcacgggctgggagatctcacctgacagttccagaatggttgcggtgtggccggattcccattcgactgcggagacgcggtcgttgggcttggacacagtgccggacaggccctcaccgagcttgatctggctgagcttcacgccttcggccaacggcgagccgtcaatcatggagacttcgatctgcgtttcgccggaaggcttgaacacggtgaagaactcgttgatgcgctcgataggcgtgtagcgccattcgtcctgcttgcggctgggctccgggtagtcgcctgcgttgaacgagcgcacggcatggtccacggaggacggcatggcggccggaatcgcgtacgggtcgttggggtcggcgaccggaatcttgatttccttgacgggtgttgtgttgtcggtcatcggaatcagcccaccgatccttccatctgaagttccacaagtctgttgagttcaagcgcgtattccatcggcagctcgcggctgatcggttcgacgaagccgcgcacgatcatgcctcgcgcctcttcctccgtgagtcctcggctcatcaggtagaagagctggtcttcggagatcttggaaacggtggcttcgtgggccatcgagacgtcgtcttcgcgaacgtcgacgtgcgggtaggtatcggagcgggagaagtcgtcgaccagcagggcatcgcacacggtcgagttggacgaaccgtacgcgcccttgacgattttgaccagaccgcggtaggcggagcggccgccgccgcgcgagatggacttggcgacgatggtggagctggtgtgcggtgccaagtgaatcatcttcgcgcccgtgtcctggtactggcccttgccggcgaagccgagggacatggtggatgccttggcgtacggttcggcgaggatgcaggccgggtacttcatggtggccttggaaccgatgttgccatccacccactccatcgtgccgccctcacgcacgtaggcacgctgggtgacgaggttgtagacgttgttcgaccagttctgcacggtggtgtagcgcacgcgggcgtgcttttcgacgatgatctcgacgatggcggcgtgcagcgagtcctcggaccagatcggggcggtgcagccttccacgtagtgcacgtaggagccttcgtccgcgatgatcagcgtacgttcgaactgacccatggccggggtgttgatgcggaagtatgcctgcaacgggatgtccacgtgcacgcccttcggcacgtatacgaacgagccgccggaccatgccgcggtgttgagggcaccgaacttgttgtcttccggaggcacgacggtgccgaagtacttcttgacgagttcagggtattcgcgcacagcggtgtccgtgtcgacgaagatcacaccctgcttcttcaggtcctcacgaatggagttgtagatcacctcggactcgtactgggcagccacgccggagacgaggcggttcttctccgcctccgggatgccaaggcgatcgtaggtgttgcgaatgtcgtccggcagctcctcccacgacttcgcctgcttctcgatcggcttgacgtagtacttgaagtcgtcggcgttgaagccggagagatccacaccccaatcgggcatgggcttttcgaggaacgccttgaatccacgcagacgcatgtcgagcatccactgcggctcgcctttgtcggcgctgatcgcgcgtacgacgttctcatcaatgcctcgttttgcggcttcgccggcggcatcagaatcatgccaaccatagttgtagtcgccgaactggctgatgatctcgtcatccttcttgatcttgtcctcgttgacgcgggtacgatcagccacatactggctcatctccacgtcagcggcggcgtttggtgctgtgttttcggtcaccatcctgccttccttgtatcacacttaatcctatgaaaacctagcagaacccaagtgcaaacactagctgccctgacgcatattggctgtgggcttgattacatgcgggcgccatcgggccatgcggcatcacggatggcgccaaacggcgaaggcgtggcggcgaagcatcctgagatgccgtgccgtcacgccttcatcgtgcgcggaccgaccgcgcgggatccacggtcagcgggccgcctgatggccgagcgcggccttgaccagaccggcgaacagcgggtgcggcttggtcgggcgagacttgaactccgggtgagcctgggtggccacatagaacgggtgcacgtcctgcggcagttccacgaactcggtgagctcgccgtccgggctctggccggagatgcgcaggccgccttcacgcagacgatccttgtaggccacgttgacttcgtaacggtggcggtggcgctcggtgacatgcgtggtgccgtacagttcggcgaccagcgagccttcctccagctcggccgggtaggagccaagacgcatggtgtggcccatgtcgcccttgccggccacgatgtccttctgctcttccatggtggcgatcaccgggttggcgcaatcgggctcgaactcggaagagttcgcgtcttcaatgcccagcacgtggcgggagtattcgatgaccatggactgcagaccaaggcacaggccaagggcgggcagcttggtttcacgggcgaacttcagggcgccgatcttgccatcgatgccgcggatgccaaagccgccggggatcacgatgccgtcgacgttgtcgagagcggcggccgcaccttcggtggtttcgcaacggtcggccgcaacccacttgacgttgaccttggcccagttggcaaagccgccggccttgatggcctcggtgacagacaggtaggcgtccggcagatcgatgtacttgccgacgatggcgatgttgacctcgtgcttggggtggtggacgcgctcaagcaggtctgcccattcatcccaatcgacatcgtggaacggcaggccgagctcacgcaccacgtaagcatcaaggccctcttcgaacaggatcttcggtacatcgtagatgctcggcgcatccacgcagttgaccacaccttcggcatcgacgtcgcacatcagggagatcttgtctttgatggactggttgagcgggcggtcggaacgcaacacgagggcgtccggggagatgccgagctgacgcagcatcatcacggagtgctgggtgggcttggtcttgagctcgtgggcggcggaaatgtacggcaccagggaaacgtgcacgaacatgcagttgtccgggccgagatcgcggcgcacttcgcgggcggcctcaaggaagggctgggactcgatgtcgccgacggtaccaccgatttcggtgatgatcacatccacgtcatcggaagcctgggcgcgcatacgagacttgatttcgttggtgatgtgcgggatgacctgcacgcactggccgaggtattcgccggcgcgctccttgcgcagcacttcctgatagatctgaccggtggtgacgttggccttctggctcaggaagacgtcgaggaaacgctcgtagtggccgatgtcgagatcggtttcggcaccgtcttcggtcacgtagacctcaccatgctggaacgggttcatggtgcccgggtcgacgttgatgtacggatcgagcttttgctgcagaacatggataccgcggctgcgcagcaaacgaccgagcgaagatgcggtcaggcccttgccgagagaggagacaacgccgccagtgacgaaaatatgcttggtgacgtgttcttgagaattaccatgtgttcttctaaccatggaattccactctatcatccgtgtatgacccggcgtgttcatgacgtggccggtgtagtcgtgcgtaggcagcccatctcgttctgccttggccagcatatggtcgaatacacggcgcacttcaggtccatagggcgcaccaggacgaggattctggtccgattcgtcggaacaggaatcccgggcgcaacgtcgactgctacccgtgattggctggagggcttggttctattcgctcagcaagtgcgccacagcatcgagcgcgagcttgtagccgtagaaacccatgccggtgatggtgccggtggccacagggctgattacggaacgcttgcggaactcgtcgcgggcggacgggttggaaatatggacttccataagcggcaggttctcgtcaatgaccatgtgcgcggcgtcggcgagagcatacgaatagtgcgtgaaggcggcgggattcatgaccaccggggttttctcgtcggcggcttggtgcatccagtgcaccatttcggcttcgtcgtcggtctggcgcacctcgacttcgaggccgaggtccttgccccattcggcgcagagcttgcgcagggtgtcgaggtcttgacgaccgtagacgtcgggctggcggacgccgagacgtccgaggttagggccattgacaacaatgactttggtcattgggactccttttgtttgtgcttctctccctccgccccttcggggcacctccctcatcagagggaggtagaaggtaaatccgactccgggacacctccgttagaggggagccaagtacttttctgaggggatggcgaacggcacggcctacggccgttcaattactgctggatacgacggaatgcttcttctacggcttcggcgggcgggttgtcgaggtgtacgacgtgaccaatctcgtcgaggaccacgaaacgcagttcgttgccacgggctttcttgtcgcgatgcatcaatgcgagcacgtcgtcgaacgagctgccattccacgacgtcggcagacccagcgaagcgagcaacgaacggtgatagtcaaccagatcctgatcgatgtaaccgatcagatgggccagctcggcggcatacaccataccgacggccaccgcattgccatgcctccagcggaagtgctcgagcttttcgatggcatggcccatcgtgtgcccgtagttgaggaattcacgcagacccttctccttcaaatcggaggagacgtggtaggccttgacctttaccgtgcgctcaatgagctcggcaaccacgtcttcgagcggcgagccgaggaatgtagagccgtcgaaagcgcgcagttcagctgcgtggtcttcgaggatatgcaggatttcggggtcgcggatgaaaccggatttggcgacttcaccgagaccctcaatgaagatgtcattgggcagcgtagccagcgtcttggtgtcggccagcacaccggcaggcgtgtagaacgagccgacgaggttcttgccctgcggggtgttgatgccggttttgccaccggtggaggcatcgaccatggccagcagcgaggtcgggcagtttacatagcgcacgccgcgcatccacgtggcagccacaaaaccggccaaatcggttgcggcaccgccgccaagccccaccacggcatcggatcgggtgaaaccttcgttgccaaggcgttcccaaatgccgttggccacggtaatggtcttgccgggttcggcatccggaatcacgatgtcggaaacctcatagccgccctgacgcaacagggcgcgggcacgatcggagtgtcgctgcaccggctgggtatggataagcgcgattttggcgggcttgggtcccagcacgtcgaccagatgattcatggcaccttcgccaatgaccacatcatacggctcaattgccgatccggtaacatgcactgctcgctcagataccatatcaatcactttcttcgctgcgccctgaggcgtaagcccccgggtatggacatgaacgttggcgacctcgcggaataccgggtcacgctgcttgaacagtttcttccaacgggagttggcattgccattgagcatgggccggcctcccccgcggttcgcgcgttccatggcctccgccggatcggcgtcaaggtagaccacacgaccgccatggtcgatgtatgaggcgagggcatgctgggtggatggcgtcatgggagcgccaccgcccagcgaaaagataccgtcgaaatcctcaagcatatcggcgatgagatcggcctcgacctcgcggaatgccggctcaccgtattcatcgaagtag

SEQ ID NO: 227 - DNA, 58493 bp, Unknown
  R101_18m  MAG No. k141_33436
gccgagcgcgaggtaggccagttcccggatgtctccaaggaagaggcgttggcactgtacgcccgtcgtttcctggatctcaaggccaagctcgatctgctggccacccgtctggcttccccgaacatcaaggcccgtgaaatcgacgagtccgtgaagctgctgggcgaagaaaccgccgaaccggcggtggtgggcgacctcgcggccctcaaggcccgttacgtggaactgaaggccgccggcgaggccaagaaggccgagatcgccgaagcgcgcaaggccgctcaggccaaggccgtcgccgagcgcaccaccatcgtcgagaaggccgaagctctggcggcctccctgggcgacaacaccaactggcgctccaccgccgacaagttccgcaacctgttcgacgagtggcagaaccaccagcgcaccaccgtgcgcatcgacaagccggaggccgaggcgctgtggaagcgcttctccgccgcccgcaccaccttcaaccaggctcgccgcaagtgggctcaggctcgcgacaacgagcgtacagccgccaaggaagccaaggaagcgattatcgccgaggccaatgagctcaaggattccaccgcttggggtgagacttcccgcaagttcaacgatctgatggaccgttggaagaaggccggccgcgctggccgtaacgaggacgacgagctgtgggccaagttccgcgaagccgccgacaccttcttcaacgctcgtcaggctgatcgcgatcagatcaactcctccgagaaggagaatctggctgccaaggaggctctgctggtcaaggccgaggctctggtgccggtgaagaccgacgccgaggccaagaaggcccgccaggagctggccaagattcaggaagagtgggatcagatcggttacgtgccgcgtgacgatatgcgccgcatcgagaaccgtctcgacgccgttgacaagcagatcaaggccatcgaggatgccgcttggaagcagaccgacccggaggccgacgcccgcaagtccagcttcgaggagcagctcaacgcccagctcgccgagctcgacgccaagatcgcggccgaatccgacccgaagaagaaggccaagctcgaagccgagaaggccaccaaggagcagtggctgaacgccatcaagtaagggtctcgtgccaggttcccctctgagggaagccggcagcaaggctgactgaggggagtttacggttataccgcaagctcccctcagtcgcctacggcgacagctcccctcagcgaggggagcttcgtcatatttatgccgttttcttctgccctatactcataactccaccccatagttcctcagtcacccagcaattggtgtcttacgcctgagtccctaccggtgctgcaacaattgccgtgagcccttgatgtgcggccagatattcatgcaacggctggctgtatggcatattcagctcgccgtaattggttccggcacggaaggcggggtaactgtcgccgccctgaagcagatatgaattggatgcgataatcaccaggtcatcgtccgcaatcggtcgaccgtcaacggcgaggttcacgatacgaaccgccgcatgttcgtcggcagcacactcgtcagcgtcagcgttggtatcagcggcggcatcggcattgccgctcccaccggtcgtaccgcattcggcataccgatacgtcacgttcgaggagatgccgagccagcgccgctccagtcgcccatcgtcacggtggaattgctcggcgagcactctcttcacatcgcgcccggtgagcgtctcatgcgcggccttgaactgcaaggccatgagactatccacctcgcgcacggtgactttgccatcgccattcatatcaagccgtggagtccgcagactgccattattcgaaaatccgattaccggcaaacgatttccggcatacacatgcttcatgattgactcgcggttcgcgtccgccaccagcacaccgaccgtattcccgtgcttatccgaaccttgtttgtcgaaattcacgccggaggccaaggtgccaatcaccgcgttgccggcatgattcgaatatgttgccgccgcctggtaaatatgctgagcgcgcgatacctcatcgttcgcctcagcaccggcagacatccaagcggcttgcgccggatgcgcattaagcccttccacgcccagcacgccgtcaaccgccgtatggctggtgccattgccgaggtccacatcggccactcgcaccgtggcgcgacgcccggcaccggtgatgatcaaatcctgcacggccatattccgcccgaagctgcccgcctcgtaaataggcgcgccaccagcggtcgtaccacgcttgatcgcgtgattgtggccggtgtataccacatcaacatctcgcccaatatcggcggcggctgaggcatcggcgtgcagcaaggccaccaccgcatccacctttccggagcgtttgagttcacaggccacgcgattgatcgcgtccaccgcccgttcgtcaagatcggcatcacgcgtaatctgcggagtggctaccgagccgagcgcatcagtaagggcgcccacgaaaccgatccgcttgccgttcaccgttcgaatcgtagagtcacgtacatggctcagcagtccgtcaggcgacttactggcggcagacgtgttggcgcacagccagtcgatgccattgctgggatcagcgatgcgattgttgaaatcggcgacaccgcggtcgaactcatggttgcctaccgccgaaatcgtcaatccccacgctttggccatgtccagcgtgggttggtccttctccaccgccgactcatacggggaacctcccaccaaatcgccggtcgataccgggatcatattgccgggattatggctgtcggccacggtgaaggcggtggcgttgtccgcaccacgttcgatatgcccgtgaaaatcagtgatgtcggcgatggtcaccgtacgggtgccggaagatggattatcgccggaaaaaggaacggctcccgtggttcccgcacaagcataaggaaccaccagagccgtaaggataagcgctactgcaccaaaagcgatccccgatcgcttgccggcccaccgccggttcttcatattcctgctcacaccagtcacgctaggatcgtcgattgaacggccatgcctaggaaggcgactctcaggtgaattcttagcggcgtcttgggatgggaaaggcctgaccccgtactatcagggtcaggcctttgcaacccgtgtcactacgaatgcgtcggcaaggggagattactcggcaaattcctcgacgcagatctcagctaccgcatccacgcacgcctcggcaatcaggcggccgcgttcggcgcttgagccggccggattggcgagtccgccgtgagcgggaacgtcaccttgacgcaccgggtagcgtacataggatttcgccgtggcaccggcttcctcgaccatacggtccatgtgcaccagttccggcgcgtagtggagcatcaacgaagtttcggtgacggccgcatgctccaatgcccagccggggaacaccaatccatcgaacaccttgtcgataaccgactgcggaaccgggtcccaccaattggtttccacgatggtggccactcccccggtttcgcgggtgaccaggtcgatggcctcgacgatgaacgcctcgttttcaaaatgcgcgttcatgacgacgatcttggtgaagccatcggcgatgagttcgctcagcacgtcgtgcatttgggtgatcactgtcacgccgttcatgtcgatagtacccgggaacagcggcccgccaccggagagcggcttggacttgtatccgtagctcagggtgggcagcacggtgccgtcgatgcgttccgccagatcttcggcgacccgcgtggcgagtaccgcgtcggtaccgatgggcagatgctggccgtgctgttcggtcgaaccgatcggcacgatgacgggatgagtcttcacctccttgaattccggccaggtcatgtggtccatacggcggttgctacccattgcagtactcctttgggttggtggtggattggatggtcaatgaatacgcccggctccctcgggaaaggagccggagctgaggagatcagatgtgattcagatccttgtcggtgttttcatgggaaagaatcatcgcgaccaaggcgatggccgcaacacccaccatgtaccaggccggggcgatggatgaaccggttagggcaatcaggccagtggcgatgaacgaggccgtaccaccgaagatggcattggccagattgaagctgaacgcgaatccggtgaagcgcacggaggtggggaacgtctcggtcaggtagctggacagggtaccgtcgttggcggtcagggtggcgcacattgccagctcaaccagcagcacgggccagaactgggaggtgttgaggatgaggaaggcaggaacggtgaggacgatgaacgccacgcaagcaccgatgagcaccttcttgcggccgaatttgtcggagatgtggcccatgccgaacaccatgaacacgtaggcgaccaagcagatggtggtgatggtgccggactgggtggcgtccatgccgacggtgtcagacagataggtcggcaggtaggtgagcacggtgtagaagccgaccgcattcagcacgcaggctccgaagctgatgatcagggccttgagatggttgtggaagagttcggcgagcggggcgaacatgccgctcttggaaacgacttggccgtcagcggaggcggcgctcttggactcaagagcatcgttcattgactggtacacgggggaatcggagagcttggtacggatgtacagcacaatcaggccgagcgggccggccagcaggaacggcacacgccatccccaaccgaccatcgcgctggagttcatgttggcggtcatcagcgtggccagcgtggagccagcgagcagaccgatggcggtggacgccggaatcagcgagcagtagatgccacgctttgaggtgggtgcatattcgccgaggaatgtggccgcaccggcatattcaccggaagcggagaagccttgcaccatgcgcagcagcagaagcagaatcggcgcgccaacgccgatcaccgagtaagacggcaggcagccaatcaggaagctcgcaccggacatgaacataatcgagtgggccaatgcggctttacggcctttcttatctccgtagctaccccagaacagtgcgccgattggacgcaggatgaaggatagcgcgaacacgccgaaggtctgcagcatggcgacggtgtgattgtcggttgggaagaacaccagggcgatggtggtggcgaagtacgaataggaggcgtagtcgaaccactcgatgaagttgccaaggaaggaagataccgcgactttcctgaccatggcctgttcttcagtttgaggggtgaaattcatcagtcgtgcagatgtagtaatcgttgcggaactcatgatgtcaccgtcctttcaaggatgtgctgttcgtgtgactgaatgggattcaagtgggaattcgtttcgcagcaggtcgaccagcgccgcgatagcctcgactatgcccttgagtatttgctgaaacgtgaatcgtcgattaacccgttcggcgtagaagtggacaggttgcccagtggtgctggcgcattattcaccatgctgttcttgccatgatttcgtgagtttggcggcgaatagcagcatcgaccagttcggtttgtcgttatagtcgacgccgaccatttgtgtcactttgtccagtcggttgtacagggtttgccgtctgatacccaattgctcgcacgcgccggttttgctatcgaggttgtcgaagcagacgcacagtgtgtccagcaacaacggagaggcggcgacctcgaatccgatggtctgcaccacgagcatgcgcatcgccttgtccatatcagaggatgcgacgaaacggtcgacgagtgcggacatggtacttacgattcgcccgtatgccggttcctgattggcgatgtcacgcaataccgcgaacccgtcgaccagcgtcaccgtgtccaatgccactcggccatgcaccacgtacacaccgtcgccttccagtacggcaagcgcatccatgcaatggcgtccgaatgcggccgcaccgtctgaggaatcggtggtggagcaccatccgaccatcaagtcaccttccagcatgcaggagacggcgcatcccgaccgttcttcgaaccgttcgaccatcgtcgatacatggttgatgccttccaccaccgatctgaaccgaaaagcgaatggcatatagatgcatgatccggcaaaacccagcgcgtcgagcatcgcatgcgcttcctgcgcctcaaatgtattgacgtgcacgccgtcggccgggcccatactcagatgatgcatcatgcccatgcgcgcgccgccgtcaatatagagggcggccaccggagacacgatggtggcgatggcccgacgcatcgtggcgtcgaaagtcatggtgcgttgcgtgatctccaatgctcccaccggccgggagcgactttcaagggcgatgacggcgctcgattcgttgccggcatcgaacgcacgacccgctcgagcggccaacagaccgtcaccatcgaaaatggcgacgctttcgccgaacagcgacgcaatggtttcggccacagcctcgatattgccggtacgggacaatccctcacgtaatgaagtggacattgtgtccacctccaattgcaagtgcatctgttcgtgcacgatagcggtattgacactctgacagatgtcgacaaaaggtacgcgagatttcagaccaatcaacgtcaacccatgcagcctggccgcagacaccagttcgtccggcatccgcaccacaccctccaccagttcgaccaccagagcggcgacaccagcctgtgccaggcttgctacatattgtcctaacgtgccgtgccaatcggcggcgagcagagcgttaccctcgataatcagcatctcaccgcccgaaaggaaactggagacatcctctcgctcgttggtaaacacccatcgcactggcgtatcgaggtctttgccttcgacctccaccacaggatcggctcgtttgaactgcgtgttatgaagcgcactgcgaatcgatacagtcatacaatctgtccattcccccgcggaacaccggtcgttccggttaacctcaccgcaaagcgtgctgttgacaataacctcagttggttacgcgggcagtcggttcacgtaaccgttcggcaacacaccagttgaaggagcgacgatgactaccacactgttcaccaacgcacatatcgccaccggagaacccggcagcacggctgcaagcaccctgccattgcaggacattctcgtcacggatggcgtgttcaccgcattcggccccggactcgcgcaacaatatgaggctcagggtggtgatctggcggccattgaggtggtcgatctgggcggcaaacttgtctgcccaccgttctgcgatacgcatctgcaccttgattacgtattcacggcccgcaagcccggtgcggtgaatgaaagcggaaccttgtttgagggcatccagcgatggagtgagaccaagtccgacttgacggtcgacgagatcaagcagcgcgcgaaaatcggcattaagaaagaaatgctgcatggcgtgcagctcattcgctcccatgccgatgtgaccgacccgaacctgacctcattaaaggcgctgctggagcttaaggaggaattgaaggatacggtcactctccagatcgtcagcttcccgcaggagggcatgtactcctacgagggcccgcatggcgaatcgggggccgagctggtggaggaaggactcaagatgggtgccgactgcgtgggcggcatcccccatttcgaacagtgccgtgagtttggcgagcattccatgcacacggtagttgagttggcttcgaaatacgacaagctcatcgacgtgcattgcgatgagacggatgatccgaattcccgttacgtggagctgctttcggcgttggcatataaggctggcattggcccgaaggtcaccgccagccacacctgttcgctgggatcggcggacaacgcctacttcttccacctgaccaagctgcttaaggcggcgcatatcaacttcgcctgcgcccccaccgagaacctgtatttgcagggccgtcaggataccttccccaagcgccgtggcatcacgcgagtcaaggagctcactgaggcgggtgtcaatgtgtcattgggccaggattcaatgcaggacccgtggtacccgctgggcaatggcaatatgatgctcattcttgattatgtgctgcatttggcacagatgatgagctttgaagaaatcgacgatgcgttgaagttcctgaccgtcaacggtgccactacgttgggcctgcgcgatatgtacggcttggaaacgggcaagccagcaaacttcattgtgctggacgccgatagtgtgttcaacgccgtgtatgagcgctgctcggtattgcgttcggtgcgcgccggccgcacgctgtttacccgcgaggagaccatcgacaccggactcgccctgctgcaataacccgacaacaaacagtagttccccttgacaggggagctatcgccagaggcaactgaggggtagaccaaaaacgtgcacatcatgtgtgcgtaggtctacccctcagtcagcttcgctgacagctcccctgtcaaggggagctttgctggtatgcgctagctacgctatcgaaacggactacttctgcggagcgtcaccggaatcggcgggagcggattcggctggttcagtggccggagtggcgtcggctggagtctcgccatcagtggaggcaccggcttcggacgaagtttcggcatcggtggcggcaccgtcttcggcgggcttatcggcggcggccggctcctcgaacttctcccccttgaaggtgaattcgccgaggataccctcgccttccgcatccacaatcacgcgctgaccgtcttcgagatcgcccatcagaatcttctcggagatggcgtcctcgatgtcgcgctgaatcacgcggcgcagcggacgggcacctagcagcgggtcgaagcccttctgcgcgagcaggtccttggcggcgtcggtgagttcgagcgacatgtgacggtcgaacaggcggtcgttgagctgcttgacgtccagatccacgatctggcgcacctgcggctcggtgagctgcttgaagacgatgatgtcgtccagacggttcaggaactccgggcggaactgctgcttcaattcggagctgacctggtccttcatgcgctggtagctggactcgttgttggcacccaggttgaagcccgtgttggcggccttggcgatgtctcgcgtaccgaggttggtggtcaggatgatgatggtgttcttgaagtccaccttgcggccctgaccgtcggtcaggtggccgtcatcgagcacctgcagcagcgtgttgaagatgtccggatgagccttttcgatctcgtcgaacagcaccacggagaacggcttgcggcgcaccttttcggtaagctcgccgccctcctcgtagccgacgtatcccggaggcgcgccgaagagtcgcgaagccgcgtacttctcggagaactcggacatatccacgcgaatcagcgcgtcctcatcgtcgaacaggaattcggcgagcgtcttggccagctcggtcttgcccacgccggtggggccggcgaagatgaacgaaccggacgggcgcttcgggtccttcagacccacgcgagtacggcggatagagcgggacagggcggaaaccgcctcgtcctggccgatgatgcgcttgtgcagttcggcttccatgttgagcagtttcttggactcggcctgagtcagcttgaacaccgggataccggtggtggagctgatgacctcggcgatcacgtcctcgtccacgaccatcttgacgtcggactcgccttcgcgccaggagtcttccttctgcttgcgatcggcttccagcttctcctgcttgtcgcgcagttcggcggccttctcgaagtcctgacccttgatggcctcgtccttgtcggcggcgatctgggcgatcttctcgtcgagttccttgagctcaggcggggcggtcaggcgcttgatgcgcaggcgtgcaccggcctcatcgatcaggtcgatggccttgtcgggcaggttgcggtcctggatgtaccggctggacagctcggcggcggactgcagcgcgccatcggtgatggtcacgtggtggtggttctcgtaacgggaacgcaggcccttcaggatctcgatggtctcggcgatggtcggctcgtgcacctgaatcggctggaaacggcgttccagagccgcatccttttcgatgtacttgcggtactcgtcggtagtggtggcaccgatggtctggagctcgccacgagccagcatcggcttcaacatgtcagaggcacccagcgcgccgtcggcggagccggcgcccacgatggtgtggatctcatcgatgaacagcacgatatcaccacgggtcttgatttccttcagcaccttcttcaggcgctcctcgaaatcaccacggtagcgagaaccggccaccatggaaccgaggtccagcgagtagacctgcttgcccttcagggtttccggcacgtcgccggcctgaatcttctgggccaagccttcgaccacggcggtcttacccacgccgggctcgccgatcagcaccgggttgttcttggtgcggcgggagagcacgaccataacgcgctcgatctcgttggtgcggccgatgaccgggtccagcttgccttcagcggcttcgacggtcaggttgcggccgaactgatcgagaatggcggaaccggacttgttctgcttgtctgtcacgccgccggcgttggccagatcgcccttgccgtcaccggtgccggtgccggagttgccgcggatcatatcgatggtcgcgctcctgagctcacccaggtcgacgtccatcttgatgagcacctgggtgcccacgccttcgccttcgcgaatcaggccgagcaggatgtgctcggtgccgatgtagctgtggcccagctgcagggcttcgcgcagcgagaactccaacacctgcttggcgtgcggagtaaaggggatgtgcccgttcggagccgcgttgcccttgccgatcatttcttcaacctgcttgcgagtggcatccagctccacgcccttcgaggcgagcgccttggcggctacaccctcaccttcgcggatcaggccgagcagcaggtgttcggtgccgatgtagttgtgctgaagggccctcgcctcttcctgcgccaacacgatcacgcgccgtgcacggtcggtaaaccgttcgaacatgcttgtccttcctcaattgacattccgtcttactctaccgattcacgatgacgtttattcatcggattccatgaattgcgccgtgagaggataagaaaacgatatgctggttctagattcacccgtagtcgattacaaggaggctcgaaatgagtgaagcgacaaccaagcccgacatcgttgtcggcgtggatggttccgatgaatcctttgccgcgctgaagtgggcgcttgaggaggcttcgttaaccggtcagagcgtcaacgccgtgtttggctggacgcattcctgggatatggggtccgaaccggacagcgacgaggcctgggccaaggtccgccacgacatcgccaacgagctgcgtgtgtgggtcgacaaggccgctgcaggcatcgacttcgatccggcgaatctgaagctcacctcggtgaaggcctccggcacttcggccctgctgcagatcggccatgatgcgcagcagatcgtggtcggccgccgctcgctgagccgtgtggcccgctggttcatggggtccctgtccgcttcgctggccgaggccgccgaagtgccggtgaccgtggtgcgcatcgccggcagcgaggatgagaccgtgaccgatgccatcgccaatgccctgacgccaggagaccagccggtccactacacgcagccacagcccgtggtcgaggtggctcgccgcccggtggtggttggtgtggatggttccgagacttcccgccgcgcgttcgacttcgcgctggaaaaggcacgactgcacgacgcgccgctgcatgtgatgttctgctggcagctcaaggatttgggcgttattccgggctatgagaacgccgtggcaccggtgaaggtcggtcagcgccgcgccgaggagattctcgccgggctgatggccaaggccgagattcccgatggtgtcaaggtcagcgcgaatgccttccatattcccgcgtccaaggggctgattgcggcatctcggtacgccagccatctggtggtcggttcgcgcggcctgtccggtctggacgcgcacttcctgggatcggtgtcccgtcagatcgtgaacttcgccgaatgcacggtgactgtggtgcactgatgcaccgaaatcggcatggagtgctaacgcacgtctcggtgatgggcttgcagggaggaattctttattcctgcaaccccatcaccatctactttttaggaaacatcttcgctgagacctataagttgatccgagagtacattctgctgttggggagcaggattggcgtttattttattcctcgtccgccctgttctggcgcagctgctcaatgagatcgatgacggtttcgagttcaggagtcacatcgtctgaaggacgaacgttatcctcttcgtcgtccatctcatcatcctcatcatcatcggcaacggtgttgttgaggatgtcctcttcggtggcctcgtcgtcagcatcagacttggactcgtcgctggaatcagctgcatcaacatccacaacggaatcggatgcgttctgtgcaacagactcatcaccggcagactgggattgcgaggtcccgtcgcctgccgcctcctcagcgggctcagtatcgacggcgttcccgtcaacagtcttctgtgcttcgatatcatcaccggcaggctcgcctgtcttgtcggtttcgccttcggcctcgtcctgggcaacctgctcctgcttgcacggacggttggcaaccacgtcgatatgcagatcgtcaaaggctggcttggactgcacccacagctggcttggctcgggaggttcgatttcggaatgctcaccgcagccgtggtccagggagaccacgcggccgtcatccggactccacttgttggcgcacacgccgaacatacggtcgagttcgcccgcgagcggcacgaagaaaccacaggtggagcacaggttgccttcggcggttttggtgctcaacgctttggggcctcgcggaccttcataccagcgcttggcagcctgcgcacgacccaacgaggtcagcacgtgacggcgggtcagtcggaaggtctcgacggcatcgttgacatcctgcagcgaggattcctcgacttcgccttcctcgatgcgctcgtcatccggatcggtaccgatcgaatcggtgggagccagatctgtgggctcaaggcgatctttccaaggaatccacttgggcggcatcaacgcgccctcagtggggatcaaggaggattcgttgacggtccaggagtcgatctcctcgtcgtgatacagcgtcaccgaccattgccatccttcgtagccacggatattcgcggcgaagcggaagtcagtgacgtgatcctcaagatcatatgaggtaacgaaatcccccacctgatcgctctcgtcggccacttcgagcagcacggcgcgcgcgatggcgtgagggtccggtgtcacgatggtttcggtggtatcagtcatagatcagatcagtcctgtacatcgaattgatccgccaccgcacgcagcaacgtggccagctttttgctgtcggcagcagatgggtaacggtgacggcgcaacgtattgccggccgcatcaagcatcttgataaggtcctcgcagatggcggccatgtcatccgccttcgggcgggtggccttgaccaagctgggagtggaggcgatcaggcgaacatccatggcctgcggcccacgacggccgtccaccacggaatactccaccttggcccccttgcgcaacgtggtggcgccagtgggtagggcctgagccggcaggaacacgtccttgccttcctcactggtgatgaagccataacccttggctgcgtcaaaccaacgaactcgaccggtgggcattgcgaaccttccttaatcctcaatggaaatagtaaaccgaaggtacagtttacctcacagggcttgacctcacgctttgggctgagtcgcctgagtcttacgctcagagctgaaccaagaagtcttctgtttggcgtccttggttttgccggtgggccgcttgggctcaggagcgacgatctgctcaatcggcagcaccacggtgaaggtcaggcctcccccatcggtgccggtggcgcagataaagccgtgatgtgctttgaccacggattgcgcgatggccatgcccaaaccggtaccacccttttcgcgggcacgggatgggtccgcggtgtagaagcgttcgaaaatcttcgagcgcgattcaggcggcacgccggggccatggtccacgaaacgcaatacggcgtatcgatagccggtctgcatcgaggcacctacttcggcggcgtcgatgaaccgccgcattgatgcgtcgctggcgggcatgcgagcgagctgtcttggatcgatggcggccggcatcacaccgagcgcggcctcggcaggcgaatcggcaggcgtgtagcggtggatgttgcccacgatgttggtcaccacctggcgcagtcgagaggcgtcgccgggcagcacgacctcgggccaatcgccttcggcaaggttgaattcggcgggattgttcaaatcgcgcgccggttcgagggaaatctgcatgcggcgaacggcacggtccgggtcgagcgcatgcaagtcgtcgacggcgtcggtgaccagcgacgagagtttcaccgtgccggtcacatcgatgccgcgcccctcatcgagacgggccaaagacagcagatcctcaacaagaacagtcatgcgctggctggaccgttcgatatgttcgatggactcgtccgcacgctccaaggcaccaggcatatcgcgctgcatcttatacagctccgcatagccatggatggcggccaacggagtgcgcagctcatggctggcgtcggagacgaaccgtttcatcttgtcggtggtctcctcctgttcatggaaactggattctattcgggtgagcatggagttcagcgaggcggccagggagccgacctcggtgttttccggcgcggaaggaatacgttggctcaggtcgccggcggcaatctttgcagcggttttctcgatgcgcttcagcggcgtcatcgtgtgctggatgatcagcgtggacagggagccgccgagcagcaccacggcgatgccgaccacaatgcagtatcgggtgagtgtgttgacggtgtcgatctggtcggccagtgacaagccgatgtacaccacggcacggtccttgccgttttgctggaaggtcaccggcagaatacgccatggtgccctcgccgtgacgatggcggcatggttggcattgacagtggggttggccagtaccttggcgatggtgtcagaggaattggagtttccgttggccggatcgttctggctgtccgcactgtcggactgcaccgtgatgatctgcttggccactgcctgcgtagtgaatgcctggccgagcgtgatgccactggtatcaccataggtaggaagaatcggcaccgatacgataccgtcctgcatctgcggcatcagcggggtcacgaccagaggattgccctctttgtctttggtgccgtcggtatattgaatctgcagaaagtacgagttcggccccgatgagtcattttttgacagcagatcgatattgttgaccaccagctggctttgcgagcttaactgggtgtcggttttctgcagcatgtagttgttcaccaacgcgcggatggagaaggaaatcaccgacacgccgataagcagcacggcgatggtgcaggccaccagcttgctgctcaacgagatacggtcgatatgccgcatcagtatgtttttcttacgttcgtgccgctcttggaaatgggcggcgaacggcggcattgcaggcatgggattcgtgttcggggcggcgttcggcgtgctgctcggcggtacgccgcctgactgcttatcggggatactcatgagattgcgatgcgttatggatggggcgactagttcttcggttctcgaatcatgtatccgataccgcgcttggtttcgatcagcggagtcaccttgcgcttgccgccttcgccgtcgtcgacctcgatgccgtcgactttcttgcgcaggtaggagatgtacgattcgacgatggctgcgtcgccgccccagtcgtattgccagacatggtcgagaatctgtgccttggacagtactcggccctcattgtccatcaggtagcgaagcagcttgtattcggtggggctcaggtcaaccggctgccctgcacgggtcacatcgtgggagtcctcgttgatttccaagtcggcgacgcgaataatcgggtcgtcttccacctgttcgcgggtacggcgcagaatggcgcggatgcgagccacgacttcctcgaggctgaacggcttggtgacgtaatcgtcaccgccgacggtcaggcccatgatcttgtcttgggtgtcgtcacgagcggtgaggaacagcacaggggcgttaatgccttcctggcggatgcggcgggtgacggtaaatccatcgatgtcaggcagcatgacgtccaacacgatgagatcaggctgcactttttcgataacctcaatggcttcggaaccggaagcggcggtgtttacctcgaatccggcgaagtgtagggaagcgaccagcagttctcggatggacggctcgtcgtcgacaacaacaatcgatgcttcaataggcttactcatgcttcctagagtgtcgcgctcttctgggcgtttcctgaatgtcatcttggagttcggccttggaatccttcttgatctccttgcgccgacgaatcaccaccatgaccacgatgatgatgaccagcgccaccaacaccacacccatgatgattatgcctatggtcaccgtggatgatgaggtggaggcttttttggatttcacgatttgatccatcattgccgttgccgcgccagaccagctcggcgggttttccagtaacggctgctgtgcggcttcggatagcttatcgacggttttgttatcgagaagccacttatcggagttcttggacacgacgaccaccaggttgccgtcattcgaggccacggcaagcatcactgtgttcggcttgggattcatggactccatcacggttgccgcccagtcttccggtttctgttgactattgaaactggaaagatacagcagatgcacgtgtacaccggtttccttctcggttttggcgatggcatccgcgacttcggccgcatgggagcccaggagattttccgtatccgtgatgttctcggtgatggtcacgccgctgtcggtgctgctgctggagctgtcagagctgtcgcccgagttatccccataggcatttgcggttatccacattgcgttcatcgctactgcagcaagggcgcaaatggcacaaacaagccattttcggaccatattcccgaaggccgaacaggacggctccgaagataggaccacaatagttgtttttccgtcttcccgattcgttgttgacatatcctccaccttagcggccggtattggcaagcggccgccatacataccattaaccctctagaaaaggagcaacgatgccccaatatcaggtagattccgagcgaatccaatcatcctcggccgcagtggccacttcgatctcgcagatcaggcaggccgtgggcggcatgtacaccaatctcaatgccttgcaggacgcatggcgaggttcggcggccacccagttcaccgcggtagccgaacagtggcgtgcggcccaacagcagatggaggcctcactcgagtccatccaacgctcgctgacgcaagcctccaccgtgtacgctgacgccgaaatccaagcttcgcgcctgttcgccagctagtttcttggctctcctccctgaggggagctcgatcgcgaagcgaaactgagggagtatccctacaccgcagctccccttagtctcactgcgttcgacagctcccctcaaagaggggagccagaatacaaaaaaggggactcccgaaggagtcccctttcagctcaatcagctagcgatcgcttgcggatcagtagcccatgtcggcaccggcggccggggcagcaggcttcggctccggcttgttggcaacgacggcctcggtggtcaggaacagaccagcgatggaggcggcgttctgcagagcggagcgggttaccttgaccgggtcggtcacaccggcggccagcaggtcttcgtaggtgtcggtggcggcgttgaagccttcgccatcaggcagggagcggacggtgttgatgaccacgtcaccggacacgccggcgttctcggcgatctgcttgatcggggcttcgatggcgcggaacacgatggcggcaccggtagcctcttcgccggtcagggaggcgacggcctcggccttctcggctttggcagcagcctgaacgagggccacgccaccgccgggcagcaggccttcctcgatggcggccttggcgttacgcacggcatcttcgatgcggtgcttgcgctccttggcctcaacctcggtggcagcgccgaccttgatgacagccacgccgccggccagcttggccagacgctcctgcagcttctcacggtcgtaatcggagtcggtgttctcgatctcagcgcggatctgggccacgcgagcgtcgatgtcttccttggagccagcgccctgaacgatggtggtctcgtccttggaaacgatgaccttcttggcgtggccgagcacggaggtgtcgacggactcgagcttcaggcccagttcgtcggagacaacctgagcaccggtcagtatggccatatcctgcagcatggccttgcgacggtcgccaaagcccggggccttgacggcgcaggacttgaaggtgccacggatgttgttcaggatcagggtcggcagtgcttcgccgtcgacgtcctcagcgatgatcagcagcggcttgccggtcttcatgaccagctcggccacgtgcacgatgtcctgctgggaggagaccttgccggaggtcagcagaatgtacggatcttcgagcactgcggtctggtcgtcagcgttggtgacgaagtacggggcgatgtagcccttgtcgaaacgcatgccctcggtgaagtcgaggtccaggccgaagcggttgttgtcttcaacggtcacaacgccgtcctggccgaccttgtccagagcctcagcgatcttctcgccgacctcagggtcggcggcggagatggtggcggtagcagcgatctggtccttggtctcgacgtccttggcggcggcgacgagttccttgacgatgacctcggtggccttctcgatgccgcgacgcagggcgatcgggttggagccggcgaccacgttcttcagaccctcgtgaaccagggactgagcaagcacggtcgcagtggtggtgccgtcaccggcgacgtcgtcggtcttcttggcgacttccttgaccagctcggcgccgatgcgctcgtacgggtcttcaaggtcgatttccttggcgatggacacaccatcgttggtgatggtcggagcgccgtaggtcttgtcgagcacgacgttgcggcccttcgggcccaaggtgaccttgacggtgttggcgagcttgtcaaggccctccagcatgccctgacgggcttcctcatcataagagatgatctttgccatggttgcgtattcctccaaatggctaggtataccggttatcactcgcaagcgtcgagtcgtgacgaccagccgtcagctgccgattatcactctcgacctccgagtgctaacccagacattagcactcgcgaccgccgagtgccaacatcatcggcggcgattgcgctttgggcatgaaaaggccccaaccgtcgaaacggtcagggccttcaatgcacatccttgcgtgcgtgttgctcactcggagcgggcttcacccgaagacagcttgacaacatcctttgcctgcgtgcctttgccggacgaagcgggcgtatactccacgcgatcgccctcgtacagcatcttgaacttattggtgctgccgtcgtccttgatttccgcgtagtgcacgaaaacgtcctcgctgccgtcgtccggctggatgaacccgaaccccttcttggcaaggaagaacttcacggtaccttgtgccatatctgatctttcctttgttcccttaggcgtcgcgacacaaaacctatagggaacgtagaaagaaccgcatcgcgctcccctacctcgcgactagatgacgattgtacagtgacgagggaacaatcccaaccgcagtggcacattttcggtacgaattatttcatagacgtgagaacgctcacagttttcgatgtattccacgccgatatcaggggcgcatcaacaacgctagttgagcagcaccaccgtaatgggaacggcgagtccttgcacctgctccacagccgaaatgccaagcgtggtcgccacatcttcggcggtggctttatcggcttcattctgataccataccacggaagaagccggcaatgtgccgcgcggattggtcgcctcgacgctggtgtaaccggcggtctgcagcacatcggcctgctgacctgcatatccttggattcctgtggcgttgaccacacgcacctgcgtggccttattcacagtcgcggtggctccggactgctgagactgctgatcggagtcttgattctcattcgaggatgtcgtatcactgttggtatcggattttgccgaatccgaagtcgagtccttggacggatcggtcgaagtggacgaggaatcatccttggtgctgtttttggtctcagccttgctggacgaatcggacttggaagcagtcccggacgtggtcgcagtctgggacgatcctcctattgcattcctgtattccccggaaatccatgcccagaccccgacaccgcacagtgcggccaccagaataacgacgatgaacgggcagaggcgggccactgccgaacgagcgccacggtgaactcccaccggtcccttcggaggattgtcgaaggaatccggttcataggattcgtaggtcatcatgtcgcgtgccataatcgccctttcttcctgtcaaaactacccatgagtgtaatcggcaaacaactcatcagtccaccacaccacgcctcgtgcaccggatatgcacgtttgactacagtggtgagtcatgatcaaaccattgagcgaactggtagagccggggtgggcccatgccttggccgacgtggagcccgccatccaccatatgggcgattttcttcgtgcggaaaacgccgccgggcgcccgtggctgccggcaagccacaatattctgcgcgcgttcaccatcccgttcgattccatcaaggtgctgattgtcggccaggacccctacccgaccccgggtcacccggtgggtttgagcttctgcgtggcgccgaatgttcacccgctgccgaaaagcctggtcaatatttataaggaattggttgacgaccttggggtgcccatgcccaccaacggcgatctgacaccgtggacggaacgtgaggtgatgttgctcaacagatgtctgaccgtcggcgtcgggcggccgaattcgcatcagggcaaaggctgggaggaagtcaccgaggccgcgattcgtgcgttgaacgcgcgcacggacgccgacggcaagcccaagccgctggtggcgattctctgggggcgtaatgcgcaaagcctcgagccattgctgaccaatgccttcattatcaaatcgcctcatccgagtccgctgtccgcttcccgcggattcttcggctccaaaccattctccagagccaatcaagccctagtcaccatgggtgccgacccggtggattggactctttagacagaccaacagtcattgtgagtagttacagtgagggcatgactttgttccccacgcaaccgaacataccttcgccgaccaccgccgcacgaccggtcaccgttcccacgcccggcgtgtcggctccgctgggtgccgatgacgccaaacgcgcacgtatcctggccgacgccattcgggcgaggttcgcccagacactggtgggtcaggataatctacgcgaatcgcttatcgtgaccttggtggccggcgggcatattcttatcgaatccgtgccgggcttggccaagaccacggccgcccagacgctcgccacctgcgtatccggctcgttcaaacgcgtgcagtgcactcctgatctcatgccatccgatctggtgggcacgcaggtcttcgattttgcgtcgcagaagttcaccacgcagatcggcccgattcacgccaatttcgtactgctggacgagatcaaccgttcgaatgccaaaacccagtccgccatgcttgaggccatggccgagggtgccacgaccatcggcgggcagcgtatcgccttgcccaagccgttcatggtgatcgccaccgagaatccgattgaggaggagggcacgttcaacctgcccgaagcccagatggatcgtttcatgatgaaggccgtcatgacctatccttcgcccgacgaagaggctcgcatgctggccatgctcacccaccgtggctccgatatgatcggtcccgacaccatcaccggcgaacgcatttccgtgtctgacgttgattttctgcgcaaggcggcacgccgcgtgcatgtttccgacgcgatcatgcgttatgcggtcgatatcaccgccacgtcacgaggtgccggctcccgccccatcaagggactgtcgtccttggtgcgtttgggtgcctcgccgcgcgccaccatcgccttgacccgtatcggccaggcgaaggcgttgctgtccgggcgcgactatgtggtgcccgaggacctcaaggcgttcgctcatgaggtgctgcgccaccgtattatgctgacgttcgaggcactggccgatggcgtggtcagcgatcagatcgtcgacaagatcgtcgaaacggttcctgttccgtgagttccgattccgttcgcaagaaaatcgaggcccttggcactcagctgagcctgcctaccgtaaggaaggctttgggcgtgctggagggcgaacacgcatccgggcgtcgtggcggcagcggcgatgcgatggatgtgcatgcctatgagccaggcgacgaatcccgtcttatcgattggaagaccagcgcccgccaaggccgccccatggtggtcgagcgcgagcgcctgtcgacgtcacgggtctggttgctgatggacgtaggcctggagatgactggcgtatgcccttccggagaacgcgcatggcaggttgccgccaatgcgctgcgtatgttcgccgcactgtcgttgcgccggtcggacgatatttcgctggtgttcggcgatgagtccagcatcacccgcgtgccgttcaacggtgggttcgcgcagttcgaacgcacgctggacaaggcgcttgatcgtgattgggatcatcaccgtaatatcgacgcgctgctggaatatgcgcgccgtatcaaggatcgtgaggcattgatcgtattggccaccgatgagcatgcgatggaggagcggcatatcaccacgatccgtcgtattacccgcacccatccgatggtgctgatcgatgtggcgacgatgaatccgttcaaggccgtctcatcccgccacgctcccgccgacggcttgagtgcacggcgtgtgccggcattcctgcgcaacgccaaggcagcggccgagatcgatactcatcgcgcgtatatggccgcggctttggaacaggagctcacccgtgccggttcccatatcattcgagccgcatccagcgaatccatgttcgatcgtttcgtcgccctggtgtcccgggcattggcccgcaccacacgcaatagactgggcactgcacccgaactggtcggactgactttggcgggtgatctatgatgcacagcatgttccccatcatcccgctcgccactgatcccggcgatctcaggcccgtggagtcgttggccttgaccactcccctggtgatggccatcgtcgcatgcctgttgctggcggtaggtctgatcgcgttgatcatcatgctggctcgccccgcacgcaaacctcggaacagcgaccgtgcgcgtggcactcatagcaatgccagctccaaggccgagtggcgtgcccgcatcgacgatgtggtggcccgtcatgaatccggagcactgccccggcatgaggctttcgtcgaattggccgtcatcgcccgtgatttcgccggtgccgcatcaggcaaggagcttagttccagtacgctgaccgatttggcgtacctgaatcgcacgcccgcgaatcgccaaggattggacgcattgaagcagaccattagcgcgttgtatccaccggaatttgccgatgatgcccgcaaccgaatcgcccagacgaccagcgtgcagcaggccgccgagtgggtggcgaatctggtggaaaggtggcgttcatgatgctggcatggcattggccttgggccgctctggccggcgtcttggcagcgctggcgattatcgtgctgattgtcgtgttcgcccgccgtaacgccgccgacgacacccctgtattctcgatggacgacgatctcaataccgagcacgcttcccgtctgttccgtcaatggcgcgctttgggccgtctcgccatcagcgtgctggtgcttgcgctggcgctggccattgtgctggtggctcgccccagccaagtggatgccggtgacgaacgcgcttccagccgagatatcgtcctgtgtctggatgtgtcgggatccacgctcccctatgatcgcgaggtcatcgatacctatttggaactggtcaagcatttcgagggggaacgtatcggtttgagtatcttcaactcgacctcacgcacggtgttcccgctgaccgacgactacgaactggtcaccaaacagttgaccgccgccagcaaggcgctgaaaggcgtcgagtcgcaggatgacatcgataagatgtccgatgccgaatatcaggacatcgccaattggctcgaaggcacgcagaaccgcaaggacgccacctccttgattggcgacggcgtggtgtcttgcgcggcgatgctccccggtttcgcttatggcgaagccaatcatgcgaatgccgaccgtcagcgtgcggcatccatcgtgctggccaccgacaacgtcgtgtcaggcaaacccacctattcgctgaccgaagcgttggacttgacccagcagaccaaaatcaccgtggacggcctgtattccgggccgaaagccagtgaatcggaccaaaccacaacggatatgaagtccgcgatcgagtcgcatggaggcatcttcctcacccaatcgaatggcgcgtcgatagatgagctggtacgggatattcagtcgcgtagagatacggatgtggagaacaaggcgaaatcctcaatggtggacgctcccagtctgtggacgcttgctctggccgtgatactcattatctggatcgtatgtgcatggaggttgaggcgatgaacggattcaccttctcccccgccttgggctgggtcgccggcggactgctggcggccgggctcgccgtactggccattctcgaaatcgtattgtttgttcgccgccgtgcttccagtgacgagaccgtgtgggcttgcatacgacgtacgcttatgctgctcattgtcgcggtgatggtactgactcccagcgtggtatcgtctaccacctcacaggccatcaatgccaccgacgtcattgtggcggtggataccaccgggtcgatggcggtggccgacgccacatacgggtccgagaagaccattacccgcatcgatgccgcgcgtcaggccgtgcatgatgtgaccgctgcttacccggacgccagtttcgcggcgttacggttcggtgcttcgggaacacttgatgtgccgctgaccccggatgcgccggccatcgataattgggccaacacgttggcggtggaagccacatccgtgtcggcgggatccagtctggatgctccgatcgatcaattgctgctgaccgcgaagtcgattcgtgaagcgcacccggatgatgcgattgtgctgtacctcatcactgacggcgaacagacctcgaatgtgacgcgtcgtacgttctcgtcactgcgacagtatctcaatgatgggtttaccgtgggcgtcggctcgaccgagggcggcaagattcccgtcatcgccgatggcgtcagtgccggcgattccaacaccacggaccactgggtggtcgacccggataccggcgaacccggcatctccaagatggatgagaagaaccttaaagacattgccgacgagatcagtggcacgtatgtggccgtggacgcttcacagactttggcggattcggtttcggccaggtcgtcgaagcagtggcgcatgaccaccacggtcaaggagcgcacacgcaccacgccggtggtatggccgttggccattgcgttggcgatattgcttgccatggaagtcggtgcatggatcgcgacctcaaggaggctgctgtgaggaacagtaacgaaatccacgagaacgatggctcggcgaatattcggatgcgggcgaaatgcccgctttgggcacgtatcgtcctggcttgtggcaccgtattgctgctgctggttgccggcgtggcggcagtaaacctgtccgcttcgattacgttcaatcaggccaccgcatcattgaatgccaatatcaaagcggctcaggatgagtcgactgatatcaccacgctcaaggcgcaacagcagcagaccgatgcgcaattcgccgaggccgggcgaatgcgtacgcttctgttgccgcaagtcaaggacgccatcgacaccaatgcttcgatttcttccgagctgacgaagatcaccctgaaacaggccgaggcgcagaacagcggttccgattccgggcaagcccagtcggcgcagcaatccgagagttcctcagccaatgccaaaaagggcggcgcgttgaccgacgagcagaagaagcaggtcgaggagctgatgaaggccaatcagcaatccaccgatacccagtcgaacaccacccaatccgagcagaaggcgacgcagaacaagggtaccggggccaccaagccgtggtaagcagtcgttcacggttgctctttttctcacatcctcacgggtcatggccttatcgcggctgtttcccggtttcggctgtcggctttggcgtttgtctgatcccgatagcccatggctgatccaaggtgtgcccaaacaggctatttgtggataatcgttacggctatacacaacacttgtgaataacttcgcccaaaatcggcaagctagaaccacattggtcgttccggctggacaagcatgagtcctgtccttttagctggatatatgaatacctacaccagcaccccagcacccatcgatcccgccggcggctttgccggcaatacggtgacgccgttcgattacggcacttgcccttgccatgcggcggtacagcgtagtcgcgacctcgtgtccgtccaacgtgcggccacactggcgcaatcggaccagatggcggtggccgtgaaccgctctcgcaacatcgtgtggaccggtaaagccgccgacctattccgatcgcggctcagtcgcaccgcacagtattcggcccgtctcgcgcaagacatggagaccacccaccgattggcttgggggtcatcatgagcgagcacgattactggcaggtggaatcgtccgtttacggcggagtgggatatgcgccagccactcttgaagaatatgccgccatagccaaggctctcgatgacgaggcggcaggatttgcggccatagccacggcttgggaatcggccgcattacagttgcagtcacatcggcatagtgcgccgatgtgcgtcaccttgcagtcgggcgatccgagcgccgttgttcccggccatgtcactgcaccatatgccgcgctgggcaatcggtgttatgaccatgcaacggcatgtcagcggttgagcgatgatctgcgtggcgcggccgatctgctgattcgcgcacactctctgtattctcaggcggagatgacggctcggcgcatgtttaccgaattattgcaggccggtacacaggccaaaccgggatatgccgcggtgggtgttgccgctgtggcggcgggcggctttctggccggctgggctattgacggcaaaccgaacccagcatggatgtccacgttcacctatccgttccaggaaggagtgctcagcggcgcgggcggaatcattggcggcgtacctatcggcaagagcattgcgcacaccgatgaggtcaacaaggctgcggggaaaatcgccaatttctccggcccggcgaaagacgtcgtccaaggcaatcatctgaacgtgcgcgaggtgcaggcgaatgccgacgtcgtccgtgcaagcggatcggtggccgagtcaatggagaatctgcgcaggctcgccgaagaacggctcggcaaaatcgagctgaacagcggactcgaatatgggaccatcgccattcaacgctatgaacgggctgatggaaccaactcctggctggtcaccatcccgggtaccgatggacaacctgactcaccattcggctgggcgcagaacgtggaactgatgagcgccgatcaggagcgccgcaggaaagcggacagcgctcgcacggttgccgaggcgatgcgtcaggctggtatcggcaaggacgagcccgtggcactgatcggccactcccaaggtggcatcgttgccgccacgcttgcctcggattgggcagaggaatataccatcgagcatgtggtgacagccggatcgccggtggccaatcatccgattccgcaacgcacgtgggtcaccagcgtggaaatcgatgatgaactggtcgccgcgctggatggtgccgccaacccggtcaccgataattggctcaccgtgcaagggcatgtatcgcccgcgcccgcggcaacaccatccacagtgcattcggacgtctcatgcactcccggcgcaacgcccatcaacggtctgaccccatatgacgccgcatccgtggctggttcgaccaacggcagggagttgtcgcattggctcaaataccatcaggccgcttatcagaacgccaccgacctcggctcccccgccgtgcagcgccacgaagcgcattttcaggaagtcatcaacggagaactcaaggaaacccgctattaccaaggccgcatgacccagtccacaaccattgctcccggcgagcgcaccaccgagttcagcacgttcggcggttaaaagtaaataccacacttgacagagttgtcaagaaaggagttaacaatataatgacgagtaggagatggctcatcaaactgatgaagcaagcggcgaaacgcaagaatattacgtttgagagtatcaggcaaagagggagtcatgagatattccaactcgatggactcatgattcccatcccacgccataacgaaatcgacaacgacctcgcgaacatcatttgtaaggaagcagaagccaaactcgggaaaggctggtatcagcagtgaaaacatatcaggtcatcgttcgtcctggcgaaaaatactggattctcgagattcccggtatcggtttcacgcaggcaagaacaacagcagagattgaaagtatggcacgcgaccttatcaccgtcatgacgcaagatgctgatttcgcactcaccatagagacaaaactgccgcaatccgtacaagagcaccttgatgaagctcggcgactgcgcaaggaagaagcggaatgcagatcgaacgcagcgcgggaaactcgcgccgcggcacaagaactacatggcatgggtctcgccctacagcaaataggcgatatactcggggtctcacggcaacgggcacatcaacttgtcaatgctgtcaatgcttagcatcaatcggctaccccccccccacaatgcaatcaccgcagagacgcggctagcgccactttcccggaactgttgcgctaatgcacttggatacccctccgccagcacaacactccctggaaagtggcgcgcaaagagtgtcaggcgcgtcgctcgatgagtgcgcggccggatgcgaggcggtcgagcacaccggttttggcgatggccagcatcagataccaggccatgacgccgctgataagcacgccgccggtgacctcggaaatcatgtgcacgatgccacgcgggctgacgaatgacacacccacgtagcgaaacagcatcagatatgtgccgtattccaaggcgaccaacgcaccggatgcaatggaaatcggcagattgaacatgcggtaacgggtcaaagcgaacggaatctcagcgaaaacaccctgcagcagcgccgagataatcacgaagcccaaatcgaactggctaccaatcaccgtttcgaccagcgtgccgataaggttcacgtacagcgccgctccgggtttgcgcagaatcagcaccgccagcgtaccggagaaataccagacggcgtgcacgatgctggcgaaaccgggcagaaccgcaccaaacaccgaagagatcggcatgtacgcgaagttgaatccccagaagatcacgccgcaggccgcgcccagtgtggcaccgaccgcgatgtccaacggctgccatttcagcgacgatacggcgaccgaacgtttcggaagagtatgaatggtggttgcaggcatggtgatctcctagccttaaaggccgcacacagtaatcgaatcacgggcgttccttgacctgtgcggctcgggcgggaacgccacaccacagtgtagccgctcggttcacggctggaagtacccttggaggttatgaagcttaccgatatttcccccgcaatcgcattgaccccgctcgacggccgttaccacaaggccaccgccccgctcgtcgaatacatgagcgaacctgccctgaaccgcgaacgcatgcgtgtcgaagtcgaatggatgattcttctggccaacggctttgagggcaacggcaaccagccaatcgttgacggcgtcaagccgttcactgccgaagagcaggccttcctgcgcgccattcccgaggacttcggcgccgaaggcatcaagcagcacgccgctcatgaggccatcacccaccacgatgtgaaggccgtggagtactacatcgatgatcagatcgacaaggctccggccgagctggccaacatcaacgacgagctgaagaccctcgtgcacttcgcctgcacgtccgaagacattaacaacctctccatcgcccgttgcgtcaagaacgcgatggaaaacgtgtggaccccggagttcaagcgcatcatcgaccacctcgccggcaaggccgaggaattcaaggatatgccgctgctctccctcacccacggccagccggccacgccgaccacgctcggcaaggagctcgccgtctacgtctaccgtctgaaccgtcaactcaagcacatcgaaaaccaggagtacttgggcaagatcaacggcgcgaccggcacgttcggcgcccacctggccgcatgcccggatgtcgactgggtcgccgtctcccgcgaattcgtcaccaaccgcatgggcctgacctggaacccgctgaccacgcagatcgaaagccacgactggcaggccgagctgtactccaccgtctcccacgccaaccgcatcatgcacaacctgtgtgtggacgtgtggatgtacatctcccgtggagtgttcgcccaggtgccggtcaagggtgccactggttcctccaccatgccgcacaaggtcaacccgattcgtttcgagaacgccgaagccaacttcgaaatcagctgctcgctgctcgacaccctctccgccacgctggtggaatcccgttggcagcgcgatctgaccgattcgaccacccagcgcaacatcggttccgcgctcggctactccttgctcgccctgaccaacctcatgggcggccttgagtccatccacccgaacacccacgtcatcgagcgtgagcttgatgagaactgggaggtgcttggcgagccgatccaaaccgccatgcgcgcctgcgagctcaagggcctgccgggcatggacaagccgtacgagaaggtcaaggagcttatgcgcggccacaccatcaacaaggaacaggtcgagcagttcatcgaccagcagtccttcgacccggaaaccgccgctcgcttgaaggctctgacccccgccacctacaccggtgtggccagccagctcgtcgctttcgaccgctgaaataggtgcgatgcgagtccctcgagcccatcgcatccaccacactactgcgctgagtcacaaaccaaaccgcaaactgaaccgaacaaggacaggcgtcaggtaaccatttcatgactactgaacaggagcagtccactacggaagatcgcccggacaaggcgacctcctccactaccgaccggccgatcgcctctggtgacggccggtcggccagttttgctgtcagcggaccggacagcccggcaaccgacgacagcaacgattccggaccgtacatcgacgacatcgctccgcgccgcacgcgcgacttcggcgatctgacccgggccggtctgtcgctgttgatggccgccgtggtcatggtgttcgccgtgtatctgggcggcatgacgcgcggcgtcgaatccgacgcacacaccgcagcccaggtcatcaactggttggctgacttcccctccaccgtgctgacgcagctggccaccatcgtcatcgtgatcatcgtgctcgctcaattgctactggcccgggaatggctgcaggccgcggtgtccgcgctggccatgttcgccggctacggcatggtgtgggtcgtatcgacggcaatcagcagtctgaacgatttcaccctgccaatggcactagtctcagccgccacctcatacggctccgggctgttgcccgacatctacgccggcatggcgtccttcctgaccgccgccgggccacgccgcacccgctccacggtcaaatggagctggaatatcctgtatgccatcgctgcggtgatggtggtgctgtcgtggcattcggtcaccggcatgctggtgtcgatggccgccggccgcacagtgggcatgctgatccgattcgtggtcggcacgcagaacaagggcgtgtggggccaagatctggtcgccgccctgaaaggcatcggactggacaccgcctcgctgattcggcatcaggagcccggcatcggccacggttcactggccgtcacgctggacgacgatctggccgaaggctcgcgcatctacgatctggataccacggacaaccgtcgtttcatcgtttccgtcatcgacgcgcagacccataccgtcggctatctgaagcagttgtgggactgggtgcgtttcaccagtgtgtccatccgacgtgaccgttccgtgcgtgacgccgtccagcatcatttcgccatgctgctgggtctgcacaatatcaaactgcccgcgcccgcaccctacggcatcgccgataccgacgaatccgcgattctggtgctggatgcacacaccatcgaactgcccgccaacctgaacacgcttaccaaggcggatgccgtggcctacatgcgctacctgtccgtggcgagccggcgcggctatacgcaccggcgcatcacgccggacacgctcgcccggcttgaagacggcaccgtcgtgattgccggctggctcaacggcgacaacgcttccggtccggccaacaccgcgctcgacaaagttcagctgctagtgctgttcgccgcgctgatcggcgtggaaccggcggtggaggccgcccgcgaggcgtggggagacacgactctgacggccttggccccgttcattcagaaggtcgcggtcccctcccccacgcgcgcgctggaatcctgggacaagcagctgctcaagggcctgaggagtcgtatcaccgcgctggctgacgaggaggcggtggaatccgccgaaccggtgacgctggcccgattctcctggcgttcgatgatcaccatgctgctggtcatcgtggccgtggtcgtggtcttcacccaactgaagcccgaggagatcatcaccgcgctgaccaacgccaacccgttgatggcggtggtgacgctcgcgttcggtgtctgcggctggatcggctcgtcgatttcgctcggttccctgatggcgcggcacaagcgtgacaatatgggcgtcttcatgagccaggtggcaggcggcttcgccaccgtatccatgccagccggcgtgggcccctcgttcgtcaacctgcagttcctgcgcaaatccggctatcgcaacacccaggcgaccgcaattatgagcgccgcgctcgtggtgtattacgccgtgtacttctccatgctggtcatcatcggcctgttcaccggccgcaacatgttctccggcgcaatcccgacaaacacgttggttatcgtgctgggcgttgtggtcgtggtgctgtccattgcgatgatgattccaccgttgcgccactgggtgacccgtcgtcttatgccgctggccaagacgtatatcaaccagctgctggacgtgctttcccagccccgacagctcacagtcagctgcctgggcgcgctgttccagaacgcgaccactgggctcgctttctgggcggccctgcaagcgttcggccattcatcgaatccgattgaaacgacgttcgtcttcctgctggcctatgcattgggttccgcagtgcccactccaggcggtctgggcggtgtggaagcggcgctgacattcgcgttcgtggcggtcggagtgccgcagggcgtggcgctttccgccactttgctgcaccgcgtggtgttctactggctgcgcattccgctgggcgcggcggccatgaagtggcttgacaagcataatcttgtctgattcgtctattttcatacccccttcggggaaatagatgtgaaaacccttataaaacgcgggttttcgcagaaacatgcgctagtatcattgatgacaacatggactaagcaaaagtgcttgtcccctgacccaagaaggatgctttatggcatacaacaagtctgacctcgtttcgaagatcgcccagaagtccaacctgaccaaggctcaggccgaggctgctgttaacgccttccaggatgtgttcgtcgaggccatgaagtccggcgaaggcctgaagctcaccggcctgttctccgctgagcgcgtcaagcgcgccgctcgcaccggccgcaacccgcgcactggcgagcagattgacattccggcttcctacggcgttcgtatctccgctggctccctgctgaagaaggccgtcaccgagtgaccttctgctcgtagcgattacttcgagcattactgacgacaaagaccccgaccgagatggtcggggtctttttgttgtggtgctgtgacgtgttgtccaaccgtattattccggactagttcagcgcttccataagctgctcgaatcccagggtgggctcggcctcgaagggatcgaggagtatggcttcccggcgttcgggggcggtcagggtcaggtgggtccagtcggcggagaactgggctccgacgttcagggccgcgtccacgaaccggccacgcagggcggcacgggtgtcggtcggcggattgtgcacggcgtattccacgttgtctcctgtcagcagctcacgcatctggttgcgggctatgagcgaaccgtacaggcgaccgttggcgatgtcgtggtagtcgagctcaagctgttccatctgggcgaaggtgacgtccgggcgacggcgtttgagcgcgtcgaacagacgcttcttggcggcccagtccacgcggtcggcgagcgcatcgtatgcaccacgctccagcgcgtccagaacgcggctccactcccccataatcgtgtcgatcgtggtggccggcagcgaacttgccagcgcatcgccatgggtttcgatgaaggccttgaccgccgcataataccggcgctgcagacccagtgcggacacggattcgcctgattcgagcgtcagttcggcgcgcggattgtcaaggaatcgactgaccgtgcgattggcggcagccggatcagcaaaggcatactgctcgaatccggacggaacgccatggcggaaggcgtcttcgatcgcgcacagcacaaggtgcgtgacggcaagcttcatccatgtggaccattgcgaacggttcgagtcgccgatgatcacatgcagccggcggaaggagtcggggtcggcgtgcggttcgtcgcgcgtgttgaccatcgggcgggagcgggtggtggccgaggagacggcctcgtccaggaagtccgcgcgctgggtgatctggaagccgtccggggtcatgcggccggcaccggtgtacagctggcgggtgatgaggaacggcagcagctggtgttcgatggtctccaacggcacgaagcggcggaccaggtagttttcgtggcagccgaaggcgtggccggcggagtcgacgttgtttttgaacacatggatcgtggcgtgtgcgccgtaggattcgcgcagcttgcgctgggccttcagggctaggttgcgcatcacgtgttcgccggcgaggtcctgggccagggcctcgcgcgggtcgcgcgcttcggcggtggcgtattcggggtgggatccgacgtccagatacagacgtgagccattggccagatacgtgttggtggagcgggaacgggagacgatgggctggaacatggtcatcgccacctggccggcgtccacggggcgttcggcaccggtgaccgccacgccgtattcggtttcgacgccgaaaatacggcagaacccgtccatctcggcggatggtacgggttccgtggcgtgcagggagcgggtgccgctgtcacgcagttggggcatcactcgccgcctttttgcacgaagctgttgacgtattcctcggcgttggtttccaaggcggattcgatgtcgtcgaggatgtcgtccaacacgtcggcttggtcggtggactcggtttgggcggcggcctgcgtggtggcgagggcgtcgtcttcctgggtcgcggcctgctgtgcttgaggttgttcgaattgttgtggcatgttgtcttctttttgggctgtcaaactcccctcagtcagccttcggccgacggctcccctcacccgaggggagccggaggagtcaaaaaattatcgctggttgatggagtcgagccacggatactgctgcaggtaatgctgcagttcgcggatgatgagtccattggaggccactacatcgttatcgtgacgccagtggatgcgttcgccgtcccaacggctcagcgtgccctgtgcctcccagaccactacggtgccggcggcgatgcccgcgatatcccacacgtgcagcatcggctcgaagtaggcgtcataggtgccgtcggccactttgcacaggtcgagcgagacggggcccacgcgcttgatgtcggccgggcgtccggcgagcgaggaggccacgtcgagcgcacgctgcgattcgctggggatgaaggacatgccgtagctcagcacagaaccatccagcgaggaggtcatcgacggcacgaccttgtcgcgcttctcgccgaccgcggttttgtggatgcgcacggcacccgctcccctggcggccaggtaggtcaggccgagggccggggcgtgcacgatgccgatgatcggcttgggctcgttgtccgggccgaattcgaacagggcggcggtcaccgtccattcgctcatgcgacgtacgtagttgatcacaccgtcgatcttgccgatgtaccagtaacgctggccagggcggctttcggcggggcgggtggtccagaagccgtcgaagtgggcgatgtcggcgattctggcgctcatgaagcgcatgatcttgttgtccacttcaagcttgtagcgggggccacggtccgcgttctcggtgctcggctgggcgaggttacgcggattgagttggtcgtggagggcatgctggccggcttcttcgagcaggccggcgactttgagcgcaaggttgcgcaggtcctgtggggtctcttcgcgtgtttcttccatagctaccaagtctatcgttcggcgttgatggccagcgacttcagcagatcgatggcgtgttcggctgaattgagttcggtttcgcagtgcgccttggtgaaggcgagcggatcggagatgtcgagggagaacaggtgatggtcggtagcggccatatggccggcattgccgtagaattcgaccgcctcgccctcgtctgcggcgcgcgggtcgcgaacagtgagtcgggaccagctggcggcggccacctcatcgccgaattgcgccacgagttttgccctgagccaggcgcgggtgtcttccggcggttcggtggtggcgcgtgcgatgtcggcggcgctcaccacccgttcggtgcggggttcgagtttggtgaagatgctgtccgcggggtcgagcgccgcccatttcaggtcgatgaccttcagtcgcggatcattccatccgttggccacgccgggtgcggacgttgtggtgattttgcggcgcagtttttcgagcagctgccatttgagcagccattcgatgcggctggcctcgccggtcatggccagacgttcgtcatcgtcggcggcatggcggatggaggcgcagtcgatgagcgcctgctgccacatcgccataatggatgtggtggatttgtccggccaggcgggttcgccggcggtgtcggtaccttcgaccagtgcggcaacctggtagacggcttggcgcagtttgagctggataagccatgcgttggtttcgccgccgttggccagcggcaagattgcccccagcgtcaggtcgcgggaaacggtgtgtatggcctcgactgggtcagacagttcgagttcgtcgaggaaggcgttcaggtcgaatccggcctcgtccgcatgttcgagcagccacagcagcatgctcgtggtgccgagtttcagtgtctgcggcacctccatgcgattggcgtcgccgacgatgacgtgcagacggcggtatgcatcggtggagtgggattcgtcgcgcgtattgatgatcgggcgttcgaaggtggtttgcaggccgactttggcgtggatgtagtcggcgcgctggctgagctggtagcccgggatctcgctgttctcgccaatccctacgcggccggagccggcgtagatctggcgggtgacgaagtggagggtcatcaggcgtgtgaccaagtcgaatggcaccgcgcgggccatcatatagttctcgtgcgtgccccagcaggagcccttgccatccacattgttgcgatgcagggcaatgggagtgccagtctgtttgcgggcgcgttcggtggcggcctgcatgatgaggtctccggcgtggtcgtatcggaccgcttcgaacgggtcggtggtttccggcgccgagtattcggggtgggcgtggtccacatagacgcggccgccattgggggcgatcacgttggtgatgttgagctgcggggcgtcggtgagcatgtccgggcgggcggcggcgcgttcgagacgggtgccgcgcgcgtcgttgaccgggtcctcctgccggtagtcccagcggatggatttgctgtggctgtccgcggcgccgttcaccacgtcgaaggacagttgcaccggattgtagcggtccggggtgttcagggataccgcgtattcggtttcggtgcccatcactcgtttaacggtcatgtagtgctccttgagcttgagctattcggcggtgcggatgcggcggatcgggtccatgccgttgatgcgcgaccattgttcggggtccacgtcggccatggaatcgcgggtctcgcggtattcgtcttccacggcggcagcgagcagcggcacggtgagtgccacgtccaagccggtttcgatggattccttgaccgctcgggtcttggcccggtccacgatgttcttgagcatcgcgccggagaccacgtcggccaggaacaacgcatgccactggccgttctcctcctgcacgtcgcatagatggcggcgttcggaggttccgtagatgtcatgcaccagcacggcggacaaggcgtgcgcgtcgacgccatcttccagaggcaggtcgtcggtgaggtaatggtccacgatggcgatggcctgattggttttgggccggccgacgcgaatcttgacgtcgagacgccccggtcgcaacacagccggatcgatcatgtccacgcggttggaggcaccgattaccatcacattgtcgagtgattccacgccgtcgagttcggagaggaactggggcacaatcgtggtctccacatcggaggagacgccggagccgcgggtgcgtagcagcgaatccatctcatcgatgaacacgaccaccggattgccgtccgcggcgcgttcacgggcgcgctggaaaatcaggcgaatcagtcgttcggattcaccgacgtatttgttgagcagttccgggcccttgacggacaggaacacgcccttgacatgggtttcggccggactgattgcgccgtcgccattcgaatcgtaaccaccctcgcatagggcgttcgccacggccttggcaatcatcgtcttgccgttgccgggcggaccgtacagcagcacgccctttggcggcttcaaatcgtagcgctcaaacagcgcacgatgctggaacggcagttggacggcgtccctgatacgaccgatctcactatccaggccgccgatgtcggcgaacgtgacatccggggtctcctccagcaccagatccttgtcgccctcggcgggcagcacttcgatggcgaggcggacggacggatcgacgataatacggtcgccctgattgatgcccgcatacgcgagcgcgccggaacggcggatgagcacgggattgccggaggcgtcggtaacgatcagtcgaccgtcgtcaagtacctgcttgacactgcgaatctggcccacggtgtcagcatcgcgctgctcgaccagcacgagcttctcgttgagcatcacggtggccccggcggtcaggcgggcggcgttgacgttggaggccacaggcaccaccatgcggcgggtgccggaaatgacttcggccgacgcgtgctggatgccgtcttcatcggtgcgggtgaaatcgaccttgaccatggtggcgaaggtgagcggcggctgagcgagctgggcgagctgtgacttcgccttggtcagttccttgccggcgcggctcagcgcttcggcgagcgcatggttcttggccatcaggcgatcgttcagcgcggcgagatcttcggtgtcgctcatgcgggttcttcgcttcccttctatccgggattttcggcaacttatggcagtcggcagaccctattcgttgccgtcggcggatttcctgttacgtataacagtacgcacttttcgcaccacgaaccatacgatgaccacaatcacggccgcgatgaccacgtcctcgaacacgccgagcgcgccttgaatcgagcaccactggtcgccgagcaggtaaccggcggaaacgaggatggtgttccacacggccgagccgagcagggtccagccggtgaagtgcaggaagttcatgcggttgaatccggcgggaatcgaaatcagcgagcgtaccacgggaatcacgcggccgatgagcaccgaccatgtgccgtatttggtgaaccagtcgttggctttgctcacgtctttgcggctgacgccggggattctgtctgccgcgagattgatgcgatgcaggcccacccagcgggagatgccgtacaaggtccaggcacccagtacggagccgatggtggcccagatgattgcgcccggcagactcagggtgccgcgtgcggcggtgaagccggagagcggaaggatgacttcggacgggatgggcgggaagatggattcgagggcgatggccaaggccacgccgataccgccgatggtttccatcagcatgatcagccagtcggtgatggtgccgatcaggccgggttcggtggtggtgcagatgggtgtggggtcggttgcaagaatagtggcggctgccatggaaaaattcatagagggcattgtcccaaggttttcccagaatcagaagcatgacgcaagaagatgtgcattttgttgacaagtccgccgagagcgaagttgggagcccggctgattctgcggtttctgtgccgacgctgagcaagcccggcctgctggttatggatgtggactccacgctcattgacgaagaggttatcgacgagttgggcgtggtggctggctgcggtgaggagattgccggagtgaccgcacgcgccatgcgcggcgaactggagttctgcgatgcgctgcgcgcacgagtggccctgttggagggcctgccgatctccgtgttcgacacggtgcatgacaagctgcatttcaccaagggtgcgctggagcttatcgacacgctgcatgaacacggttggaaggtcggcgtggtgtccggcggcttccatgaagtggtcgatatgctggcggccgagggccatatcgactattggattgccaaccggcttgaggttgccgatgggtgcttgaccggcaaggtgctcggcgaaatcgtgagcaagaccgtgaagttgcacgccttgcagacatgggcggaccgtttgggtattccgatgagccagaccgtggctgtgggcgatggcgccaacgatattccgatgattcaggccgccggcctgggtctcgcgttctgtgccaagccaaagacccagctcgccgccgacaaagccatcaacgaccgcgacctaacccacgtactcgattacctgcgccggtaaaattttaccgacctcggctccggcacttatagttgagccatgactacttcaggcgcagaacagttgacgcttgcggggctggctccccgcaagcggcgtaaacgtgcgcctgcggagcatacgccggccgagcagcatcccatagcgcaagtcgtgttggatgtgcaggcgctccacctcggccagacattcgattacttcattgatgaaaaagacagcgaggccgcacagccgggtgtgctggtgcgcgtgcggtttggcggtcaaagggtcagcggcgtgatctgggcacgcaccgataccagcgataccccgcgctcttcgattcgctatatcgaacgggtgttgagccccgatgtgctggttcccgcttcgatgcgtgaggatatcggtctgattgccaaagcctatggcggcacacgggccaatattctgcgtttcgctgtgccaccgcgcgtggccaaggtggaggccgaacagcggttagccgcgtcgttccgccgaccggtcggcggctccctaccagataatacgcaaggcggttttgccgggcgtggcaccaatcccgatgggaccatgcctgctgactctacctttgccgttgccagtaccgtttcggagggggctgcgcaggggtatcgtcgtctgaccgccaattacgccgacgtcaatgtgcttcatgatgcgcttaccggtcagcgtttccgatcttttgtgtttgattcgctgcccggtgcacaggagtggcaacggaacatggcatggatggtggccactgcgctgagtgccggtaaagctgccgtggttgaattgcccaccatgcgcgaggtcgaagacctgatgcctatgctgcgcaattatgggctcaaaccgttcgcccctgctccggccggcggctgggtgggcgacgtcgccgtgcttaacgcggagaccatgcccgcggccgaccggtatcgcacctatctggctgtggcgttgggacaggtgaaggtggtgatcggcacccgtgcggtgatgtatgcgccggttgcaggcccggcgctgttcgccattctggaggatgccgcctatcagaacatggacggtatgatgccatatccacaggcccgtggcgtgatgcggctgcgcgccaagtcccatggcggcgtgttcgtggccatggccaatgcgcgcaccccgcaaagccagtgggaaaacaccggtccaggtacagtggagaccccagtgagcggctattccaccacaattcatccgctcgcctcgccgctgaaggacgccactccttgggtgcgttggctcaatcgcgatgaacttgcgcgtcttgccgacccgtccatcggggcgcgcgtgccgcatacggccgtccgcgtgctatctaaggctttggagagcggccccgtgctgctgtccattccgcaagacagcgtcagtgagactctgagttgtgcgaaatgccatcgtcaggcgcgttgtgccaagtgttctggaccgttgcaactaccggccgaccgccgggattccacaccgcgatgccgctggtgtggggctgctgccatcaattggaagtgcccgggctgtgggcatgaacgtatgcgtgtggtgcgcgtgggtgctgcaggcactgcggctgaactggccgggttgttccgcggcgtgccagtagttttgtccagcaagacgcagggcctggtgcgcgatgtggcttgtcagccgatgatcgtcatcgccactcccggtttcgaaccgcgcgtgcgtccggtcagtgccgagcagggatcggctggccatgagtatcgtgccgtggccgtgctcgacgcttggaccagcttgtatgcgttgggcgtggatgctcgcttggatacattgaccgcgtggatgcgtgcggtgtcgttgtgcgcgccgcgttcccgtggcggccaggcgttgattctcggcgaaaccgacccgtccatcgcccaatcgctgatgctctgggattcgaggattcttgcagccaaggatcttgaggagcgtgtggagaccggtatgccgccggccgtggccgccgcctgcgtatggggacgccgtgatgcggtgatgacgctgatgcagcgtatcggcgcgctgggcggcgattggacggcctgcggcgagctgcccggcatgttgggcccggtgccgatcgcgcaaccggacacggtcgacgcccgggaactcgaagccacggccgaccgggtgaaggcagtaatccgtgtgccgcagagtcgacgagccgagctggcggcccgactgcaccgggaaaccgctcgtcatgtggcgtcccgcgaacccggcgagcttcgcttccgagtagatcccaaggacctgatctaatcgtcttcaacacgtgaaacgataattacagaatgaacatcgctagaaggaggacactatgaagggttggcctggagagccggatatggattacgacgtgctggtcgcggatggcgaggccgctgcgaacgccggcaagccgatcaccgacgtgatcttcgatttcggcaacgtgctgatttactgggatccggtcgccgtactcatcccccgctacagccagaagaccatcgacgaattcctcgacaacgacatctccggcttctacgatgtcaacgacctgatggacggcggcaccagcaccgacgaggccatcgccatcatgcgccgtgacaagggcgataagtgggcggacatcctcgactactacatcaagaacttccgcgactccctgaccggcatcgtgccgggcgcgcgcgtgctggtcaatgacctgaaggctgccggcatcggcgtgtggggcctgagcaactgggaatccagtctgttccacgtggccgaggaacagtgcgatattttgcagcagcttgatggcaagctcgtctccggttttgtcaagctgcgcaagccgcacaaggaaatctacggggccgcgttgaaccagttcggcatcaaggccgatggcgcgttgttcatcgacgacaaggccatgaacatcgtcggctcgaatgcggccggcatccgtggcgtacgtttccaggatccggtcaagctgcgtgaactgctcatcgccaatggcgtgaacattccggccgtgcagtgagcatcgacatttcaaggaggaccatgctcaaactcgtgttcgccggcacccccgacgtggcggtgccctcgctcaaggcctttgccaccgatccacgttttgatgtggtcggcgtcattacccgccccgatgcgcctaccggtcgcggccgcaagctcacgcccagcccggtcaaggcgacggctctggagctcgggttgcccgtcatcgatctcaaaccccgctcccccgaattcatggaggcgttgaacgacctgcatgcggatatcgccgctgtcatcgcctatggcaatatcctgcccaagaacgtgcttgatgcggtgcccatgggctggtacaacctgcatttctccaacctgccgaagtggcgtggcgccgctcccgcccagcgtgcgatttgggcgggcgacccgaccaccggcgccgacgtgttcaaggtgggcgagggtttggatgatggcccgatcgtcgcttccctgaccatcgaactgaccggccgtgagacttccggcgaactgcttgaccgtctggccgaggaaggcgcgcccatgtatgtggatgcgctggccgccgtaggtgaaggcaccgccacattcaccgcgcagccggccgagagcctggaatacgcgcacaagatcacggtgaaggacgcccgcatcagttggacggacgaggccgaggccatcgaccgtcagattcgcgcctgcacgccgcatcccggggcatggaccgaactgtttgcggaagggccaatcgccgataatgacgagtcaaccgctaaatccctcgccctgcatattctcgccgcacaaccggccgaccagtccaatcccaacactccggccgagcttcagcccggcgagctgaaggtgggcaagaagaacgtgtgggttggtaccggcagtacgccgctggaactcacccaagtcaaggcgcaaggcaagaaggccatgcgcgccgccgactgggcccgaggcgcacgcctctcccccgccgcctgcgtgcgataacaagcaatatcgctcccgccttcggaagcacagtaaaggcccggcatcttcataaagaagatgccgggcctttcagctatgcaatcggcgatcagttgagaccggagagcttgttgatcagctccgggtcacgcgtcgcacccttgtcggccgagcgggcgaaggcggcgtacgccttcagcgcctgggagacgtggcggttgcggtgagccacgtagccgtcgccagcctcaagctcgcgacgacgctcgtccagctgctcgtcagtcagttcgacgttcacggaacgggcttcgatatcgatatcgatgatgtcgccgttcttgatgagcgccaccgggcccttgttggcagcctcaggcgccatgtggccgatggccagaccggaggaaccgccggagtagcgaccgtcggtgagcatggcgacctgtttgccgatgcccttgcccttgacgaaggaggtcgggtacagcatttcctgcatacccgggccgcccttcggaccctcgtaacgaatcacaagcgccatgccaggcttcagggtgtcgttcagaatgacctcgatggcctgctcctgggagtcgaccaccagagccggtccacggaacttccagatctccggcggaacaccggcggtcttgaccacgcagccgtcgggggccaggttgccgcgcagcacggcgaggccgccttcgtgaatctccgggtggttgatgtcgtggatggcgccgttggtgcggtcgcggtcgagcgagtcgaacagggtggtgtgcgtccacggctccggggagatgatgtggccaggagcggccttgtacatctgctgggcttcctcggtgcaggtcgggcgcatgatgtcccaatcggccagcttggcttccagcgtcgggtagtcgatggaatgcacgttggtgtgcagcttgccggcgcggtcgagctcgccgaggatgccggtgatgccgccggcgcgatgcacgtcggaaatctcccacttgccggacggcgaggccttgcagatgcacggcacggtgtgggaaatacgctcgatgtcgtccagggtgaagtccacgtcggcggactgggccatggcgaggatgtgcagcacggtgttggtggaaccgcccatggccacatccatggtcatggcgttctcgaaggcttccttggtggcgatggagcgcggcagcacggaatcgtcggaatcgtcgtagtactggtgagcgatcttgacgacttgcttggcggcacgcttgaacaggtccttgcggtaggagtgggaggcgaggatggtgccgttgccgggcagagccaggccgatggcctcggtcaggcagttcatcgagttggcggtgaacatgccggcgcaggagccgcaggtcgggcagacggtcttctcatagttgagcagttcctcatcggagacgctgtcgtcagcggtggcgtacatcacgtcgataaggtcggtgctcttgactgtgccgtcggcgagcaccgtggtgccggcctccatcgggccaccggagacgaacacggtcggaatgttgaggcgcagggctgccatcagcatgcccggcacgaccttgtcgcagttcgggatgcagatgagtgcgtcggcacagtgcgcgttgcactggtattcgacggtgtcggcgatgatgtcgcgggagggcagggagtagagcatgccagtgtggcccatggcgatgccgtcatccacggccatcgtgttgaactcgcgcggaatgccgccggcttccttgatagcctcggaaacgatgcggccgaccttgttgaggtggacatggccgggcaggaactcatcgaacgagttggcgatggcgatgatgggcttcttgcccatgtcgtctccgctgacgcccgcagcacggtagagggctcgggcgcctgcaaagacgcgccctgacataatttttgcagatcgcatttcagtcatggttctattcaagcctttgcgagggacacgccatttgtcaagagtcgaataatggaatttgcaaaaacgtaatgtttctcacacatttttttggaatacattcctctggcgagagtccggtatagggctgacagaagtccccccaaacggctacacttgcttcggttgagatagattttccaatgtttggagataagaacaatggcttttggtactgacccgacacccgacggtcttgcgaacccgccgatcgacgatctgatgaagcacgccgattccaagtacgcgctggccattttcgccgctaagcgcgcacgccagatcaactcctacttcacgcagctcaacgagggcctgctgcagaacgtcggcccactggtcgaataccagaacaacgagaagcctctgtccatcgccttccgcgagatcgacgagggtctgcttgaggagaccttgggcgaggacgacgccaacgagggcaactgatcgattcagacgattcgtttggattgtttggacagttcgtcgccgaatgatggtgtgagagttctctcacaactgattttgagcgacacgcttgcctgagttatcgcaatcagctataactcatcatcaggagcgaacaagacgtaaggctcgagccaccgcgctggttggcacgagcctttatttatgcccgcttccgcagtgacaagtaaaaattgacaccgtatcattgtgcctcgcatcccgcggggcgataagtcctgaagaaagggatgatatgacagaagaacatcggcttatttccgccgaatccgtgaccgaaggccaccctgacaaggtctgcgatcaaatctccgacgccattcttgatgatctgctggcccaggatccgtccagccatgtggccgtggagacctccgccgccaccggtgtgttcctggtcttcggcgaagtcacgtccaaggggtactgcgacgtgcagtccaaggtccgcgaaaccctgcgcaacatcggctacgcctcctccgaagtcggccttgacgccgattcctgcggcgttgtggtggccatcaccgagcaaagcgccgaaatcaaccagggcgttgcccgtctgactggcgatcaggagaccgccgccagccgcgaagagcgttccgaagcacagggtgccggcgatcagggcgtgatgtttggctacgccaccgacgagactccgacgctgatgccgcttccgatctatttggcacatcgcctcgccttccgtctgaccgaggtccgcaagtccggtgaagtgccgcacctgcgcccggacggcaagacccaggtaaccattgagtatgacgataacgataagcccgttcgtctggacaccgtgctgatctccacccagcatgatcctgaggttacgcaggattggcttgctgttgagctgaagaagcacgtgattgacccggtgcttgatgaggtgctgggttccaaggtgccgcatgacaactaccgccagctggtcaacccgaccggttcgttcatcctgggcggcccggcggccgacgccggtctgaccggccgcaagatcatcgtcgacacctacggtggcgccgcccaccacggcggtggcgcgttctccggcaaggacccgtccaaggtcgatcgttccgccgcgtacgccacccgttgggttgcgaagaacatcgtagctgccggcttggctcacaaagtcgagatccagatcgcctacgctattggcgttgccgacccggtgtccgtcaacgtggagaccttcggcaccgagcaaggcgtgacgcgcggccagatcgccgccgccgtgcgcaaggtcttcgatctgcgccccgctgcgattatcgacgagctggatctgaaacgtccgatttatctgaagaccgccgcgtatggtcacttcggccgcacggacgttgagttcccgtgggagaagaccgacaaggtcgaggagctcaaggccgcgattgctgcggagtgaggtgctctaattaggacagagagatcataagaataccataagaatagggtgctttccgctgttgatggcggaaagcaccctatttgtttttcgcagtgtcctacgaatctgttcttatttcaatccacgcaccccagtggggtgcgaccagcggccttcgcggtcgtggcggtttcgtcgaaatttcaatccacgcaccccagtggggtgcgactcaccgtcaacatcccaatcaacgtcacccacagcatttcaatccacgcaccccagtggggtgcgacataacgcgatattcaacatttgcgaatatgccacacgtcgctcatcggcttcaacacgttatttcaatccacgcaccccagtggggtgcgactagccgcaacagcattattccaacaatgcatcaacatttcaatccacgcaccccagtggggtgcgaccggattggctggagcgcaacttaccagggcgtggtgacatttcaatccacgcaccccagtggggtgcgacacgaccggtataccgtccggcgcgttgaaatcgggatttcaatccacgcaccccagtggggtgcgacggcactatttggactgtgccaaatatgagactcgttttatcgcgaaaatccatgtacatcgctcaatacacaaattctcgaaccaaaaacatcaacagaccatccacttttgagttatcaaacgacgaggagaacataatcagtctccaagcattcattaatctcagtgcgaaagaacaagtatttcatgagaactcagagttcgcgctggtcacatggctgcagcatcaagcatcgatgctcagccacgattttaatcgtatcgtcctatactgtcctacctcgttttatccaccttggtcttcatcacagtaaggttttgcattgcccagtcatcatggaaaaccgtcacacgaaccgacattagagcatcatcacgtcatcgattggcaggtgccgctgtcttccgcgatgctcaatcttcgaagaatacttcgcccctaaattgtagtaacgcaggctatcttgcgattcgtccattatttccgccaaatcatgtttcaaaatcagatagtcagacggtgacaccgaacattcaaagacgctattctgcacgcgttggccgtatttcatgcaggttttagccacgttccgtagtctgcgtttgccttcaggcgactccgtattgacgtcataggccacgacaaccatcattccaacacctcatcccggtttccatctctagttggctcaaactccaatgcccctcggcaagaccaaagtaccctcccaagaagaactacttccacatgaacggcgggtaagcgtccaaatcgccgcgaatcgcacggttgagcagcaacgcctgtgcatggggcaccaatccccacggtatcttctcgttgaagaacgggtgggtgattgtctcctgcttgcgtttctgccaagcagcaagcacggttttgcgcccgccctcggaaagaaacacgccgccattctctcggatctcgaactgggaaggcttgaccgctccagtgttgatgagcgtcagcacgaaacggtcggcgatagccggacggaattcttcaaccagatccaaggccagggaagcacgtcccggtcggtcagtgtgcaggaatcccacatagggatcgagcccgactccctgcaaggcagcgatgcaatcgctggtcagaatcgagtacacgaatgacatcaacgcattcgtccgatccaatggcggtctgcggctacgctgctggaagaagaaatcgtccttgttgcgcagaatcaagtcgtcgaaagcgaagaaatagtctttggctgccagcccttccacgccgcgcagctcatcgatggacgtgcagtcgcgcgcgttcagcagagcctgccgcagtttctcgctttgctccgcgatacgctcgctgttgacgcgcagcgcatggtcgcgcttggtccgctcaagaacccaacggcagttgtagatctttcctataatgaacgactgcgcaaaaggcagggccgcgtcttcgtcgtccgcgaaacggaactgctcgcgacgaagtagtacgtttcgattcttctcaccaagtatcgagcagtagtaacggccgtgtggagagaagaacgaaaggccgacgccaaattccgaacacttgcccatcaacgccggcgacgagcccttataagaaaaactcatgatgccttctagggagcgcagtggaatcctcccgagcgtggtatctccttgctggacaatgacattgtcgttcttcaacgataggtaagcgtcatcgctggtgacatacagtgtgttaagtaactgcttcatatgtggtctgacttctccccgatttccacttccccacgcacggcttcctcaatgaactgtctcgccgaacgcgtcctgaccagtttcggtagacagacatcgtgcagggagcacgcccgacaggccttcgacggtctgaccttcggcgtatgacctcgagcgaataagtcgtgcatctcccccgtcatcgtgacgattcgattgcgcaaagattcgtcaaaactgacccgctcccggtgtctggtctgttggtagaacaaagcgccttctggaatcgcacaggccagcatctcctccagacacatggcctccgcgcaaagttgaaggcgatccgcatccgtctgcttgggcgcaccatgtttgtattccacggggtaaggaagccaagtgccggatcgtccatgcaacggtacgccagcctccgattgccggaactcgaccacatcacacgcaccggtaattcccaaccgccgcgaaaacacacgcagatcacgcataatcagcaagctgccgcgcgtttccgattcactgtaatcgtgggccctatcgtgttcaagagaaccagccgtcgtgagatagttatcctcccactgctgctcgatatgaattaaagcccactgccgcctgcaaaacgcaaaatgctgaaggccagaaagagccagccaatcatcctctggataatccgattgtgcatgcatacgcttcctctcgcaaacaattcgtgcaattggttttttgatgcgcgtaaatgaaggccagggcttgctgaatgccaaccccggcctgagtggagaatcacagtgtatgatcgaccatttcacttacgttgacggagtctggaatggtctcacggttcacatggacttcataatcaccaaagctgcgagcaacgtccaccccatcgcgcttatgaacgtcgatactgtcaaaaagtttccacgaaggagcgtcaccaagtgcgctactgtgtttgaatacgtacagtttacgaaccgccatattgccgcgtgccgcagaacgatcgaactcgaacatgttcagaattgctcgccatagcatgtcaagatcttcattgcagaaaccggtgacgttctgtgcgagcttggcagaaatgtagccgttcatgcgatacaggccatagggaatgatgaatttgttgcccatggtgttgttcttgtcggcggcatctgcctccgtggtgactgcgatgcgggtgatggaaatttcttggacattaaccggatcaatggaacgggcaaacccgagctgcactggaccccgtacctgaccgcatgacaggctgcctttgacgaatgtggtcatcactgcaccgaaagttcggatatcgaagaattggctgcacatataatctcgtagacgcaaatccaatgtggggtcagatttcttcaatgtcttaatttccttggcaaaatctttgctctctggacgagcatcgatatgctccgcttccaatgcctcactatccagacggttgagcgtctgcctgttctggatgtagattcgccaaggggcctgctcgcccatggccgtctgcacatagtcgcgaatcttacgcttgatgcacacatccgtcgtcaggccattaccggtttcaatgtcgactcgaggcatgttgccggagtccgggtcgccgttgggattaccgtccttcacatcaaagaggatagtgaaatcataacggttctcgatgggtttacggtcagtcattgttctctccctgttcgctgttgttcttgttggctttgtcgaatcgtttctgattttcgaaataatatccgagttggaatgcgccgcgttcctccagggaaagacgggagggataacggtcccccactctcccggtcagctcgcccagggccttgtccaacttgactttcagccccttcgacttccaggctttccgcatgtgcttcgccgcgagatctcccagaatcgggaagatgcgggccggagtcgtggatgcactggtgaaatacttgtccttgatcgtggtattgatgtcgggtatggcggccaactgaatctgctcgtagatggagaacatgcggccgagcacatacggcaggtagccgttctcttcattgatgtccatccgtagcacctccttgaattgtgcattggttgttgcgcgtaggtaatacgctttgatgatcgccgccttatccggcgagacatcatgttcggcattgatccgacgctccaccgcgttgatcagagtcatcggatacggcgtgtcttcaagtatcgctttcatgacggcacccgccatttgcggtgacactttcgcggttttgctttgtgttcgtatggtctgattcaacaatctccatgtaggcagggaggtcgtcgaatcgtagacggggcgccggatggcggtatctcgataatgccgatcgatgttgcgcgcgaacgccccgaacgtatcggtcagatagaaccgaaccgaaagacgtgccgcattgggggacagcgcgagaatatggatttattggtctctatctgcgcggagccggaacgcccgtgtgtccggccgcatctacggccggacacacggactcctcacacgaaaatgccatcagcggtcgcaccgtccagcctcaaccccagacgcgacgagtacaagcccatgtcacgcaggacgaagcaatcctcttcgtcgctcttccccggcccgaccgccaataccgcccccaccgacttcaactgttcgagatgccgcggccatacattgaccgcgtatatgccgagtttgcgaaacagcgtgcgatccatatcgccacgctccaatcgttcgcacaggagcgacccctcaccgggcagcgggatatacaccggtatggttggcgtatcgatgagcctgaaccgtttggcaatgtccgcaaaaggccaattcgcatcacgcccgtgcagcggcaggatacgcttccgatcaagcgcatcattgccgacgttcgcgcgggcgacaccaccatttctcagacatagcacctccgcgaaatacgcgcgaaccgcctcatccgtgttcaaatcagcatgacgatcggccaccgcccggaacgccgcgatgttctgccggaggaacggggcgcagccaccttccgtggaaaacacatggaccacactctccgaagcgaggcgacgaccttcgcgattgcagcgtccggccgtctggatgacggaatccagtccggcctcttcacgatatgcgacgggaaagtcgacgtccacgccggcctcgatcaaggaggtggaaaccacgcggcatgacgctccggcatccagtcgatcccggatctcagcgaacagtcgctgccgatccgccgcacactgcagcgtggtcaggcagaaactgccttcggcgtcatcttccgccagccggtcatggagatactgggctttgctacgcgtgttcaccacacacagcacctgcttgtggcttcccagtcgctctgcaagtgcatccaatgcgatatcgccaagtcgtttgatggtcacacgacggaacgagtccctatcgtcacgagtgaacggcgaaatctcaggaacacgcacatggtcgccatcgaaggattcatcaaacagtggctgcagctccggttgcgtggcggtgcacaacaccgccgtggagccgtatcgctccacaagctcggcaatcgcccgtacacacggcctcagatacggcaccggcaacgtctgcgcctcgtcgaagacgataacggaatccgctatgttgtgcagcttacggcatcgcgaggttgcattcgagtacaggctttcaaagaactgcaccgccgtggtgatcacgatcggcgtgttccagttctccgcggcaagcgcgcgcctgagatccgtttcatccatgtcggactcgttcttgagctggtatggcgcctcggagtagtggggcaacacggcgtccgttccaatgatcggggttgcggattctccgctggaaagcatccgaatatttgcccagatcgtggaccagaccagccagcaatccgtcgtcaagatacccgaagcccttggcaaaccctccggcgaggcaaccggccatggccaggtgctccgcgcaggtctcatacccgtgatcgctggttctcgcatagtacgtcgcacacattatcgtcacctcgtcaatcgctccgtatcgcaacgccatcgtcgcagcgcaagcataccacgaaacaaaaaagtggtcccgccgctaaacggcgggaccacttcatgcattccacgcgcccgtgcaccacgcatcaggcgcggtcagtccgccatggcatcacgccttggcgacctccacacccagctcggcaccttccttcacttcgaaggaggtagccagcgtctcatgggcgatcagatcgcggaactgctcgacatcggccacattggcggccggcacggtcagcaccagggcgatgcgatcggcgatgtccagatcggcagccttacgtgcgtcctgcacagaacgaatcacgtcgcgggcgtagccttcggccagcaaatcggcatcc

SEQ ID NO: 228 - DNA, 40692 bp, Unknown
  R101_18m  MAG No. k141_34288
cagggcgtggtctgggccggctacgacaagcacttcctgcccaactacggcgtgttcgacgaattccgcatcttctccgccggcgaccgctccgtgaccctcgacgtggacggcgccaccatgtcgttcggccgcaactccgccttcctcgactgcttcatcgagcgcgacctcgaggccggcaagatcaccgagaccgacgcccaggagctcatcgacaacatcgtcatgaagctgcgtatcgtccgcttcctgcgcaccaaggactacgacaacatcttctccggcgacccgtactgggcgacctggtccgacgccggcttcggcgacgatggccgtccgatggtcaccaagacctccttccgtctgctcaacaccctgacccttgagcacctcggacctggccctgagccgaacatcaccatcttctgggatccgaagctgccggaaggctacaagcgcttctgcgccaagatctccatcgacacctcggccatccagtacgagtccgacaaggaaatccgttcccactggggcgacgacgccgccatcgcatgctgcgtctccccgatgcgcgtgggcaagcagatgcagttcttcgccgctcgcgtgaactccgccaaggccctgctgtacgccatcaacggcggccgcgatgagatgaccggcatgcaggtcatcgacaagggcgtcatcgacccgatcgccccggaggccgacggcaccttggactacgagaaggtcaagaacaactacgagaaggcgctcgagtggctgtccgaaacctacgtcgaagcgctgaacatcatccactacatgcacgataagtacgcctacgagtccatcgagatggccctacacgacaaggaggtgtaccgcaccctcggttgcggcatgtccggtctgtccatcgccgccgactccctgtccgccatcaagtacgccaaggtgtacccgatcaccaacaaggaagccaagaacctcgaaggccacgagtacgagtacgtcgaaggcgccgacgacgatctggtcgtcggctaccgcaccgagggcgagttcccggtctacggcaacgatgacgatcgcgccgacgacatcgccaagtgggttgtctccactgtgatgggccaggtcaagcgtctgcccgtctaccgtggcgccgtcccgacccagtccatcctgaccatcacctccaacgtggagtacggcaagaacaccggttccttcccgtcccgccacaagaagggcaccccgtacgccccgggcgccaacccggagaacggcatggactcgcacggcatgctgccgtccatgttctccgtcggcaagatcgactacaacgacgccctcgacggcatctcgctgaccaacaccatcacccccgatggcctgggccgcgatgaagccgagcgcatcggcaacctggtcggcatcctggacgcgggcaacggccacggcctctaccacgcgaacatcaacgttctgcgccgcgagaccatggaggatgccgtcgagcaccccgaaaagtacccgcacctgaccgtgcgtgtctccggctacgcggtgaacttcgtcaagctcaccaaggagcagcagctcgacgtcatctcccgtaccttccaccagggcgccgtcgtcgactgatgaccaaccccgcgatacgcggcaatgactaatcgaaggggtggggctcagctccaccccttcgttatttcccccacacagactttcgcatcatttgggacaggaggacgacgatgcccgcaacacccacgttccgcaccactaccaggcatatgctcaaggaatcgaagacctatgcctcacagactttgatgggcggcctttccggctttgaatccccaatcggactcgaccgacgtgaccgcctttccgccctgaaatccggcgatatcggcttcgtccactcttgggacatcaacacctccgtggatggaccgggcacccgcatgaccgtgttcatgtccggctgcccgctgcgctgccagtactgccagaacccggacacttggaagatgcgcgacggcaagcccgtctaccttgacgccatgatcaagaaggtcgatcgttacaaggacctgttcaaggccacgcatggcggtatcaccttctccggcggcgaatccatgatgcagcccgccttcgtctcgcgtgtgttccatgccgccaaggagatgggcgtgcacacctgcctcgatacgtccggcttcctcaacacgagctacaccgacgagatgctcgaggacatcgacctgtgtctgctcgacgtcaaatccggcgacgaggagacctatcacaaggtcaccggcggcaccttgcagcccaccatcgattttggccagcgactggctaaggccggcaagaagatctgggtacgatttgtgctcgtgccgggcctgaccgactccgaagagaacgtcgaaaacgtggcgaagatctgcgagtccttcggcgatgccgtcgaacacatcgacgtgctgggattccaccagcttggccgcccgaagtggcacgaactgcgcatcccatacccgctggagaaccagaagggacccaacgccgccacccgttcgcgggtggccaaccagttcaaggaccacggcttcaccgtgttttaaattgcagggccgaaccgcgcgtaaataccacgattcggcccgttcgcccataccctagagatatggccgacatctacgcatttcctacgggagagtccaacgacggacgccccgtgcgccctcagggtgtgccggatgaagtatgggcagccgtcgaatccgtcagcaccatgaagcgcatccatgacgtgcgctatcgggagattcccgtgccttccaccttggccgattatggtatcggcgtggaattcgaagcgggagagcgtgccctcggcgatgccttttccgccggtcttggcaacgatgccgaatcacgaatcgccacaggctggatcatgatgctttatgctcatgagctgcgcattgaccgggattccaactggcgttgcgtggcgttcgcgcggctgccgctggaaaccgccgaaaacgattctctgacccccggcatgtactgggatgacatgtgcgactatttcgacggcatcgagccggattcggtatccggcacagtcaccgtgacccaaaacacggcttttggttcgatggccggctccaccagcgccgggtgtgagattcgcgtctcatggaccccgcttgacgggaccggaccggacggtactatggacgccggcgcacaaatccgctcgtgggccgcattcatcagatccaccatccgttttgaggaggatgacgccagttgagtgacgtccgtgacaccgaaccccgactgctgaaagagcctcgcgggggagtgcccgatgtcacttcgtcgctggatggctatcatcgagcctgcgatgcgctggccgaggcgacgggctcgctggccgccgacgccgaacgggcgtccggattccgctatggacatgaggattggctgattcagttcaaacgtgaaggtgcgggcatcgccttgcttgatcccgtcgccctgacacgggccggagctgactggaatgaattcaatgacgccgtgggcgatgctacatggattctgcatgattctctgatggacttgcccggattcgccgaaatcgggctcaaacccaaagccctgttcgacacggaaatagcggcgcgattgctcggcctgcaccgcttcggtctggccgccgtcaccgaacactacctcggcatcacgctggccaaagagcattccgccgccgattggtcctaccgtccgctgccgcgcgactggcgcaactatgcggcgctcgacgtggaggtgcttatcgaactcgaaaccttgatgcgtcgtgacctgaaagccgcaggcaaggacgagtgggccgctgaagagttttctcacgctttggttgcgggccttgccccgcgcaaacctcatccgattccttggctgcgtatctcgcgcatcacccagctgagtcgtgatccgaggggcttggccatcgccaaatccctatgggaggagcgcgaccggctcgcccggcgatacgacatcgctcccagcctgttattgaccgattcgtcaatcatcgaggccgcgaccaacaagccgcacaatgccgcccaattccgcgcactccgatccctgaacgagcgtgtgcgcattcataccggcaccgagcaggacaaaatgttcgagcggtacgcgccgattcagcgtacggtcaagccgaaggtctggaagcaggccatcgaccgcgccatggccctgaagcccacccaatggcctaccatgcccgcccccgaacaggacgaaaacggtgtggtgaacgcgccccgatccatgcggctgtggcaacagcgccatccggagcgttatgaccgtctgcaacgggtgcggcgtgtgatcaaccgcatcgccgaagacacccgcacgccggccgagatgatcatcaagccacagatcctacgcaacctgtgctgggtggaagacccggtggaagtggacgtcgagacgttcctgatcgagcagggcgcaagaaactggcaggtgaaactcattgcaccgtccgtaagtggcgttatcatgtagaggttgccttacggcagaactgtaagaaataacgacttttgaggagtcattagcgtgaagatcagcgttcgtaacctcgagcccaccaaggtgaagctcaccgtcactgttgaaccggaagagctcaacccgtatctggatgcggcccgtaaggaaatcgccaagcaggtgaacgttcccggcttccgtaagggccacgttcccggcaagatcatcgaccagcgcatcggtttcgccgccgtcgccggtgaggccgtgaacgacgcggtcccggagctgtactccaaggccctggatgagaagaagattcgtccgatggctcagccggagttcgacgtgcaggatgttccgcagtccgccaacgacgagaccaagctgaagttcaccgccaccgtcgagcgtcgtcctgacatcgaactgccggaaatcgacggtcttgagatcgccatctccaagccggaagtcaaggatgaggacgtcgacaagcgcctcgagaccctgcgtcagcgcttcggcaccttggtcggcgtggaccgcccggccgccaagggcgacttcgccaacatcgacctgactgctgagattgacggcgagaccgtcgactcccaggaaggcgtgagctacgagctcggctccaacaccatgctcgacggtctggacgaggctcttgacggcctgtccgccggcgaggagaccaccttcgaaggcacgctggaagccggcgagcacgagggccagaaggccaccgtgaaggtcaaggtcaactccgtcaaggctgaggaactgccggagctgaacgatgagttcgcttccgaagcttccgagttcgacactctggacgagctcaaggctgacatccgcaaggctgccgctcaggacgccgaaggtcgtcaggccaccgaggctcgcgatgccttcatcgccaagctgcaggaaggcctcgagatcccggtgccgaagggtgtcaaggccaacatggtcgaagagcagctcaagggcatgaccccggacccggagaaggccaccaaggagcagaaggctcaggccgaggagaccgtggagaaggatctgcgcgatcagatggtgctcgacgctctggccgagaagctggacgttcaggtgtcccagtccgacgtgttcaacttcctcgcttccatcgcccagcagtacggcatggacccgaacaacttcatccaggccatcatcaagaatggccagcttggctccgctgtgcaggaagtcggccgttccaagggcctgctcgccggcatgcgcgccgtcaagttcaccgctgatggcgaggttgtggacctctccggcttcctgggcgaggccgctgaggacgaagagtccgagtccgtcgaggccgcttccgctgctgccgccgtggccgacgaactgtccgccaaggatgacgccaaggacgctgagtgagcatagcctcatcgcgttagcgtgattgtttgagcccggaatcgtgtttcacggttccgggctcttcctattctggtaaaaggactatttctttggctcccctttggggggagctgtcgggcgtagcgagactgaggggagttcccaaggcatactcgttgcatagcgtgcggaggttgacatgcagccaacggttactatcaaacgccttggttggctcgctgcggcgaccattgtgctcggcgtgctcatcggtgtgggagcaggtctgctgaccctgttgctctacggcgttgaacatgtgctgctcggctacatcgaaggcccagaattgtctggtccattcggcgtgcccgctgcacgccgtgtgatatcggtgaccgtgggactcggcatcgcgggcattatctggtatctgctacgacacaaaacgactgtggtgccctcagtcaagaaggccgtggcgggaaagcgaatgcctttctggcaaaccattgtgcatgtggtgttgcagattttcatcgtcggctccggtgcctcgatcggccgagaagtcgccccacgcgaactcggcgccatgatcgcgcaacgtttttgcgacctgttccatatcgagggcgttgatggtatcgaccggcgcatggtggtggcagtggctgccggtgccggtctaggaggcgtctatgacgcgccgctggccggcatgttcttcaccgtcgaaatcctgttggtggatgtgacgatcgaaaaggttgcgtttggactgggcgtgtctgccattgccgcattcgtggcggttgcgatcaaagggcattgcctgttctacgacatcaccgccatgcaaccggaatccacgccaacgttaatgctgttcgctctgatctgcggtgcggcatgtggagtgggcggcgcattgttccgaaaaggttcgcaatgggcggaagcgcacaagccgaccggtaaggccattctgtggcagatgccgctggctggtctcatcaccggtttggtggcgattgttgtgccgcaggtgatgggcaacggccgtgccgcagtgcaacttggattcagcacgttcattcctgaaaccgccggcactgctggtgccatgcagtcggcatcttcagcggccgcctctccatggaacttgctgacgggcggcggtaatgtatccgattcggcctctggcgggggagcgggctctggaatggcctcgttttgggccatgcttcagggtgggagcggctcttctggatccgtgatgaacgccggtttcccgctgtcccagtccaatatctggatgttgctgggtgtgttggcactcacttttgtcgccaaggcgctggtgacgctgatgaccattcgctccggtgcatcgggcggtgtgctgcagcccggcatcgcattaggttccacgctgggtgcgatgctcggcctcgtatggatactgatgtttccgactgattcggtaaccgcgtgtgccttgatcggtgcggcttcgttgctttcggcctcacagcaggcaccgcttatggccatgtgcttggtgatggagctgaccgaagcgccgattaccttcttcgtgccagtcggcatggccgtggccacgtcgtcgttgatatcaaagtggttgctgagtcgtaagtaagtagatgcatatattctggctcccctctctgaggggagctgtcgaacacagtgagactgaggggagccgaggtaaagaaagctatgtcagaaaacaccgaagtccgtgcggcacttgaatcgcttgccgctgagccgctcactgagcagattgactactatcgaaagccattcatggtgttgtgggccgccattcaggaggccgccagcgatgtggccgaagactacgacttgcctgcggatatggcccaattatgggtggccgaacagatgcgccaagtcgccgattcactggtcgatcggctcgcggaaaaagccgtggcccatggtgccagcaagtccaacgtggcgcgagccgccggtgccagccccgccaatgccgcccgtcgcttcccgcgtctgggcgacgatgccgcctcccagacccgcctcctcattgacgacgtcctcgacaccttggaataacccgaaatccctacgctacccgccaaaaagcacgcgaaaagccgccttcagtcgcttcaaggcggtagtctgaacaatgttcgagtaattagaaggagaatcaaggtgagcaatacctttgcgaccttgccggtcatggcgggcgatgacgtcccggccggccccgtcgacccgattttcaaccgtctgctcaaagaccgcatcatctggatgggtgaagaggtcaaggacgatatggccaaccgcatctgcgctcagctgctgatgctggccgccgaggacccgaagaaggacatctggctgtacatcaactcgccgggcggctccatcaccgcaggcatggccatctacgacaccatgcagctcatcgagcctgacgtggcgaccgtgggcctgggcatgtgcgcttccatgggccagttcctgctgagctccggcaccaagggcaagcgttacctgacctcgcacgcccgtgtgctcatgcaccagccttccggcggcatcggcggcaccgccactgacgtgcgcatcaacgccgagctcatcatggacatgaagaaaaccatgagcgagctgaccgctgagcagaccggccacaccctcgaggagatctaccgcgacaacgaatacgaccactggttcaccgcccaggaagccctcgactatggcttcgtggacaagctcgtgaccacgccggacaccatcggcaacaaccagcagggggagtgagactcatggcaagtgaagaagcaaagttcgccgcccgtgccgaccgcttggccggccgtcatggcgtagccggtttcatgccggccgccgcccgcgcagcccagcccgcgccgaccaaccgttacatcatgccgcagttcgtggagaagaccccgtatggcatgaagacccaggacgcctactcccgcctgttcgaggatcgcatcatcttcctcggcgtgcaggtggacgacgcctccgccgacgacgtgatggcccagctgctggtccttgaatcccaggatccgaaccgtgacgtgatgatgtacatcaactcacccggcggttcgatgacggccatgaccgccatctacgacaccatgcagtacatcaagcccgacgtgcagaccgtgtgtctcggccaggccgcctccgccgccgccattctgctggcctccggcaccaagggcaagcgcctgatgctgccgaacgcccgtgtgctcatccaccagccggccatcgaccaaggattcggcaaggccacggagattgaaatccaggccaaggaaatgctccgcatgcgcgaatggctggaggaaaccctcgccaagcacaccggtcaggacgtggagaagattcgccgcgacatcgaagtggacactttcctgaccgctcctgaagccaaggaatacggcatcgtggacgaggtgctggaacaccgccagtaaaacttccgaacattgcaataccctcggtcggcaacgaccgggggtattgtatttcaaggatgacaatgataatgcgcagcgtggcggttcgacggtgcggcgcggtcggcaaaggagaatcatgggacgtgtggtgagctacaacgaggacgtaccccgttgcacgttctgcggcaaaaccgaacgtcaggtcagaaaactggtggccggtcccaacgcctccatctgcgatgaatgcatcgccctgtgcgtggacatcatctccgaggagcgtgtcaaagatgccgaggtcaattcgctgagcctgcccaagcccgctcagatcttcgattatctcaaccgctacgtcatcggtcaggagaacgccaagcgcgcattgtccgtggccgtatacaatcattacaaacgcgtcaatatggagcttcaggagtccgctgagcagcttgacgggaataacgggcacggtggccagaccggcaaacaagccaagcaatccgctcccgcccagacgcgtgctacccgccgcaacagtgaccctttggctgacgttgaggtcgccaaatcaaacattctgttgctcggccccaccggtgtgggcaaaacctatcttgcacaggcgttggcccgcgtaatgaacgtgccattcgtcatcaccgacgccaccaccctgaccgaggccggctatgtaggcgacgatgtggaaaccgtgctccaacgtcttctccaagccgcggatggcgacgtaagccgagcccagcacggcatcatctacattgacgaaatcgataagatcgcgcgcaaatcaggtgagaacacctccatcacccgtgacgtgtccggtgagggcgttcagcaggcgttgctgaagattttggaaggcaccatcgcctccgtgccgttggagggcacgcgcaagcataaggagcaggacactgcgcagatggacacacgcggcatcctattcatctgcggcggtgcgttcgtgggactgacggatattgttcgcaagcgattgggccgtcgagagaccggcttcggcgcgaattggcacgacgccgacatgaaagacgaggaattgctcgaacaggtcaatgccgatgatctggccgagttcgggctgttgcctgagttcatcggacgtttgccggtcgccagtgtgctgaaggaacttaccgtagacgatctgacggcgattctcacccagccagccaacgcgctgatcaagcagtaccgtaagctgttcgccgtcgacggcgtcgacctgcagttcaccgaacaggccattcgggcgattgctgatatcgccatcaagcaggggaccggcgcacgcgggttgcgttcgattatcgaacgtacgttgcaggacacgatgttccagttgccgagtttggatgatgtgaagcaggtgattgtggacaaggcgtccgtagagggttccagtacgcccaaactcttgcgcgaagccgtggatgtgccgcagggacgcctcaaagttgcgtagtcggttttgcttgaccgagtccgtacacatgcggcgtgaggccagtaaatacgccgttgcggtggcgattaggatggtgcgactcgccgcaacacgccgagttgcattcatctgaacggcgtgtattatatatcgagttgtctgaaaagacaacatgcgccagtagcccagcggattagagcagctgactacggatcagcaggtcgcaggttcgaatcctgtctggcgcactcccgaaccacggggacaacagtggtatgcgccagtagcccagcggattagagcagctgactacggatcagcaggtcgcaggttcgaatcctgtctggcgcacagtaagcctcgaaagcgaaatgcttccgaggcttttccaattgtattggcccgtttgagtcggccacacaggggtggggtaaggttgcccttcgcgactcagcccggagcggaacgtcctgagatattccgtactattacatacggttcatccaagagagtacagtaaggagacgcgatggccacgaccgccggtgcgaagaagggactctggtccaccatcaggcgaatcgccgcttcagaccgtatttccggactcatcatgctcggcttcgcgctcaccggcctggtgctcgcgaacctgcccgccaccgcgcatgcgttcgagaccgtcgcggaaacgcatctgttcatcccctacaccaatctcgacctgcctattggccactgggcccaggatggtctgcttaccatcttcttcctgaccgtgggcctcgaactgaagcaggaactcaccaccggctcgcttgccaatccgaaagcggccgccgtgccgatgctgtgcgcggtgggcggcatgatcgccccgcccatcctgttcctggccgtcacggcattgttctctcagatcgggcctggtgaacccggcacgctgattctgaccaccaccggcagcagcatcccgttctcggagatgtcgcacggctgggcagtacccaccgccacggatatcgcgttctcactggccgtgctcgccctgtttgccaaggccctgcccggttcgatccgcgcgttcctgatgacgcttgccaccgtcgatgacttgctggccattattctgatcgccgtattcttctcctcgatcaacgcctggtattggttcatcggcatcgccgtatgcgccgccatctgggcatacctcgtacgactgaaaaaagtgccgtggatcgcggtcggcatcgtcggcgtcctcgcttggatcatgatgttcgaggcaggcgtgcaccccacactggccggcgtgctggttggcctgctgaccccctcccgtgaaatgcacggcgaactctcaccgcgtgccgaacgctatgccaacaagcttcagccattctccgcactgctggccctgcccatcttcgccctgttcgccaccggcgtgcacttcgagtcgatgagcccgctgttgctggcttcgccgttggttatcgcactgattgtggctttggtggtcggcaaacctttgggcatcatcaccaccgcatggctggccacgcatgtgggcgggctcaagatggccaaggggctgcgcgtacgtgacatgattcccgctgccgtcgcctgcggcattggttttactgtgtccttcctcatcgcctcgctggcgtacaagaacgcggaactttccgctgaggcgcgcttcggcgtgctggtggcctccctgatcgccgccgcgatttccggtgtgctgctgagccgtcagtccaagagattcgagaaggccgcagccgcagcagcggccgatgcggaggatgacgaatcgattgatggcgatggcgctggtcagaccggtcgcaccacaaagtccaccacgcccacggaacaccccggcaccctcgccgacggcaccgccagtgtggagattgacttccgccactgatggcttagacgatccctactccatttgttggccttgtttcgtgaagaacgtacgctgagtgtcactcaccgtacgttcttcacgaagtcaaggatgatttcgcggaaaacgtatgcagagcttcaggcgctagaatgcgaagagtcgatagcaccgtacaggaggatattggatggcaaagaagcagaagaaatccaagaagaacgacggcaaaaaggccgctgaagcaaagaatctagccgaggccgcatccaagtccacagtcgtggacgatatggaaccattggaagccacagccgcgaatgatgcggcaacgttggaggccgagatggcaaccgaggctgccgcaacgccggtgaacccggtcgacttggaggacgtctcgccgctgggcgacacctatcatcgcggcccggtgattctacgcggccagatgattccctcggacaataccaccgccaatctgctgaaacccgaccaggacaccgactggctgcacatggacccatggcgtgtgctgcgcatccaatcggaattcgtggacggtttcggggcgctcgccgagctcggacctgcggtctctattttcggctccgcacgcacccagcgcaccgaatcgatctacaaggcggcccggcgcatgggtagccagatagccaagcgcaacatcgccgtcatcaccggcggtggtcccggcatcatggaagccgcgaataggggagcggcactggctggcggcaaatccgtgggactcggcatcgaattgccgcacgagcaggggttgaaccagtgggtgaacctcggcatgagcttccggtacttctttgtgcggaaaaccatgttcgtcaagtattcctccggcgtgatcgtgtgcccgggcggcttcggcacactggatgagatgttcgagctgctgaccttggtccagacccacaaggtggcgaatattccggtggtgctctacggcaaggaatactggcaggggctctttgactggctcaacggtccggtggccgagcacggcatgatttcggcaatcgacccgaaactggtcaccgtgaccgatgacgccgacgaagccgtggaggtggccgtcagtgcaattgtgaggtaagcgagatagagtggctcccctctccgaggggagccaagggcagagttactttttgtaggcgatgagcaggcctgtgccgtcaggggtaagcgtggactcgaaaccttcgtcatcttcgacggtggtgagcagctcacgcatggcgatggccttgtcgctgcggtcggccggattaatcatgccgccctgaccgtcctccaacgccagcacatcggtgaacacgatcacgccgtgcgcgcgcagcagacgggaggcctgggcgaacgtggcggcatagttctcggcgtcgcccgccaccacgatcagatcgtaatcattggcgttgaggcgcggcagaaacacgctggccggggcgttcaccgcacgcaacgtggtgtcggtctcatcctgcagttcggcgaacgccttgcgaatcagcgcgatgccctgagcggtggaatcgaccgcagtcagcaggcccttgttatccagcgcatgggcgagctgcaaggtctccaccagcgagccggtgcctacggcgatgaccgaagcggcgccggtgatgcgcaccagcatgcccagcagacgggcctgcgcggccgaaccctgcaactggccggacttgtcggcggccgtacgggcgtcggtcaacgcattggattcacgttcgcgcgcgtgttcctcggtgaattcccatgccttggcgaggttggtgtactgtgttctgtccataattcgttcctttatgtcttctctcgtgcgggcacccggtggatgtatcgactacgtgttgcagcgattgccgtagctggtcgtggcgcggcttagcgctcgcggaccttggccacgatctgccacatctcctcgcccacatcgatgccgcgcgggcagtggcgggagcaggcgcgcacggactggcaggcggccacgccgtcggcggtgtcgatggcgtccatacgctccatggccttggtgtcgcgcgaatcgttgacgaaacgggaggcccaaatcagcgaggccgggccgatgaaagcgtcgccgccggcgtacaccgggcaggcaccttcgcacacgccgcaggcgatgcagttgctcagcagctcgtatttggcgagttgttcggggttctgcaggtattcgaacacgtccaccttgccttcggcggtggtggcgagcacgccgtccgcctgaagatatggggtgagcttccttatttggttgagcatcgggtcgatgtcggcgatgaggtcgcgctgcggcgggaagccgggcagggatgccagttcgatgactcccagcgagccgtttgcggccgagtcctggtcggctgccgcgtttgcgccgttttccgcggaatcgtcggattcttcggactcggtgccggtgtgccggaacccttcgtcatcgacttcggggatggcgccgggctgcttggcccaatcgcggatggtggccgtgcacagcagggtgggggtgccgttgatggccacggcgtccgaaccgcacatgccgtgaccgcacgaatagcggaaggccagcgtcgggtcgacggtgcgtttgatggtcagcaggcagtcgagcacggtgtccgaggggcgcgcgggaatcgtgtattcctgcacccactgcttgccgcgcggacgacggcgtgccgccgaatccgagccgccgccgaatggggagcttttcttggcgaacgggctgccgccgcgtgcacgttcggcgcgctcgggtcgcggcatgaaacgatgcacttgcagggtaaccgtcgtgttgctcgcctcagccatgttctgcctccatgaaacagtgggatgtcaagtccaatatcagccaacctattgtgccacaagccctaggcggcttggtattaccaccagcggatcagtactcgcgcttcttgggtggatagtcggtgatgtgcaccggcttgaaacttgccggaccatcatcggcgaccatcgagtgagcaaggaaatgctcatcgtcgcgttcggggaaatcaagtcgttgcatggatccgcgggattcctgacgggattcggaagcgtgcagcatggcctcggccagttcgattagatgacggacttcccagatggcggtgacctcctgattgaaagcggcggtcttgtcatgggcccgcaaggtatcggcaaccggtgtgatgtcgttgttgatctgagtcaacgctgtatcgatggtctgagcggtgcaacgtacggccagagcctgctccatcactgatccgagttgggccatgagctgataaggattggcggtgggcccgccatcgtctgaatcgtccatcggtccggcgagcagttcgtcaagctctgccttgcgggaatcggcagcctgatcggcggcatcggtcagcatgtcatcggtcgaatcatcggccatgggggagtcaaccgggttctcgacgatgcgtgcggccatcgtctgaccagcacgtgtaccgaacaggcaggcgtcgagcagagaattgccgcccagacgattcgcaccatgtacggagacacaagagcattcgccagcggagaacagtccatcgactacctgcacggcaccgtcggcccaacggtacacctcgccattggtggtgatggggatgccgcccatcgtgtaatgcgcagtgggcttgataggcaccaggtccttggccggatcgaggttcgcgtactgctcgatggtttcgaccacctgcggtagcacttccttcatacgttcggggtcgatgccggtcatgtccagccagacgcagtccttcggaccatccgggtccttcgggtcggcgacgccgcggccggcgtcgatctccgccatgatggagcgggagaccacgtctcgcgcggccagatccctatgctccggggcgtagcgttccataaacggctcaccgtcggcgttcctcaggatgccgccctcggcgcgggccgcctcggacagcaggatgccggtgtgcgcgagcccggtggggtggaactgcacaaattcgatgtcctccagctgcaggccggcggccaaggccaatgccatgccgtcgccggtcaggtcccaggaattcgatgtggtatggaacagtcggcccgcgccaccggtggcaagaagcacgttgcgcgcgtggatggcctgaatcttgcccgaatgcgtgtcaaatgccacgatgccggccgcctgcttgccgtcgtcggcgagcaccaggtcggtcacataccattcctcggcgaactcgacgccggcggccacgcactgctgccacaaggtgtgcagaatctggtggccgatgcggtcggccgcataggcggcgcgcttgaccggggcaccgccgaactcgcgcgtgtggccgccgaaccggcgttgggcgatatgcccgtcatcggtacgggagaaggccacgccctgacgctccaggttgatcacggtctgcggcgcgtattcggcgagcagtttggccgcgtcctggtcgacgagccagtcgccgcccttgatggtgtcgtagtaatgccagtgccagtcatcggactccacattgcccaggctcgcggcgatgccgccctcggccgaaccggtgtgcgaacgcagcggctgcagtttggagaccacgaggatcttcgggtccacgccttgttccttgagctcggtgattttgggggagcgcagcagtcccaacgccgccgacaggccggccgctccggcgccgacgatcaccgcatcatacatatcttccaaacgtttcggactcatgggttcgattctcgcacacccgccgaacagtcttcgagccgtgtcatgaaagccgattagccgacacggctgctcagcttgagtatgccggcatcccgctcgatcactcccttcagctccaatgcgccgagtagctcaagtatggtgccgatattgggaatctcgtcgggtaccgtctctcgcgccacacgcaatagtgcgtccggggtgacgatgagatgtcgtttacggcattcacgaatcaatgccactaatgtgcgttccatttccggcagcttggcgataatgatacgttgttgggcttccttctcgggatcgagcttcggcttgacacgaagatccggcatctgatgcgacgagggcggctcttcacccttgctcttgttggcaccggcctcggcagttgcgctcgccggcccatccttggattgaacgagtgtaggctgagtatgcttggtcctaagacgtttcgaatgacctgaatcttgtgacgactcctgtgacgccgatgattccgaggatgctggcgataacggagtcgttgccggcacttccatggcctcctcgttttcggacgagtcctgacctgtggatttcggtatgcctgggcatgccgccataacgggcttatgccgttcatggcatatatcctcagtggatgtggcggcacacagaatcatcgcccggtggtcgccgatcatcttattgcacccggcgttgcaaggctgattgatgtcaccgggaaccgcatacacttcgcgcagcaattcgcatgcccatcccgcggtgttgagcgctccggaacgcaaccgggcttgcgtcacaatcaatgtggaagacatggccgcgataatgcggttgcggagtagaaaacgacgggcttcgggaatcgtccctgggcacagttcactgatcagtgcaccaccctgcgcctcgatacgttcgaacagcgtgcggttacgcatcggtccgatatggttgagcccgccggcgaatacggcaacggttctgcccacattggcgggcattctgccgtgcagcgcattcaacgctccccaatgtgccgccgcatccgtgcccattgcgcctccggacacgaccagatgcccggcaacgactgcctgttcggctacggtgtgtgccacataccggccgtattcagtcacgtcccgtgaaccgacgatgccgaccggtttggcgcaactggtcaatgcgcgtggatcgcctttgatccacaaacacagcggtggcgcccaatcggagcgaatggacaggtcggccaactgcgagggccaacatggatggccggggccgataatccattgcgtgccatccatagtgaaccagtcggccagttggatgatgtcttgcgagggcaggtccatcatgcggttatgccagccggccagtgcattgcggaaggagcgcatcgcgttcgccgacgccttgcggccccatcgggtgaggccatccacgaacatgcggtcaatacgtgacagcgccgggccgcagattccagatggctggcttggatgggattgcgccaacgcgtgccagagggattcggcgctttccgcgcctttgagcgtggcgtacatcatcacatccgccccatcaagacagaacgtgagcgcggcgcggtataacgtatccgtgggaggcatgggaatggtgcgcgaaacagcgaggcccgtatcgatgtgatccacactgcctgcggtgccgccagattgtcggatatcagtagcgttactcatgtcatcctcgttctcatttcgatgccctgatggacgtcctgctcggtgggggacacgcggccggccagatcggcgagcgtccaagacagacgcatggcgcgatcggccccgcgcaatgtgagttgatgattggacagggcccgattgaccaattccatcgctttcagcgacgtattggcgtgcagccattttcccgaagcttgcgcgttgcacacccatccgtactgtctgaaccggtccttggccacttgacgggcgcgaatcacacgagcttgtattccggcactggactcgccgattggctcgctttgcacggcaatgcgcgagaccggtggcaccgccatctgaatatccacacgatccaatatcggtccggacaatcgcgagaaataacgtatacggtctttttcccggcaagcgcaacgttcgccggtgccgtaatagtatccgcacgggcaggggttggccgccatgatgagttggaatgaggccgggtaataggtgctgccttttgaacgggaaagcgccacatacccggattccaatggttcgcgcaacgtctgcagggcgcgtgcgctgaattccggtgcctcgtccaggaacagaatgcctcgatgcgcgcgcgtgatcgcgccgggaacggcgatgccgttgccaccacccaccaaggccgccgtgctggcggtgtggtgcggtgcctcgaacggcggcatgtcggtgatgccgtactgaggcagtatgccgcacagcgaccgtatcgacgccacctccagttgttccgcctcgttcaacgggcacatgataccgggcatacgtgaggccagcatggttttgccgctgcctggcgggccggtcatgatgagattatgtccgcctgccgccgccacttgcagcgcccatttggcatgttcctgacccagaacctcgttcatatcgccacaatcgttgggatggcttgtgggcgattgatccatggtggtctcgtcggcaaccggtgtatcagtaatcgtataggtggcatcgccgcccatcagttcgatgagctcacccacatgcctcacacccactacatccagtccatccaccatcgaagcctcgtcaagattgcgatggggaacaatcattttgcgcacgccacgttcctcggcatgcagcatgatcgggagcagcccatgaatcggcagcaccgagccgtcaagattcacttcgccgagcacaatggtatcttccaagcaatcatgccctatggcacccgccgcgcataggacgctggccgcgatggccagatcatgcgacgaaccacgtttgggcatggccgcagggctcatgttcacggtcacgcgggtttgcggccaaccgaatccagtggcttgacacgccgatttcacgcgctcgcgggcttcggacaacgatgcatccggcaatccgatgatgctgaagtatggcaagccagggctgatgaaagcctgcacttggacgatgaaggccttaaggccgatcagtccgactgagagagtgctgccgatagccatgtctactcctttcgcaatgtgtttcgcaacgtggctgttttttgggggggacgaattcagaaggcgttttcgatgtgatgcacgagcggtctgcccacccgaagcacgatggtgacgacatcgaaacggactgccgtatgcggcacacgattacgccggtcaagcagccaatcgcaggcggctttcctgagattgtgctgtttcgccggcgtgacggcctcttgcggatatccgtaatgcatggaccggcgtgatttcacttcgacgaacaccaccgtgtactcgggattgagcatcacgatgtccaattcgccgtaacgggtatgccaattgcggctcaaggtcgtccaaccgtgttcctccagccacgcggcggcatactgctcgccgagcgcaccgaactgtttgggcgtcagattgcggtcgcccatcgtggccgcaatccgttccgaaggcagcgttgcctgcggatcaggtgaagccagcatgggctggtgaaaggcaagaccggcgtcgatgccagacttcgtcgtcggctgggtaggtggtaaagcgttcatgattccactgtgcgggttacttatgtaagagcacaagcgcaaccggcaaatgtggatactatgacgcggtttggcgtgttgtggataacgtgtggatgaaaacccggttatccaccattagttcagaaggtttaccaaggctccccagtcgacttccctgtgacgacagacaacccatcggattgttcgctaaacgtgtcagacccagtgagcggagaggggagccaaggtgcggtcacttcaccaaatcggtgagttcgccgaggttcagttcgaagctgacgccacgatcttcgaaatgcggctggttacgggtgctgaccatggcgtggcgcacgaactcaccggcgatttcggccgactcggccagaccgcggccggccatcaccgcgccgcacagggcagatgcgaaggcgtcacccgtgccgtgaatcatgtatggcagcttttcatgagccagctcgatcttgccggcaacaccggtggaagcgctggccacatagttgacgattttgccatcgccatggtcgatgcccttcaacaccacgttcttggcacccaacttcagcagagcaccaagcagctcgttaaccgtggcctcatcaatatcctggccaggatagtcacgcttggtgagaatgctcgcttcggtgaggttcggcatcaacacgtcggcaccatcggccagcgcgcccattgcctcgcacagctccggtgtgtacgtggggtacatttcgccggcgtctcccatcaccgggtcaaccagacgcagcgcgttcggatattcgcggtagagacgctgaatgatcgccacctgatcgggggagccgaggaagcctgaatacacgccatccagctccacgtcttccttctgccaggcatccaagtaaccggagagaatatctgtggtgtcatggaacgtgaacactgcatagcgcgtgtgcgccgagaacagggcggtcggcaccgggcacacatcgcagccggcggccgagagaatcggaatcgcggcggtcagcgagcacttgccgtagccgcacatgtcgtgcacggcggccacgcgcggaatatagtttggatcacggtcatacagtgttacatcggtcatgtctgttcgaatcccttcaccatgttggcggaataattcattggcgatgtttgactgtagtcgttcgtcatgtaaaccatgtaaccgggcggcggaaaaaggaacagacgtcatcaccgagcgggcataccgccttggtgacgggtggaacaagcaatcatcacggacacttgagccatgcgcgaaaggcatggtagcgatatcaccgtgaccgcagtcgaccgtgaaagcgcatgcgtgcggcccggcgtgtcgcgataatttcaacgactttttcgtgacttctgacagtctctcacgtcaatgattccaaggctttataagcccttataggcaagcccgataacgttcggcttgcgccgcgcggcccaagcgtcgtaacttcataaccaacacctcgccaaccgcccgaacacggcaggcgggtggcaaggaaaaatcctcgcgacctagcacaaccaaggagaaagacccatggccgagaacaacaagaagtaccgttttgaaaccctgcagctgcatgtgggccaggagcaggccgacccggccaccgattcccgcgccgtgccgatctaccagaccacctcctacgtcttccacaacttcgaccacgccgaggctcgcttcggtctcgctgacccgggcaacatctacggccgtttgaccaacaccacccagggtgtcttcgaggaccgcatcgccgctcttgaaggtggtaccgcaggccttgccgtcgcctccggtgcagccgccgtagaatacgcggtgcgcaacatcacccagtccggtgaccacatcgtcgccgccaagaacatctacggtggaaccttcaacctgctgcgccacaccctgccgcgtgacggcatcaccaccaccttcgtttccgccgagaacccgcaggagttcgaggacgccatccaggagaacaccaagctcgtctacttcgagaccttcggcaacccgaacgccgacctgccggacttcgaggccatctccgaaatcgcccacaagcatcacctgccggtgatcgtggacaacaccttcgccactccgtacctgttccgcccgctggagcacggcgccgacgtggtggtcgagtccgccaccaagttcatcggcggccacggcaccaccctcggcggtgtgatcgtcgaaggcggcaagttcaactgggccgaggtgccgggcaagttcccgaccctgaccgagccggacccctcctaccacggcctgaacttctacgaggctctcggcggcaccgccttcgtgacccgtatccgcgccatcctgctgcgcgacaccggcgccaccctgtccccgttcgccgccttcctgctgctgcagggcaccgaaaccctgtccctgcgcgtcgagcgccacgtccagaacgcgctgaaggtcgtcgagtacctgcagaccgtgccggaagtcgagtccgtctcccacccgtccatcccgggccgtccggatcacgacctgtacgagaagtacttcccgaacggagcaggctccatcttcaccttcgatatcaagggcggaaaggatgcggctcgcgtcttcatcgacaatctgcacctgttctctctgcttgccaatgtggccgacgcaaagtccctcgtcatccacccggcttccaccacgcactcccaggagaccttggaagagctcgaggaccagggcattcaccagggcaccatccgcctgtccatcggcaccgagaacatcgaggatatcctcgatgacctgaagggcggcttcgaagcccttcgcgcttccggcttggccaagtgaggtcgacaggagggttgacggcccgatgagaaggggcgcgatgctaatggggtgcatcgcgaatcatcgagccgcatggggtgccttccgcctgatcgcttgacccaaggagtagaaagctcgcactgacgtcatgcagtgcgggctttcttgcgtctgtatgcctcacactgtttgcgcagaggcatgaatagtgtgagacctgagacgacataatcctcaaggatgagggccggcgcgtggcccctagcccaattcagtctggcgcacgatggggcgcgccgttatttcttcataagttggaatcgtcatccgggcataaggtccggccaaatatggagaggcattatgaacgtgcagaacccgtccgcatcgcgcggcatcgctattcaggccgtcgacttggtcaagaactacggcaccggcagcaatatggttcacgccctgcgtggcgtgaacgtgagtttcgaacgcggcaaattcaccgccatcatgggcccgtccggctccggcaaatccacgcttatgcacacgctcgccggcctcgactccgccacatccgggcatattcttttcggcggggcagacctgacccgcatggacgacaagcagctcaccttgctacgtcgccacaagatcggcttcatcttccaaagcttcaacctgttgcccatgttcaccgcagagcagaacatcctcatgccgctgactttggccggtgataagcccgaccgtgcctggttcgacctgctcgtagaaaccttgggactcaagcagcgcctgaaccaccgaccgaacgagctgtccggtggccagcagcagcgcgtggccatcgcccgcgcgctgattaccaagccgaagctggtgttcgctgacgagccgaccggcaacctcgactccgtttccagcgccgaagtgctcggcttcctgaagcgttcggtcaacgagcttggccaaaccatcgtcatggtcacgcacgatgcggtggccgcctcctacgccgaccgtgccatcgtattcgccgacggacagatcgtggccgatgaatcgaatcctactgccgaaacgatgaacgagctgcttatggccgaacgcgaacgcgccacgcgcactgccgtcaccagcacacgcgccgacacgctcgcccgtcttgccggcgtagaggatgtgcccaacctgcccatcaccgacgctccattgcccccagccgggagaaccggcaccatacgccatgcccgcgccgccgcacagcacactcgctgagccggaaagcgagagacaggatacccccatgttttccatcactctgaaacttatgaagaaaagcgccaggatgctgattccggcaggcatcgccatcctgatcggcactgcgttcatcgccgctaccttcctgttcggcaacgcgatgaacgatgcgcttgccgcccagaataccgcccagctcggcggcgcgaactacgtgatcagcccggatagcggcaaggacctgaccgataaggaccaggactacatctacacgcgcacggttaacgacttccagcttgaccgcatccgcgccaccaaaggcgtcaaggacgcacgtgccggctacgcgggttccgtgaccgtaacccgtggcaacaagcatgccagcagctacgtcatcaccaccgccacaaagcgcacgctgctgccggtcaccatcacgcaaggagaccagccggcggacagcaacgagatcgccctgaccaagtccgtagccgaccagctcggcgtcaaggtaggggaccgtgtgaccgtcaactcgcaggcggcgcagtatgcgggcaagaccggcgattcggccggtaataccggtgacgctggtgatgagtcggcccagaacgccgatggcacgagctcgcacgacggtgattccgatgccgcgtccggcgcgtccgccccatccgacggcaccgacacggccgccgactccggcatgaccgtgcgcgtggtcggcctcaccgacgacccgaacggtgcctacgcctactacggtggcgcttccgtgctttccgacaacgtcatcaccgcaatggccggcagcaacgatttcggcaacctgcctgtctacctcgtctatctcgacatcgacgatgccagcgacacggccgcggcatccaccgtaaaacaggtcagcacactgctccctaagcatttcagcgtgcaatcccgtgccgcgctcgtcgaggaatccgtcaaaagcatgagctcgggcgaaaccagcatcaccaccatcttcctgctgagcttcggcatgctcgccatgctggtcgcggcactcgtcatcgccaacaccttccaagtgctcgtggcacagcgccgccgcacactcgccctgctgcgcaccatcggcgcgaacaaaagccagctgtatgtctccgtgctgtttgaagccggtgtgctgggactgatcgcctccgcactgggagtgggcctgggcatcggactcatggccgcactatgccagtcgggcctgatgaaagccaccggcatgaccatgcgactggtactatccggtccggtgttcacggtgcctatggcattcggcatcattatgacggtgattgcctcgctaggctccgcgcgttccgctaccgccgtcaccccgctggaagcgttgcgacccatcgaactgaccgacacgcgacgggccggtgtggtccgcgccgtgatttccatgctgctgattgtgggcggcgtggcactgtgcgcattctctgtatggcagatgtccgagaaaatcgccggacgtgattcaatggccgacaagcagtattcgctggtgctgctcgccgccatcatcggatgtgcattgatcttccttggactggtgctttccgccacgttctggctaccggtgctcatgcgcggcgtgggcgcgctggttgcactggccggtccgtccgccaaagtggcacatgcgaacattcagaagaacccgcgccgcgtggccgccaccggtgccgcactgcttatcggcgtgaccctggtctccaccatcgccaccggtgccgccagcgccaagcaaaccatgaacgaggcgctgaccacgcgctacagcgtcgacatgattgccgctggcgccgatatgactggcaaacaggccggcgaggcagccaaagtcaagggcgttcagagcagtatctacgcgccgacccgcatgatgaccatgaaggatgccgacggcaagagcctgagtgtgcttgtcgtgggcgtggatggcgtcgacgcgctgcgcaaggtggtgcgctccgatttgtccggtgtgaccattgatggcgattccgtactgatgcccaagtattccgccgctacaggcaaggatattccgctggacaagagcgttacgttcacggctggagcggccgaagcacaagccgatgccgccaatggtccgtccggtaatgatgcgaacggcagcgccgaaaacggcaatggacaatccggcggcacacagacgctgacgctcaaaccgcggaaggtggactatcgccgcattgcctccaactacgccgcggtcgccttcgtggacgccagccacttcaccaacggtggaatcaaggtcgacgggcatatcatgcttatgcgtattgacgccgagggcgcgggtgttgcgctgaacgacgtattcaccaacgtgcagaatgtgttctccgccagtgctggcgttaccgtgaccggtccggtggccgaacgtacgcaatgggagaccatgatcaacggcatgatggcattgttggtcggtttgattgcggtggctgtgctcatcgccttggtcggcgtagcgaacacgctgagtctgtcggtgatcgaacgcacacgcgaatccgccaccttgcgtgccatcggcatgacgcgcggccaactgcggcgctcgctggcggtggaggcgttgctgctttcgctcgtctccggcgtggtgggagtggtattgggtaccctgttcggctggctcggatcctacatggtgtttagtttgtacggcgacaccgtgttcccgttcgaatgggccaccaacggtgtggtgctcggcgtcgccgcgctcgccgctctgctggccagcgtggcacccgcccgccgggccgtcaaaacgccaccagttgaagccttggccgaagcgtagagcaataagctccctcatcagagggagcttttttgttacaccagcccgttatcgtacgcgaagactacagcctgtacgcggtcacgggcgttgattttggcgaggatatgcgccacgtgggttttgacggtgggaagggagataaagagcttgtccgcgatctcctgattgctcagaccatgggcgatctccaccagcacctcgcgttcacggtcggtaagcagatccagttcgggatcggtgtatgctgggcgtgacgtattggaaccgtcggaagcggccccggcaggggaggggatgccggtcatcgagccggcaccgttgccggccgcaccgccagagacgccgacggcggaaccgtacacggcaccggagcgcgcgacatcgccggtcagcgaaccatgctgcgcgtaaccgtcctgcatcatcttttcgatgagtcgcttggtggcggaaggcgcgataatcgcattgccttggaatacagtacgaatcgaattgagcaacgtttccggttcggtgtccttgagcaggaagcccgaggcgccggcattgatggccgccatcacatactcgtccaaatcgaacgtcgtcagaatgattacgcgcgtcggccggtcgtcagccgattcggccgagacggtcgcgtcggcggccgggctggccgaatcggccgcgttgtccggcgcggcggagagtgaggtaatacggctcgtggcctcaatgccatccatgccgggcatgcgcacatccatcagcaccacgtcgggatgcagggattccgccaacgccacggcttgggcgccgtcggacgcctgcccgaccacctccatatccggttgcgaaccaatgaccatggcaaaaccggcacgtaccagctcctggtcgtccgcaataatcacgcgaatgcttctgctctcgttcatgctctccactgtatccgtttcctatcggagcgccgctccataaacaccctgattgttccctgagttcttattgggcaagtctctcaccggggtaacgttcccgcgtgttgcatctgactatccaacgaagccgccggtcgcaactgcatatccggctgcacaccctcatgggcctcgtcgctgaacccggtttcacgcaacactctcaacagctgacgcatatgagccaatgcggcgcgcccccgagcaccaatcgcggcaaaagccgcttcaatctgcatactatcaggcgcaggttcggcgttgagcatcaccagtccctcgtcagcctgcgcaatcaccgattccagcgtggtcagtacttcggtttgcatcgccgcactaatacggttgcgctctaagttggccgccagcaccttttgccgctcctgctcggctcgcagcgcctcctcgcgtcgcaacagcaccagagcgtttgcgccacgcgaacggctccatcgagccatcgcaatgcaggcaaaaccgaccaacatgattcccgcgcccggcagcaagccggacaaaaccagcctccattttgagagcatggaactaccatcgggcaaaaacagatggaacagctgactgtatccattccacccagccatcaccttgatgcccgcaagccacgaatcggctgccagcgccacgctcacccagcgccaagcggactctcgtccatacaataccgccgaatacacggataccatcgcaaacatattgatggtcaaaatcgatggcaagaacaacagttgcacagcagacagcaccgccatcgccagcgcgctgccctctgggaagcggcgacggaacgccaaaggcgagagcataataatcgtcagcattatagtcggcacgcggttcggcgaatacggggcattgccgatcatttgcaaatcgccatacgtggcggaatcaaatagcgcaatcagcacgatagtggcgataacgtccatcagaagatagtgccgctcggtccactgcgcaaatcgacccacccagttcgactcacgcgtatctccttggtcgagtactttggggcgcgcccgatccatcaatcctcgtatacgcgagataacggttagcaccggatcctccgtatcggtgccagactgtggggcggcaggggagagcggaatcgtagccgccacaataaagccaccattcggccctgggccggcctgcacgctgccacccaacgactcaatgcgttcgtgcataccaaccaatccgtatccgggcttatggccgtctgctgcagacgtcgcgccacggccgttatcggatacggtaatcgacagcacatcgtttgaccagatttcatcgatggtggctttagcaccctcgcccgcatgtttgcgcgtattggtcagcgcttcctgcacaagacggaacacggcggtttccgcgtcggcagacagccggtcaggttgcgctttgccggtcatatgccgggacaccaccagatgaccgtcaaacagcgaatcgatgtcggcatatccggtactgccactcgcaccgaacacattgaacaaacgctgcatatcatgctgcgcgcgttccgcttcatggcgaatcgtacccatcgtgtgcttggcgatggccagatcatgcgcacccgcataccggccgccatccgactgcacaataatcgtggagagcgtatgtgccaccacatcatgcatatcacgggcgatgcgtgcgcgttcggccagcgccgcgatgcgcgtctcctcggcctctttcgccacaatggaagcgttgcgctcgcgcatggccgccagcgtggcgttgcgcgctcgctgccacaaggccatgatgatgacgctcagcacgctcgattcgatgaacgccgcctccatgccgaagtcagcgagcatcttggccccgcagttgacggcgccgcttgcccccacgacgccggtgaccgccgggcatgtgggcatcgtgatggcatcggacagccagccgtcgcggatgacgcgcgaaccggaggaaggtccgtcgaacagcggacccacgttgaaagacaccgaccagaccatcgccgcgaccagtcccatgacgaacgccgtgacgatgaaccgccaggaatgtcggggattgccgtacagaatcaccgaatacaccatgatcagggcgtagaaatcgaaatacatgatcgccgggccgaacacaagatgcgtgatggtcagcgccacgaacagccaggccgccggctccgggcaatacctgcgcagcatcagcggcacgaagaccggcagcgaccacagcgtcatcgacgcctgagttgcgggaaacaatatgccgcccgtcgaatcagggctggtgacgccgatgaacggcacgcagccggcgatcagcgctgcggcgagcaacgtgtcccatagcagtgtgcgggtcgactcccgtgcgcaccatgccctcacgcgcgccataatctccataacgcgcaaggctagcgtgtccggcgacgaaccggtatcactcttcaggaggatttatggactagagtcttgaaccatgacaatgctgagcaaatactacgtgcccggactggccatagaggaccattccatcgatgttccgctcgactggaccggccatgagccaggccaagcgttcgacggcgaaaccatcaaactgttctatcgcgtggtcaccgcgcccgaacacgtgcatgacgacctgcccctgctgattttcctgcaaggcggtcccggcggtgccggcccgcgcctcaacagcccgacctccgacggatggatcgaggaggccatcaggcacttccgggtgatcctgcccgaccagcgcggcaccggccgctcctcgcgcgtggacacgcacgccatggcccgcatcgccgccgcgcacgacgatgatgccgcggccggcgcacgagcccaagccgactacctgaagaagttccttgccgattccatcgtgcgtgacttcgaacatctgcgcctgaccgaattcggtggccgcaagtgggtgacgatgggccaaagctacggcggcttcctgaccctgaccacactgtccctgttcccggccggcgtaatcgccagcttcaccaccggcggcatcccgcacgtgccggccgacgccgctgaagtgtacgagcataccttcccgcgcatggtgcgcaagacgactcagttctacgagcgctacccacaggacaaggagcgcgtggccgccatcgccgacaagctgccgactactgcggaagtcgccgaattcgttggcaaactcaccgattccgtactgaatccgatggctggtaccgatgtggagcatcgacttggcgtgatcgccggcatggccgcccacggcttcccgctgatgccgaacggcgacccgctcaccatcgaacgcttccagtgcttgggatccgactttggcatgaagccgagcttcgagcgtgtccattggattcttgacgacgccttccttgatggcgatggttccgcttctgccgactcgccgttgtctgacgaatttttgaccaaggtgatgaacgccacttcgtcgcgcccgctgtactggccgctgcaggagttcatctacgccaacggtgagatggaacagccgattcgctgggccgcccagcgcgtgcgcgatggcaagcccgaattcggtgctgatgaacgcccgctcaacttcaccggcgaggccatgttcccgtggatgttcgaacaggaggccgcattgcgcccgttcaagccggccatggacctgctcatggaagacacgcacttcggcgtgatctatgacgaaggtcagctggcccgcaatgaggtgccgctgcaggccgccgtctacttcgacgacatgtacgtcgattccggtatgcagctcgacactttgagccgcgtgggtaacagccactactggaccaccaacgaattcgagcatgatggtctgcacggcccgctcgtcttcaagcatctctatgacgaagcccttaaccggggcgacctcgaagaactgttctgactcaaggaagcaagctccctctgatgagggagctctgtatacatgcacgaaaggaaaacgtatgactcagaacctcaccatcggttttatcggatatggcaacatggcccaggccatcgcccaaggcttcgttgacgcgggcgtggtcgccggcggccagatggtcgcctgcgccgcccactacgacaagcttgagaagaccaccgccgaacttggcgtgcgtccgttgcacaatgcgctggaagtggtgacggccgccgacgtggtcatcatcgccatcaagccctaccagatcgccgccgtcgtcaagccgctggccgacgaacttgccaagccgggcaagatcgtcgtctccatcgccgccggctggaatctcaagaagtaccaggacctgttcgccaccgaagacggcgaatccgtcgactccccggacatccatatccagtgcaccattccgaacactccgatggccgtgggcaagggcgtgctcgtcaccgaatccgtcaacaccctgaccgacgacgaaaccgaaaccttcgagcagctattcggccccatcagcctcatcgagcgcgtggacaccgcgcatatgaacatcgccatggtggtggctggctgtgcgcccgccttcactgacatgtacatcgaggccttgggcgacgccggcgtgcagtacggtctgcagcgagccaccgcctaccggctcgccgccaagatggtcgaaggtgtcggcgcgctctacatggccactgaaacccatcccggtgccatgaaggacgccgtctgctcgcccggtggtaccaccatcaagggcgtcgcccagcttgaaaaggacgggttccgcggctcggtcatcgacgccgtagacgccatcgtcggctgactgccaatcagagttcgcgtatattcgcatatcacagtcaaggccttcgagccgtatgctcggaggcctttgcatatggccggttcaccacatgcacgttcaatgtgtccagcttctccctagactggaaccatgtctcttactatcggaatcgtcggactgcccaacgtcggcaagtccaccatgttcaacgcactgacccgcaacaacgtgctggccgaaaactacccgttcgccaccatcgagccgaacaccggcatcgtaccattgccggacaagcgtttgcccgtgctggccaagctggtccacaccgaaaaggtcgtgcccgccacggtgaccttcgtggacatcgccggcatcgtcaagggcgcctccgaaggcgaaggcctgggcaacaagttcctggccaacatccgcgaggcggacgcgatctgcgaggtcgtgcgcgccttcgaggacgacgacatcgtccacgtcaacggcaaggtggatccggccgacgacatcgacaccatcaacaccgagctgatcctcgccgacctgcagaccatcgaaaacgcgctgcccaagctggagaaggatctgaggggcaagaagatcgagccggcctacatggacgcagtcaagcaggcaaagaccatccttgaagccggcgagacgctcgacaaggccgcacgcgaaggccgcttcgacaaggattccgtctacgacctgcatctgatgaccgccaagccgttcatctacgtgttcaacgtggacgacaacgagctggccaacaaggacctgcaggctaagctcgccgcatccgtggccccggctccggccgtgttcctcaacgctcagttcgaggcagacctgaccgagctcgacgaggcggacgcccgcgaaatgctggccgacgctggcttgagcgagtccggtctcgaccaactggcccgcgtgggcttcgacatcctcggactgcagaccttcctgaccgcaggcgtcaaggaagtgcgcgcttggcagatccacaagggctggaccgccccgcaggccgccggcgtgattcacaccgacttcgaaaagggcttcatcaaggctgacatcgtctcctacgacgatttcgtggccgccgacggctccatggccaagatcaaggaggaaggcaagctccgtcaggagggccgcgactacgtcatggccgacggagatattgtggagttcaaatttaacgtgtccaagtagttttcctcggctccccttcctgaggggagccgtcgcggaaagcgactgacgggagtgttgcggaaaggtccgagcagtgttggttgcccagacctttcttcatgttacgaacctttatgaacctcgttgagatgagatgtttgcgtctacttttcttaggcttccgcgttctcgtcggctcctgtggcgagaacattcctcaatgatttcgccacctgtattttcagcggacgttttccggtctgtacgaccagccccgcggccaagagctcttccacgtatttccttgcgctctgtttggatagtccgatgtgatgggccacttcgtccaacgacatggatttggacgagtcgaacagttcttcctgaatcacgccatagagcaccgagacggcattgcgcgatagggcatgcctcttttcaagctgtgtacagagtatccgacctttgtcgagctgatcgaccttgatactgagttcgtcaatcagctcatcctgggcttgttggatgaatccgaggatggtgttcacgaagagcgtgagttcgccgcagttcagcttgtcctccgcctccatgaatgctttgtagtaggcgttcttgttctccgcgatggtgcgggacagggatagcacggtgggcatagtcaggtcatggttcaggtacagggccaggagataccggccggttctgccgttgccgtcgtagaacgggtggacgtattcgaacaggaagtgcgacatgatggccgactgcagccggggaatctcgtcggaggtcgcgagatggatcatatcggtgaggagtgcgccgatgttgccttcgcctttgactccgttatggatcgcgaggccgtgcggcccctgtatttccacatcgcctttccggaacaggtcgccgtccggctgatcgctctcatcgatttcgtcgagcacgaccttgtcatagatgtcgcggatgtcggcgatgcccgccggcaacgcggagtccttgtccgtgaggttcaggtacagcttggcaaattcgctgaaccgcgccttggagtcgtcgccgtccctccttgccttgtcggccgcgtccacggcgtcctgggtttccttgcgggtgctgcgcacgccttccatctcgttggtggcgaacagttcctcactgatggaatgccgtatgtagtcccagcgcatgacgccgggaatcagattccatagccgtgatatgcgcctttcggcgagaagtatattttccatgagcagggtcgtctcgcgtggcgtggcggagaacagctcgcccaatggcgtgatgaccccggtcctgaatgtggaatctgcctcaagccgctgccgtgcgagtgccgcatggttattgaaggaatcgactgacctgtcggcatggaacagccttgccaaacttctatacttcatatccatgagagagactcacttcccaaagagcatccttgattgtagaaagtataagatagagaaggaaatgagtcaataaacaactataaaatcatggataatacaaaaatatagttgtgcgcatgactgcatgtgagtgacatatggtagtgcccgaaatgcgtgtcagtagtgaaatacttcatgatctgttgttctttctgaatatgtgatggtatgcaatgggttttgccgcggtgcattgcgttgcgactatgccaagaacgcatgctcgtacaggtgcgtttatggggcatggtgcgaatgagtcggctcgatatcaccggcaatgattcagctatgcgtcaatgagaggtgtactgatcagatggcgtgttcgttcacgccgttgctgctgaatgcgatgtgttgatcatggttcgcgcaccataaagtcttacgtccgaatccgtcaaatcacgcggtgtgtgaaatgcccgttgtatataaaaaagtccggtgcaacgcacgatgataatgcgttgcaccggacttactgcagaaacaattgttacagactgtagatctgtgcgccgaacggccagagcgcgagcttggccattttgaacgactggaggccgaacgggatgccgatgatagtgatgcagttgagcacgcctgcacccagatagccgagtgccatccaccagccgaccagcaccacccagaggatattgaccagcgtggagccaacgccgccaccgtattgcacggttttgccgaacggcgtcaaggtaaggcccgccattttgaacgcctgaactcctagtggaataccgataatggtgatgcacagaaacagtccgatcagtgcccagctgatggcgattgccagtccgcccagaatgatccacagaatattgccgatgaccctcatcgtaacttcctcacatttgccggcattgcgccggataccgaatcgaatgctggattccattctattaggcgaacgcgggcgatatgtggggaatcggtgacgggacccctgagcatcccctgaatcgtccctgagccgcatgctcaggtgcctactcgggtgagcattctcacattcggctgatttctagcgaaaacccttgtgcgggcgggctgtggactatagcatcacgacacatgaccactacatcgcagccttctcaggcatctcagtccaccgccaccaaacccgccgccaaccgcgagctgctcctgacgcagtccgaccgcgaccccaagagctaccgtggcgtggaccgcgaccagcaggtcgtggacatcatctccaaactcaccagtgagaaggccacgattccggcaagctgcgtgcagcgcgacgccgccgacaccggtctggaatccaacagcgccgacgtggtgatcggcgaagccatgcttaccatgcagaccgagcgtggcaagcaggcgattatcggcgaggccttccgactactgcgcgccggcggcacctactcgattcacgaactcggcctgcagccggacaacctggacgaatccgtcaaagatgaggtgcgcaagcccgaagcgtaacagcggtgtgccggcccaacgatggccggataatgggaaacaagcaaaagcgatgacgcgtatgtgaggtacgcgcgacgaataggagaacatcatgaccgatgagaacgagcagcagaccgtatgcaaggcagggcgcgacgagcagcattgcaagtgcaagcagcgtagggaagccgccgcggcggccgaggcggctgccgccaacggcgaacaccactgcgcctgcaagcacgagcacgccgagggcgcggccgcggagccgggcgcgaagaaggagtgccactgcaagcatggcgaagtcgcggccgctgaagcgggtgaggccaagcactgcgcctgcaagcacgacgcccacgacgccgaaggccacgccatttcgaccgagccgcatcttggattcatcgaagacttggcctcgttgatcgatattcaggaggaggccactgtctcccgtacggtgctgcgcgaggacggcctgcgcgccgtgctgttcggcttcgacaaggaccaggcactgagcgagcacaccgcggccatgcccgtgatcatccaggtgctggaaggcaagctgcgcgtcggcggcgaaggccgtgaagtcgagcttacggccggcggcatcgtctacctgagcgcccgtctgccgcacaccgtctatgccgtcgaacccagcaagatgctgctgcagatgttcgacaaccgcggctgattcggtgaatgactggcaatcacgtatgagaagctgattgccgttagaccattcatgatggcttccttcatatggtgttggtcgtatgaccgtaatatgaaggaagccatttcttagacgttggggagagcttgaattcgacgccatcatcatacggcctcaagggtgcataaacgatgtcacaagtagacgcacgcccgccagccatcccaaacgtcacagcaaacctagaacccgcatgagctgacggccgatattcgccatggctgcatcatcaaccacgccgacttggtatcccagcagtttgcggtcgacggtgacgatcttgtccgtcatcacgtaactcactttgttcaggccgttctccggacttggttccaagcggacccgcgtgtcgatgtcggaggaatcgtatgaggtcagcagacaagtgatgacggaatcgaaccgatcgacggcatcgctctgcacgatgacaaccggccgtggcttgctggcgtagccatcggcctgcaacgtccgaatctcacctcgtttcatcggacatcctcaaggcgagacgactggcatactcagtagcgtcccgctcggacgcaaacggctccacgtcatttcgtggcaaacgcacctcataggggaacccacggtaatcattgaacgcgctgatgaacatacgcagggcatcggccggggtggtacccagctgtcgggtcgtctccttaaacaacgcagcctgctcgtcatcaactcgcgtggcaatctgcatgctcatagccactccttattgctatttactatctttttgcaccaaattgtatcaaatacttgacttcagagtgaagcccccgcgttccaaggcccttgtctatactgtagacagttgttcttcatatgtgaatcgcccgatatgactttggagcgggcttgtgattggaggggccggatatgacgagttacgtgctgcggctctatgatgatccgctgctccggttcgatgcgtcgtatggcgagggcctgctggcgggcaagatcgaggcgcatgtccgctggttcgatgagtcgaagcgcgcgttgctgccgtttccgttggctccggagccggataatgcgaagctgacgacgtggctggagcggcg

SEQ ID NO: 229 - DNA, 11202 bp, Unknown
  R101_18m  MAG No. k141_34488
gttcgagtctttcgacaccgccgacgagccgacctggtacatcagcgatccggccgaccccgagaagccggacgccggccgccgctacccgcgcgcgctgacccgcaacgccgacgtgtacctgaccgtgatcacgctggcgttcgatgagaacgaccggtacgcgggcatcaccggcaacgccgatgtggattgggatcgcgaggcgtacgagtatgtggccgccgtgagctggcgtcgcggccacgatccgctggtgctggtgcagaaccgccgccagacccgcgaccaggtgctcgaggtggcggtcgcggcggatggggccgcgctgggcgccacgcgtgtgcttgaggagcacgcgaacgagcagtggatcgacttggttcacggcacgcccgcctacacgccggatgatcgtctggtgtgctcgctcaacgatatggccacggataccaaccgtctgacggtggacggccgaccgttcacgccagctggctggaacgtgcgcacggtgctcgccgtgaccgacgaggatgtgctggccgtggtgcagcgtgcgcccgaaatcgcgaccgaggtgccgcgcgcctgggccggctcgggtgccgcttcggatgccgagtctctgttcggcggccatgacgcccgcagcttcgatgtggtgagcatgggatatgacggctcggtcgcgccgatcacgaccgagcccggtcagtggacggcctcacgcggcgcacgcggcatggtggtgtctgggcgcgatatgcgttccgcccgcgcccggatgcggcacatcgtcacgcgacgcgccgtcggcggcgtcaccgatgccgtcatcgccgccaacaccagcgatgccgccaacaccaccgacatcaccgccgccgacatcaccagcaccgccgcggaacccgggttcacgccgaacgtcacgttcacgcggctgggcgagcaccggttgtacacggcgatcatcgcgccgagcccgtccagcccgtacgcccatgccgacaaactgccggtgctgatgaagccgtacggcgggcccggcttccagcaggtcgtcgcctcccagtccttctactgggagggccagtggtgggccgaccagggcttcctggtggtcacggcggacggccgtggcaccacaggccgcggcccggcctgggatcgcgcaatcttcgagaacatgaagggcgtgacgctggccgatcagatcgaagccgtcaacgcccttcccgaggccgtctccaggctcaacgccgatgggcgcaggcccggcgttcccgcaccggacctcgacaaggtgtgtatgatcggctggtcgtacggcggcttcctgtccgcactggccgtgttggacgcgccgaacgtgttcaaggccgcgtgcgccggcgccccgcccaccgactggacgctgtacgacacgcattacaccgagcgctatctgggcctcgacccggatgtctactaccgcaacggcatcgtgcaggacgcaccgaaactcgagcgcccgcttatgctgatccacggtttcgccgacgacaacgtcaccatcgcccatagcctgcgcctctcgcaagccctgatggcggcgggtcgcccgcacaccttcctgccgttgacgggcatcacccatatgaccaacgacgagaccgtagccgaaaacctgctcaccctccagcgcgacttcctgcgcgacgccctggcctgaccggccccgggcgcgccgtgggccgtgacgtccgcggcacgcccggggcccgcgcccacacggcatgcggaaaaacggcgcaggtggtgcgccgcacccatttccgccctgaatttttggatatttttggatattttgcacccatcgtcatgtgaaagaccggttttttgcctcatattcccatcaccgcgtaggatgggtgaggattagaaagggaggactatgagcgttctcgaccgttttgaaaaaagcgtggaaggtgcagtcaacggagtattcgccaagtttggctccaaagacctgcagcctgtcgatctttccagcgccttggagcgcgagattgacgccgaggccatgcccgtgggccgtgaccgcacggtggccccgaatgaataccgtttcaagctcagtactcctgacttcgaccgtatcgaggcatggggtagcgagaccctggccaacgaactggccgataacctcaccgagtacgcgaagagccagcattacgccttcgtgggcccggtgatcgtgatcttcgaggaagaccttgacctgtccaagggcaacttcaacctcacctccgaatccgtgcagggcaatgccgtgccggtcaccaccgatgcgcagaccgaggacagcccggtgctcgaggtgaacggcaaccagtacctgctcaccaaagacaagacggtaatcggccgcggttccggctgcgatatcgtcatcgacgatccgggcatctcccgcaagcacctggaaatcgacatcacggataacggcgtgatcgcccgcgacctgggttcgaccaacggcacgtacgtggagggccaccaagtgcccgccgccacgctgctcgatggcaacaccatcaccatcggccgcacccgcatcctgtactgggcctccgcccaagcccaggagtagtcgagcacacgcccgaaagccgcccacccatgaccgaactgacattcgccctgctcaagtatggattcctgatcctgctgtggatattcatctggctggccgtgcgttcgctgcgcaaggacatcgagacgttcagtccgcgaccttcgcgcgcacgccgccgccgtgagcgtgaagtgcataaggccaaggccgaaacgccacaggcagctgcgccgcgcccgcatcgccggcccagcgcttccgcgtcgtccgtcgcctcggcgcagcctaccctgttggtcatcatcgatggtccgcttgccggcagctccgtgccgctggccgaagccgacatcgcgcttggccgcgccgcctcgaacaccgtggtgctcgatgacgaattcgtgtcttcccaccatgcccgcgtctaccgtgacacgcgctccgggcagtgggccattgaagacctgaactccaccaatggcaccgtggtcaaccagcagcgcatcaaccgccccaccatcctgcccgctcgtattcctgtgcgcatcggcgccaccaccttcgaactgaggtagccgcatgccaaaatccgccgcttcacaaccgctgttcctgtattccaccacggtgtccgatgtgggcactgtgcgcgcgaacaatcaggattcctccttcgccggcgagcatctcatcgccatgtgcgacggcatgggcggtcacgccggcggcgatacggcatcctccatcgccatccggtcactggcccacatcgagcaggacgacaccggtggcaacgtcgagacgatctcccgcatgatggagacctccgttatggccgcgcatgacgccatcgtcggcaaggccaagcgcgaacgcaagcttgccggcatgggcaccaccgttaccgcagtggcattggtggccggctactgggtcatcgcccatatcggcgattcgcgcgcctacctgctgcgcgacggacacctgagccgcatcacgtgcgaccacagctacgtgcaacacctcatcaacaccggtcgtatcaccccgtccgaagccaagaaccacccgcagcgcaacgtcgtgatgcgcgtgcttggcgactttgacattgacccgcgcccggatatttcggttcgccgagcccaccccgccgaccgttggctactgtgctcggacggcctgtgcggtgtgctggaagattccaccatcgaagagacgatgaccacgctgtccgatcagggcgaatgcgcgcagcgtctggtgcagatggcactgcgggcaggcagcaccgataatgtcacggccgttattgcggatgccacgttggcgttggatgccgatgcgttcgatctgccgcaccaaacgccgttggtcggcggtgccgccagccgtaatcttgagccgatcgccgacatcgtcaacgagccggtggctaccgcgcccgcgctgcgtgaggatgattcccccgcccagcgcgccgcagcattgattcagcccgccagcgcgcacgagacggaggccgcgcaaaccacggccgaaccgtcgtccacacgcgtggtgcagccgtccaccgtccgcgaggagaccggtgaacgagccaatcccgataccggtgagattccggtggtgcaaaagccggatgggcgcctgtccgccgaccccaacgacccggatgtggccaaagccatccgcgatgagcagatcgagcagaagaaggccacgcgcaccaagaagcgccgcaataagcttgcggtgattattacctgcattcttgccgtgctggccttggccggcgctggctggggcgtgtacacgtggagccagacgcactactacgtgggagatagcaacggcaccgtggccatttatcgtggcgtgccgaccaatctctttggacttgagctttcgcacgaagtgcagaccaccaatatcgccaccgcggacctgcctcagacatggcgtgaccagctgagccaaggcatcacagtcggttcgttggacgaagcgcagtcgcatgtgggtatcatccgcaccgaaatgcgcaaactggccaagcagcaggaagccgacgccgccaagaaggccgaggcgtccaattccctggacagttccaaagacagttcccagagcgattccaaggacagcaccaaggattcgtccagccagtccggttcgtcaagctcatctgattcctcggataaatccggtatcggagcggccgacaacgcggccacgggggattctcaatgatcgctacccgtctacgtcagatttccttgttgctgattgccatggcgatcagcgcgttggcgttcatccagatgttccaacgcaccgccggcgaattccctatgcaatacgccggcatgctggcattggtcgtagtgctgtttctggtgctgtgggggctgattgtgcgcttccagccgtacgccagccagtcgattctgccttgcgtgctactgctgaccgccaccggcgtgaccatgatcgcccgcatcgaccagagcgaaggttgggcggtggcccaacgccagctggtgtggctgtgcatcgccatcgtgctttccgcgctgctcatcatcttcctgaaggactaccgcgtgctacgacgcttctcctatgtgtcgatggtggtgggcctggtgctgctgctcgccccgatgctgccgttcatcggcatggaggtgaacggcgcgcgcatctggatcaggattccgggattgggccagttccagccgggcgagttcgccaaactgttcctcgcgttcttcttcgctgcctacctgttcgatcatcgcgaccagctggccgtgggcggtaagaagatgctcggtctgcagctgccgcgtatcaaggatctcggcccgatcatcgtggtgtggatcgcctcgatgggcgtgctcgtcatgcagcatgatctgggcacctcgcttatgttcttcgccatgttcgtggccatgctgtacacggccaccggccgtaaaagctggatcatcatcggtctgatcgcgttcgccgcgggtgccgtgctggccgcaggcatgttcagccacgtgggtcagcgcatcgacgcctggctgcacccgttcagcaacgagcaatacaacaagacccccggcggctcctggcagctggtcaccggcattttcggcctggcatcaggcggcatgctcggcaccggtctcggccaaggccatccttcgctcgttacgttcgcgaactccgatttcatctacgcctctctgggcgaggaactcggtctgatgggcgtcctggccattttgatgctctacctgctcatcattgcctccggcttcatcaccgccatgaaaatcaaggatggcttcggcaagctgctcgcttccggactggtgttcaccatggccttccaggtgttcaccgtggtcggcggcatcacgctggtgattcctctgaccggtctgaccctgccctatatggcggccggtggctccagtctgatcgccaactatattctcgcgaccctgctcatcatcatctcgaattcggccaatgcgcccgagccggagctgacctcggatacgttccagtacgaggctttggccgtgctgcgcaacaaggaacttgaggcccgagcccgcgccactgagccgatcgttcagcctcgcagcgcgtcggctacggcgtcgcagtccgaggcggaatcgtttgacgaccccattgtggatgccaccactccggcgtatgccggcgccgatgaaccgtacacgcctaccggtacgattcccccgcttcctcccgttaacggaggcactcgcgtatgaacaaatatcttcgtcagcttttcaccgccgtggtcgcgctgttcgtgattctcggcctgtcgtccaccatcatcatggcggtacgggccaacgcgctgaacaacgatccgcgcaacgcccgttcgctgtaccaccagctcggtgcctaccgcggtgccattctggcctcggacggcacggtcatggccaaatccgaaccggtcaacgacgcgttcaaatacctgcgcacctattccaacggtccgctgtatgctccggtcaccggcttcttctccatcaaccagaccgccgatcgcggcctggaagcctcccgcagcatgctgctcaacggtgaggccgattcattgatctggcagcgggccaaggccatgctcaccggcactacgaatcagggcgcgtccatcgaaacctccatcgaccccaagctgcagcaggttgcctacgatcagctcggtacgcgcgatggtgcggcggtggccatcgaagtcaacaccggccgtatcctcgccatggtgagcacgcccagctacgatccgaacaaactggcgacccatgacgccaaagccgcgtctcagtcctacaacgaactctctgcgggccaaaatcaaaatagcccgctaatcaaccgcgccacctcgcagctgtacccgccagggtccacgttcaagaccatcgtcgcctcggctgcgctggaaaccggcgattatcagacggacacgaagattcctgcaggctccagctataccttgccgggaaccgccacacagctgccgaacgacgaggcacagggcgatggcgtcaacggacagatctccctgcaagaggccgtcgcatggtcgtccaacaccgctttcgcccagcttggcgtgaaactcggcgcgagcaaggtttcggacatggccaccaagctcgggttcggcagcaccatcaccattgacggcaccgaatccacgggcaccccgatgacggccaccgcgtccacattcccctctgatccgaccgacgacaagcttgcgctggcatccatcggccaaggcgacaccacggccacgccgttgcagatggcgatggtcgcgcaggcaatcgccaacaatggcaaactgatgcagcccacgctggtcgatcgtgtgcgcgccgccgatctcaccgtactttcgcagaccaaaccgcaaaccatggccaacgcgttcagcaaggattccgcagacaagctcaccacgatgatggagagcgtgatgaccgaggccaatccgcagctggccatcgacggcatcaaggtggcgaccaaaaccggtaccgcacaaatcggtatcgacaactctgccatcgacggctgggcgatcggtttcgcgccggcggacaatccgcaaatcgccgtcgcggtgttggtgcataacacagatgtacacggttcgctcgccgctggcccgatcatgcgcgcgatgatgcaggaggctttgcaacagtgaaacttatcgaaggacagcttattcaccgccgatatcgtcttgattcgcgtcttgcgcaaggcggtatgggcgaggtctggaaaggctacgatattcagctcggccgtgaagtggccatcaaggcgctgcgctcggacgtgaccaacgccgaggccaagttgcgccgcctgcgtgccgaagcccataattccgccaatctggcgcacccgaacatcgctgcgttgttcgaatactacgagcatgacggcatcggctttctgattatggaatacgtcccctcgaaatcgttggcggatctgttccatagcaagggcgcgatggatcccatcgaactgctgcccattctgattcagaccgcgcgaggcctattcgtggcccactcgcacggcgtgattcatcgtgacgtcaagccggccaacatcatggtttccgacaccggcgaagtgaagatcaccgatttcggcgtgagctactccaccggccaaggccagatcacccaggacggcatggtggtgggcaccgcacaatacatctcccccgagcaggcgcagggccagcaggccacgccgcaatcggacatctattcactgggcgtagtggcgtacgagggccttgccgggcatcgtccgttcaccggcaccactccggtcgatatcgccgcagcgcacgtgaacaatcccgtgcctccgctgccgaactcggtggacgtccagttacgcgaatttgtcatgtcgatgctggccaaggacccgttggatcgcccgaaagacgcgctggtggtgtcccgtacgctggcacgcatcgaacgccgtctgctggatcagcagaccgaaatggccgacaccgccatggccacgtccggcaatcgactgccgcgccgagtgaccagcacgccacgcattgttttggaggccccggcctcaagattgggagggaataagcaatgagcaccagtatgcccaccgcattggccggcggacgctaccagcttggccagctcatcggtcgtggcggcatggccgaggtccacgtggctcttgacacccgtctgggccgtaccgtggccgtgaaaatcatgcgcgccgatctggccaacgacgacatcttcctggcccgtttccgccgcgaagcacacgccgtggcccagatgaacaacccgaacatcgtgaacatctacgattcgggcgaagaactggtttcttccgaaagcggcgataccgagcgtttgccgtacatcgtcatggaatacgtcaagggccagaccctgcgcgacatcatcaaggtcaacggcgcactcagccagcgcgactgcgaacaggtgatgttgggcgtgcttaacgcgctcgactattcgcatcgcatgggcattatccaccgcgatatcaagcccggcaacatcatgatttccgagcagggcgcggtcaaggtcatggacttcggcatcgcccgcgctctggacgattccgcaaccaccatgacccagtcgcagggcgtggtgggcaccgcacagtacctttctcccgagcaggcgcgcggcgagaccgtcgacatgcgttccgacctgtattccgccggctgcgtgctctacgagatgcttaccgggcgcccgccgtttaccggcgattccgctgtggccatcgcctaccagcatgtctccgaagtcgccacgccgccatccgccgtggtgccggggctgccgaagatgtgggattcaatctgcgccaaggccatggccaaggaccgccagaaccgctacgccacggcctccgaattcaagaccgacatcctgacctacatgaacggcggcgtgccggtggcggccgcgttcaacccattgacggacctgtcgaatatgaaggcccgcaaggaagccgaacgtgatttgcccaccacgccggtggaaccgcagcagcagcccacccaggcattcaacccggtgaccggtcagttcgagcagattccaccggccaatggtgccaactcagcggcgttgcagtcccgtgcgcagcagcgtgcggcggcggccaaggccaagaagcgcaagaagatcatcatcggttcggcgatcgcggcgattgtcgcggtgctcgtcattgtgggcatcatgttcgccatgaacggctccgacaacaagtcctctgaagacaccgtcaccatccctgaagtgtgcaacgcttccacgtccaaggacaacatcaagctcaagcttgagagattgggcttgaagatgaccgaaaagcaagacaccgactccaccgagccggaaggcacctgcaccaagatgagcccggacgccggctccaaggtggccaggggatctgccgtgaaggtgtggttctccgcaggcccgcagtccactcaggttccggatgtcaaggagcgcagccaggaagaggcgcgcagcattctggaaagcgccgggttcaaggtgaacgccaccgtcaaaaccgaagacagcgccgacatcgccaaggatatggtgacgagaaccgatcctgccgccggtcagtcggttcccaagggcaccaccatcaccatatatgtttcttccggcatgaccaccgtaccgagcaatttggtcggtcagtcgaaggacagcgtgctacagcagtatgagggcaagttcagcttcaccgtggagcaggaaagctccgatacggtggaggccggtctgattacccgcgtaagccccgattcgggctcttccatcgcgcagggcgggtccatcaccatctgggtgtccacgggcaaggaaaaggtcgctgtaccgaatatcaccgctggcactgactacgccaccgccgaactcatgctcaaggccgtgggcctcaaggctcaggccagtggcccaaccgacagcaccgctgtggtagtcagcatcaatcctggcgctggcagccaagtagatgcgggatcgaccgtcaccattaccacgaaggccggcagcaccggaggcgacaccggtaccggagacggtggcaatggcaacggtgccaacaacggcaacggggggcggaacccgtgagtgagtgagcgccgggcgtgtgtgttgcgcatacgcaacgcacatagcgcaacacatgcgcaacacatgcgcaacgtaaacacgcaacgcaatcacacaacgcaaaggggaggggcttctgcacccctcccctttgctgtataaagagctatcccagcgcaacattcccgggaaagcgtcgccgcgcgcggaaaagctacttcgtaaccttgggctgaaggccggcggacttggccacggcgttgtcttggccgcagaccttaagccagttggcca

SEQ ID NO: 230 - DNA, 12103 bp, Unknown
  R101_18m  MAG No. k141_35923
ctgcgtcacgtcgaccaaatcgaccacctgtttgccgaggcgtgaggtggccatttgcttcagttcaagtgtgttacgcatcggcggcacatcggcaatcaattcgcgtgcggccttgacgtggaacttctgcttggtggaacgggcacgggcaccgcgggaaagccatgcgagctccttgcgggccagattgcggcgcttcgtttcacgcacatcagcctggcggtcgcgttcgacgcgctgcagcatatacgccgaatacccgccctcgaacggctcgatcacgccatcgtggacttcccacatcgattcgcagacctcgtccaagaaccagcgatcgtgggtcacgagcaacagagcgccctggcctttggaccagcggttcttcagatgctcggcaagccagtggatagtgaccacgtcgagatggttggtgggctcgtcaagcgcgagaatatcccaatccttgagcagaagtcgggccaaatcggcgcggcgacgctggccgccggacaaggagccgaccttggcatccagactcatgccgccgagcaatgcctcgacgatttcacgggaagtgttatcggacgcccattcgtagtcggcgcggccttcgagcgcggcttcgcggatggtggcgttgtcgtcgagcggatcgcgctggtcaagcatgccgaacgtgagtccgccgcgcttcgtcacgcggccggaatccggctcctgggtgccgcggaacaggtgcagcaacgtggatttgccgtcgccgttcttgccgacgatgccgatgcggtcgccctcgaaaacaccctgcgtcacatcagtgaagatggttttggtggcgaaagcgagcgaaacgtgttccagtccaatgtcataagtcggcatgactcaccaatgtagcgccacgcttgcccagcggcggcccacaaacgttatttgttcagcgtctgagcgtaggagttgcagcgggccgcaaaaccggagaacacttgctcggcgagcggatgcagtagctgatcgtattgggcgaactgctcgcgcaattgggacttggacccacccgcggccttgagatccttgaccatgctcggctcatccagccattcgtccagcagcgagccgcacacctcaagatggaactgcatgcccagcgcggatcccagtcggaatgcctgcaccttggtggaagacgaacgtgccagcagctggcctccctcgggcaagcccaccacgtcgttatgccagtgcagcaccgtcagctgcttatcccacatggagaagaagtcatgtttgtccacacgcttgatcggcgcgaacccaatctccggcgcatcgcccttacgcagctgcgcaccaagcgcagtggcgataatctgatgccccaggcatacaccgagaatcggcttgcctgaagccacggcggcacgcgccaacttggcttccgccttcagccccggatacttgtcgtaatcaagcgcgcccataggcccacccatgattaccacgccagctagttcgccgaaatcaggcaagtccggtttctttttgtcgacgatattcatcgtcaccgtctcaagaccgatgtcttcgaggttcgacaatatgcgtcccggacgttcccatgggacatgttgcaaaatgagcacttgtggtgtggccatgacttctattgtggcacgagcgttccccgtttgcgtaacaggcagggcaaatccatgaatctcgcagtttccgcagcggtcaaagacgtgttctcgcgagactgttgtcccgcttctcatccgtctgtcacctcgttcgggccccgcctgtgaagcgttcaccaagctcttcgagtaacgattcagcatgtctggttcggaccctacgcttgagcgttatgggaaacagccaagaaccgcaggatttcaacatttccgtcatgccttcaagcctgacgccggtgcatgtcgccaaggccgcagaaggcctgaatctgtatgacaccgcctcgcaccaggtcagccatttcgtgccgctcaagccgggcgaagtcggcatttatgtgtgtggcgccaccgtgcagtcgtcaccgcatatcggccatatccgtgccgccgtggcgttcgacatcgtgcgccgctggtttttgaagctcggttacaaagtcacttttgtgcgtaatgtgaccgatatcgacgataagattctcgataaggccgcggccgccggccagcgttggtgggcccgcgcctattactacgagcgcgaattcaccgaggcgtacaacacgctcggcgtgctgccgcccaccgtggaacctcgcgccaccggccacatgtcggacatgatcgacctgattcagcgcattctcgacaacggccacggctatgtggtcacggatgcggacggcaagcccaccggcaacgtgtacttcgatgtggcatcctggccgcattacggcgaactcacccaccagaagcagacctccgaagtcgatgaggccgccgccgtggccgaccgcatgggcccgtccgtggacgccaccggtgccgacaagtacaatccggtcgacccggccgacgcctcccccgacaagcacgacccgcgtgatttcgccctgtggaaggcccccaaggacaccgatcccgaggacgcccgttggtcgacgccgttcggcgtgggtcgccctggctggcacatcgaatgctccgccatgtcccaccgttacctgggcgatggcttcgacattcacggcggcggtttggatctgcgcttcccccaccacgaaaacgagatggcgcagacctgcgcggccggctacccctctgctgcgcgctggatgcattcggcatgggtgaccgccaagggcgagaagatgtcgaagtcactgggcaccggcctgtccgtgccgagcgtgctggccgagcattccgcttgggtggtgcgttacgctttgggctccgtgcagtaccggtcgatgctcgaatggtccgatcaggcgctggtcgaggcgcaggccgcatacgaccgtgtctcgaacttcatcgagcgcgccggtgtggcactgggcggtcagccttctcgcgaggaggttgctgccgtctccgccgacgatttgcccgccgatttcgtggccgccatgaatgacgacgtcaatgtgtctggtgcaaccgccgcgatcttcaccgccatccgttccggcaatacgttgctttcacagctggctgaccgcgccgattccgaaaccgccaaggccgaggtgcgtgaggcgctgctcgccgtgcgtgccatgctcgacaccttgggtctcgacccgctggccgagccgtggatgtctgctggcggtgccgctgatggcacggccgagtcgcccgaacatgcggcgctggaggcactgattgccgagcagctcaacgcccgcgccgaggcccgcaaggccaaggacttcgccaaggccgaccagattcgcgacgccctgaccgaggccggcatcgccatcgaagacggcccgcagggttccacttggagcctgaagtagccgcttcaaacccatcaatcagtcaaacacgaagtccacgtccacgatgtgcaggcgcttgatgagctccttctccagcgagcgcttgcattcgatgaggtcggctacatcaatggtttcgccgatgccgctcagatacacgtcaacggtgtagttcatgccggtcttgaagatcagcgtctgctcgtagtcggtgttggcaggcagatggcgctgtgcctcggcctccacgtaggcgttggtctcatcgtcatcatgcacgccgccgaccaattccacgaacgcctctttgagcacgctgaacggctccttgatggtcaatgccaccaaagccacggtgatgaagaaatcgccggtgtagtgcaggaagtcaagcggaccgccggccggtagcagcatcaggaagatggcaaccacgccgatgccgaacgacatcgatccgtcgaccaacgtgctcttgcactcggcggtgagcatggtgctggaatcgccgatggagcggttggaacgccggtaatacatgtataggctgaagcacactattacggtcaggatctcgtagatgaccaccgggccggtttcaatgcgttcgccggacccgaacacgaagtagtcgtacgctactcggcacacgtcaatcagcgaatacaccaacaacgacatggtgaaaatggccttgcagatcgcgtagatgggttccagtgcgaacatgccattggggaagcgctcggtggttcgcaccgtgcgcgacgagaggtacaccgccaccattccggacaggacggaaatcgcggtgaaggagaagtcgaggaacatggccttgaggccggtcatgaagaacacggccatgccggctaagacctgcaacacgttgatgacgataccaacgattagggctttgcgttcgagtagtttttgggtgggcatcagtgggccttccttattgcacggcatgtctgcgttggcccgaacgtcatggttcggagcgcacggcagtctgcgtataagcggtgtccagcgattttcaaaacagcgtaagcattccaaaaaacacaggattctttacggtttccatggtatcggaagcactcgattggcttcgccacgagcggacggcacggcatttgccgtctgaatgcccaacatccctgactactacgcgacgcaatccccggaaagagtcgtccccaacaccgcaatttcccgcgtggcggctagactgttgcccattatggcagctttttcatctttgacagacagactctcgaatgcgttcaagcatctcaagagcaagggcaagctttccgaggcggatatcgacggtacgatccgtgaaatccgccgcgcgctgctcgacgccgacgtggcgctcgacgtggtgcgttccttcaccggcaaggtgcgtgagcgtgcactgggcaccgaggtgtccgacgcgctcaaccccgcccagcaggtggtgaagatcgtcaacgaggagctcaccgacgtgctcggccaaggggtcgatcgtccgctgaacttcgcaaagaacccgccgacgatcatcatgctcgccggccttcagggtgccggtaagaccacgctggccggcaagctcggctactggctcaaggattccggccacacgccgctgctggtggcggccgatttgcagcgtccgaacgcggtgacgcagctgcaggtggtcggcgaacgcgccggcgtgcccgtctatgctcccgaaaagggcgtccaatccgatggcggcgaggccgtcgcagctccgggccagacctccggcgacccggtgaaggtggcccgcgattccatcgaactcgccaggcagaagctctacgacacggtgatcatcgataccgccggtcgtctgggcgtggacgaggagctgatgaagcaggctcgcgacattcgcgatgccgtgcaccccaacgaaatcctgttcgtcatcgacgcgatgatcggccaggacgccgtcaagaccgccaaggcctttgacgagggcgtggacttcaccggcgtggtgctctccaagctcgatggcgacgcccgcggtggtgccgcgttgtccgtggcgtccgtgaccggcaagccgatcctgttcgcctccaacggtgagggcctgaaggatttcgaggtcttccacccggaccgcatggcctcgcgcatcctcgacatgggcgacatcatgacgctcatcgagcaggcgcagaagcagttcgatgaggaagaggcccgcaaggccgccgagaagatctccgaaggctccttcggcctggacgacttcctcgatcagctgcagcaggtacgcaagctgggctcgatgaagtcgctgctcggcatgattccgggcatggcccagcaccgcaaggaactcgagcagttcgatgagaaggaaatcgaccgcaccgaggcgatcattcgctcgatgaccccggccgagcggcgcgatccgtcgatcatcaacggctcccgccgcgcccgtatcgcctatggttccggcgtgacggtttctcaggtgaacgctttgctgcagcgtttcgagcaggccgcaaagatgatgaagcgcatgtccaatcgtggcggcatgggcggcggcatccccggcttcggcggcccggctatgggcggcggcaagaagaagggcaagaacaagaagaaaggcggcaaatccggcaatccgatgaagcgcgaggccgaggagaaggcattgcgcgacaagctggccggcaaatcctccggttcgaccggcggttccgccttcgccaagaagccgcagaacccggccctgcccgccggccttgaacagatgatgggcaacgtcgatggtggcactgaactgccgccgaacctcggcggaggccttggcggactgttcggccgctgatctcacaacttggctcccctcgcagaggggagccaagttatatctcggttcaatttatatttcgaaaggaacttccatgacgacaatcttcagcgcggtggcaatcatcgcactgttatggacggccttaagcgcgctgcccgccggtctcgaggcccgcatgccgcttccgtacatgattgccctgactccgctgctgtgggttcctttgatgattctggccgcggtcgccgcatggcaacatgaatggactgcgatgtcgtcgcttattgtggtcgcgctgattgccagctcacagcgcatcaactactggggtacgtcaatcgacccagccggcaaacgcagagaatcccaccgtgaaacagcccgtgaaacaacttcgccgacgctgtcaaaaagccataacagcaatacatcgagcacctcaaacactccgaaggaaggacccgaaacagtccccgatgggcaccgtgaaacaacgcgtgaaacactctcgccccagttctcggttatgacgatgaattgtcgatacggacgcgccgacgccgctgaaatcattcgcaatattcgcgaacgcaatatcagcgtattggccttgcaggaagtcaccgacgacctcatcacacgtcttaccgaagccgacatcaacgaactcctcccctaccatcagttcggagacgccaaagagaccgataacggcggattcaacgtgatctattcccgctacgagccgagcgcagcggtgcccaacgtggtctccatccctgccgccgacgttcccgccatcaccctcaaaacctccggtaatcgcacggtgacgctttgttcggctcacccgaaatcgccgatgcgcggctgcgcggattggtcggccggcattctgggtctgcgagaactcgcccgtgcaaaatccgtcagcaatcgcaacatcgtcgtcgttatgggcgatctcaactcgagcaccgatcacccgagcttccgtgcgttgctcaagtccggattcaaggacgcaagtctgattcaagccgccggcccgaatctcaccttcccgcgctggctcaagtggccgcgcatcgaactggaccatattctgttcacccaagggctcagaccgtccggcgtgacgtccttcgaagtgccggacaccgaccatctggctttggccgcaacgctcaccctgcggtagcgggcgcggcgatcgatcgggccttggccatgtggcgcgaagcgggcgggaacgtctggaagacccccgcccgcagccgggtggttcgccgtcagaggtccatggagcggatcagattcaccatttcgatcgcgccctgcgcgcactcggaacccttgttccccgctttggtgccggcccgttcgatcgcctgttcgatggaatccgtcgtcagcacgccgaacagcaccggcacaccggtgtcgaggctggtctgcgcgattcccttcgagacctcgttgcacacgtaatcgtagtggctggtgctgccccgaatgaccgcgcccaggcagatgatcgcatcgtagcgcttgctcttggccatcttcgacgcgatcaggggtatctcaaaggcgcccggcacccaggccaccgctatgtcctgttcgcggacattctcccttttcagggtgtccagcgcccctgccagcagttttgaggtgatgaactcgttgaacctcgccacaacgatgcctatcgtgatgttttcggctaccagatcgccttcgaacgtgtgcatttattcctcctccatgttcaggatatgtcccatgcggtttttcttggttttgagatagaaactgtcgtaagcattggcttcgatttcgattggtattctgtcgcggatctccattccatagtcttccaattgatacaccttgtcgggattgttggtcagcaggagcatggatcgtatccccagatccctgagaatctgcgctccgatgtagtactccctcgcgtcaccggggaatcccaacgcgagattggcgtcgagcgtgtccatgccctcgtcctgcagacggtaggccttcagcttgttgaccagaccgatgccccgcccttcctgacgcatgtacagcagcacgcccgagccatgctccgcgatcgtccgcatcgccgcgtccaactgctgaccgcaatcgcaacgcaacgagccgaagacgtcaccggtcagacattccgaatgcacccggcacaacacatcggtcccatcgcccagattccccatgaccagcgcgacatgatgctcgccgttcaacctgttcacatagcagtgcgccgtgaattccccgtatcgcgtgggcatcgccacggtcgagacgcattcgacgagcgtatcgtgcgctttcctgtattcctgcagttccttgatggtcaggagcgggatctgatgctcctgggcgaaccgggtcaggtcgggggtcctcatcatccggccatcgtcgtccatgatctcgcagcacaagccgcattcacgcaatcccgccaaccgcatgaggtcgacggtcgcctccgtgtgcccgttccgttccaggacgccgcccttcttcgccaccagggggaacatatgccccggtctgcggaaatcgaggggttccacgtcatcggagacgcacatgcgagccgtcaatccccgttcttcggcggagatgccggtcgtggtgccacggtaatcgatggacaccgtaaaagcggtttcatggttatcggtgttgtgctcgaccatgggcggaagcatcagcttgtgggccagttgctcgctcatgggcatgcagatcaatcccttggcgtgggttgccatgaaattgacgttccatgtggtggccgactgcgcggcacagatgagatccccctcgttctcccggtcctcgtcatcgatgaccagaacgagcttcccttcccgcagcgcctgcaacgccgcttgcaccgactgatggttcatgattcatgcatcctttctcagaacccgcaccgggacagcagatcctgcgtcagtcccgtccgggtcgtcatcatgttccgcacgtattttcccaatacgtcgttttcgagattgaccacgccgccgacccgtttctcgcccagcaccgtctgcgccaaggtgtgcgggatgatcgatactgagaagtccctttccgtgacctccgcgaccgtcaggctgatgccgtcgacggcgaccgagcctttctcgacgatgccttcgagtatctcgtttcgcgccgcgatccggtaccacacggcattgccttcgcgccgcacggaggatatgctgcccgtgccgtcgatgtgcccggtgacgatatggccaccgaaccttccgttcaccggcagggcccgttccaggttgacgccgttcccgcggcgcaatacgccaagcgaggttctgcgccacgtctcattcatcacgtcgacggtgaagcgtcgacggtcgaaatcgacgaccgtcagacagatgccgttcaccgccatgctgtcgccgatatggaggtcctccatcacgttcgtggcgtcgaccgacaacgtgcagttggcggcgctcctccgtatgtccgccaccgttccgacttcctccactattcccgtgaacatgaatacaccacctcgctttccaccagataatcctctcccactcgggagcaggcgcggggccggagcatgacggcgtcggaaggcagggcgaccccttggccgcccaccgggcttttcgcggtgccgccgaatatcttcggcgcgatgtacacgtgcgcctcatcgacgatccgctgttcgagggcgctccaattcatcgcgctcccaccttccagcagcacgctgtccatctgcatatcccccaggcgccgcaccacgtccgccagatcgacgtggtcgcccttccttccgacggcgagtatttcgcagccgtgccgccggtagtcctccgccttgcgttcgtcatcgcaggcggtggcgatataggtcctgacgtcattcgccgtctgcacgatccgcgaggtaaggggcgtcctcaatcgcgtatcgcagacgacgcgaaccgggttccttccgtgtgccatgcggcatgtcagcaacgggtcgtcctcgatcaccgtgttcacccccaccatgaccgccgcgacggatcgacggagctgatggacccgacgcctcgactcctcgccgctgatccaccgtgattgattggtatgggtcgctatcttcccgtccatcgtcatggcgtatttcatgatgacatacggcgtatgcgtggtgatgtatttgctgaacacccgtatcagatgccggcactcgtcggccagcacccccacatcgacccgtatgccgtggtcctcgagcatgcgcacgcccttgccggacaccacgggattgcggtccaaggttccgacgacgacccttgcgatgccgctttccacgatcgcctccgtgcatggcggcgttttgccgtaatggcagcacggctcaagcgtgacgtacaacgtcgccccggcgggcgactgcgtgcaatgccgcaacgcgttcctctcggcgtgcaatccgccgaacatctcgtgatacccctgcccgatgatccgatcgtccttgacgatcaccgcgccgaccatgggattggggttcacgtatccggcccctcgcttcgccagctcgatcgcgagtcccatgtactgcgcatcgtccatgtacgcctccaagcatgttgcgcccatacgctatccaaggcatacaaaagaaggttcatgcgaacacgaaaacgccctgaaatgatatggcatcatttcagggcgtacgacaaagcatgaacgtactttcatcttctctcatccagactgtactgtcggctttggaatctcaccaaatcatgccttgcggctcgtgggctgtaccaccggtagggaatcgcaccctgccctgaagatagttattcgttttgcccgtgattgtactcgccgacgctccccctgtcaacggaagcggcctcacgcagcgcccgggccttctgcatcgtctcgtcgtactcgaagtcgaaatcggattccacggtgatgcctccgcccacgccgagcgacgtctcgcctccttcacgcacgatggtgcggatcacgacgttgaaatcgcaatcgcccgtatcggagaaatacccgatgctgcccgtgtacaatccccggggcgcgcgttcgagctcgtcgatgatctgcatggcgcgaaccttcggggcgccggtgatcgaaccggtggggaacgcggcgcgaaccgcgtccacggcgcaacgatccttgcgcagcgtcccctcgacggtcgcgacgagatggaatacggaaggatacgtctcgatggcaaagtcggggtccgtgccgacggaacccggttcgcagacgatcgacaggtcgttgcgttcgaggtccacgaccatcagcagttcgctgtggtccttctcgctgcgggcgagttcctcgcggttcgcccgatcctcgtccggcgtgccgccgcgcggccgggtccccttgatgggccgcgtcaccacatgtcccgagcgaatctccatgaaccgttccatgctcgaacagcacacgtcgagacccggtgcgcgcagataggcggaaaacggggccgggttgtgggtgcgcagataacggtagatggcataggggctcccggacgtctccaggcgcaggcgctgcgccatgttgacgacgta

SEQ ID NO: 231 - DNA, 12640 bp, Unknown
  R101_18m  MAG No. k141_35954
cgattacgtggctcggcagattggcgtgaaagacaagtacgggctgaccgtcaccacgcaggaaaagcgagcgatgctttccgtactgcacggctgccccgcgcaaagcgtgccggagcggtgaggcgcgtggcaggtggcggagtctcctgaaatgtgtcacgattcgaaatttcggctgttttttcgaatcgtgacacattttccttccaaaaaagcaatacgggggtataaaacgacatattcccaaggaaaatgcctcaaaaacatacccccgaaccgaaagtgatgtgtcacgatccaaaattttggtctttttttcgaatcgtgacacaaaaaacaagcctcctatatcctgtgcgcaaccaaacgtatcggaatgacgcgcgacgaacacgattatcagcggctttcaaggattccagcgccgatcgccacaaaagaggcacaacaccgaggagtcgcgatcatgcggaaagcgggcggcctcacgcgcgcacccaacgaaaccgcatcagtcaagcagcctaagcttgcgggctttctgataacgcagcaccactttgcgccatggcaagggcgtggtcaccccaatcggccgaccgacgatcgaagacaacgcatgggcgacgttcatggcgaacgcggcgcgatgcaattcgtcggacaaatccagctgcgtgaccgaaaacacagtccaaccagcggccgcaagacgcgacagcttgttctgatcgcgccgatattgcgcacggtcagtacgatgatggtcaccctgatagtccaggccaaaacgatgctcggcatcgacaagatccaacgtcaccgcagcgccattcgcaaaattcacgccggggaccacacagttcggttgcataatcggcaggccataacgcacaagagtcagcctcatttcggtctccttgggggaatcgctgcctgactgcacgagcgccaacgcatccagacacttgctccggtatgggacgttctcagttttaacaaactcaatcagccccttgcgagcggcgaatcgatggcgaatcaacgactccgcaaccatgacgatgtcctggataccccaccggccggcagccaaagaccacgccggaacgggcataagcaccggaactccagcaacctcacgcacgtgtcgcgcggacaagcccttccagacatgcacggtcacatcggccgacaccgatgtgcttttcttcacacggccgcgacgagccggcgattgggcgaccgtatgaagtttcgccggggattgcgggaattgggaaggctgagaagccgactgccgaagacctggaatctgattccgagaaacagcctgggaatccgggaaatattgaaaatccgaatccgggaaatcctgccctaagcggatagagtgctcggaatggccgaaagccggactttctccactccatccatagtccacgtccgtcccagcgtaaccgccttgcgacgaacgcagcgaaacaacggagcaatcactatctgcgggcagctcgacgccccaaatcgcgagcgcggtctcgtgacttacgggatgccgcaactccacggactgggcaatgcggagaatacgccagctggcttcggacaggatcgcccgctggatcggcttgtatgcatcatcagcattcatggcgtgcaatataaacgatggcaacggtttgatgtgcgtttttccaaagttgtggtcggagaacatgcgatttggggcagttcagcatggcatggccgtaattccaacgatttggagcgcaacagcctgtggataaccaatggagatggttccagctaccaccgcagcctttacaagggacgcggcctggcacttccggaagtgcggcaaaccggtatttcttttcgcttggggaatcggggatggatcagcctcagcccagccttcaaggcaattcggaccaattcatcacgaaccagcacaaactagtctcaagcgagccttgaaccagctttggagcggaatcttccgctataaatgtgtcacgattcgaaatttcggctgttttttcgaatcgtggcacatttttccttccccaaaaacaatacgggggtataaatcggcgcatttccaaggaaaatgcctcaaaaaacatacccccgaaccgaaagcgatgtgtcacgatccaaaattttggccattttttcgaatcgtgacacaaaacaagcgacacggcagtaccggaagagtaggtccaaggcctgctctggaaagggcggagctggcgcacagatagcgtgggcagtgccggaagagcggaatcaaggcctgcgacggaagcgaggagggcactcaggggaggagaaggcatgcggaaagcgggagcactaggcggcgcgaaaccaaacacgcgacactaggcacgggtggtggcgcgggctatgatgcgggattgggtggtgatgagctccggttccaacgtacggctgccatcgatgcggttgatgatgcggctgaccgcggtcggcgcgatccagtcgaggcaggaatccatggtggtcagcggcggctggaaatatgcggcttcctcgttgttgtcgaagccgatcacctgcacccggtcgggcaccgcgatgccgttcgctgccaaagtgaacagtgcgcccaacgcaagctggtcgttgaacgccacgatgccatcgaaggggatgccggagtcgacgatgcgctgcgtcatgcgcgcgcccgagccgatggtccaatcctggccgacgttgggcactagccgtgtgtccaattcgacgccttggtcggcacacgcttcgaatatgcctcgcatgcgcagctgcgcgttgccttccacggcgtcgcgcagctcgaggatatgctccggatcggttcgcgagccgatcaccgcaagattcgtggcaccgtggtcgaacaggtattgcgcggcgagacgcgcctcctggacgtcgtccggggtgacatggtccgccttgccatgcgtggaccgcgcgcccacgcagaccagcggataatccacgtccaggtcctcgggatcgagatcctcgacttcggagatggacaggatcatgccgtccgacaccgtggcattgaagtttcgcaacagcgcgcgggcaccctgcgcggatccttccgcatacgtggtgatgtacacggaatagccgtagatgcgggccgcgtcgatcacccggttggccagttcggccaaatatggcgcggtcaggctcggcaccgcgagcgtgatgaagccggttttgccgcgattgagattgcgggccgacacgttgacgcggtagccgagcctgtcgatgacgtcctgcactttttcgcgtgtggcgtcggccatgcggccggaatggttgatgacgttcgacgcggttttgagggagactccggcctcttgcgccacttcacgcagtgtgacgcgtttcctgtcggacttgtccggcttcacttcggccatatctccccctaaccgcatccgtcatcgatattcgacttccgactttaccgccttaccacgagcacgccgttgcggcgcacggtgtacgagccgggcttttcctcccgatccgtctggaacaggatgaccggctcgccttcgatgccttgcaattcgaccgtcttcttgccacggggcaggtagaagtcgaaggtggcgtcggcggaggcgcgcacggtgtgcagcacgtcggcattctcctgcgacgaggccgcgagatatgcgcggaccagcttcgtcagatcggccacatccaggtcgcagccgacgaaatacgcttcgccggagccgtacggattacgggtgaccgcggccgtgccgtcgagctcccattcgtccgcttcctcgccggcgtacgtggcaagcacctgcgcgtgttcgccggtcacgttcacgtcgttctgccacaggcgggtcgtggtgccgtccagcgcggccgaatcgtcggcggacgacagtcggatctcgcccggctcgccttcggcttcggcgccgaggatgttgaattcctcgccgcggacgcccagcatcgagcgcaacaggccatcgcccgcgcccgggtatccgccgagccaagtgtggaaatgctcgtcgatcagtccggtcgcgtagccgaccaccacgcggccgccggcggccgcgaagtcggccaaccgctgcgtgtcggcggtgctcaggatcagcacggtcggcagcacgacggtcttgtacgagctccagtcgtaggcgagcggcacgatgtcggcgcgcgagcccgcgtccaggaacgcgcggtaccagtcacgcacgtcatgccagtggttgagtttcatgctcggcagggtctgggagcgggtggcccattccgattcggcgctgaagaggatcgccgtgtcggagtgcgccaattcggtgccctgcacgccggcgtcggcgagcgtgtgcaacgacgcgcccagctcgcacacctggcggaacagcttcgtgtcctcgccggcgtgcggaaccatggccgaatggaacgcttcggcaccgaacgcggacgcgcgccactggaagaagttgatggcgtcggcgcccatggccacatgggccagggagtcacgcacggtctcgcccttgcgcttgcgggtgttaagcggcttccactgcaccgccgaggtggagtgttccatgacgtaccacggcttgccgagcgcgagcgaatccatgagagcgtcggagcaggccagctcgtcgaggtgggattcgccctcgtggaagtagtggtcgttggatacgaagttcacttccttggcccaggcggcgtagtccatgcagcactggtcggtggagaccatgaagttcgtggtgaacggcttgtcggggcagatttcggcgatcgcgtcgcgttcggctttgtagaagtcgaggagcatgtcgttgccgaaccgttcgaagtcgagcttctggccggggttgaccatcgagtcggcgcccatgaaccgtgggatgagcacttcgtcgaagccgttcatctcctggccccagaaggtggtgccccacgcctgattgagcgcgtcgatggtgccgtacttgcggcggcaccatgcgcggaaggcctcgagcgcgttgtcggagtagtcctcgcggttgttccacccgtattcgttgcccatgtgccatgcggtcacatacgggttggtgccgtaccgttcggcgagcttgcggcacagggtcagcgcgtattccttgaacaccgggctggtcgggctccaggattggcgcgagccggcgttgaccggatggccgtacttgtcacgcggaaggacctccgggtggctttcgtacagccacagcggcgcggtcgccgtcgcggaggccaggtcgaccacgatgccggcattgccgagtttgtcgatgatgcggtcgagccagccgaaatcccaacgatcctcggtgggttggatgcgatcccagctgaagatggcgagggccacggtgttgacgccggcctgcttcatcaggcggatgtcgtcgtcccagatgtcctcggaccattggtcgggattgtagtcgccaccgaaggcgatgccgcggccatccgcggtcagcagttccggccattcgaagttgcgtcgcgcactcacgattatctcctttggtaattggcataaagccatggttttttgtatattacattcgttattcgcccaccggcatgtggtacaccggtgtagcatacacgtcggtgacgtcagcgatgcacgcatcggactgctccaggcgggccgccatcgacgatgttaccttcacgcggaccccgcgcctcagcggcgtgacgaccagcgtcagctttccaccagcggcatcgatggcatccgcgtaatcgcgcaatccgacctgccatgtctcgccgttgcagaaattatcggcgatcagcacatcgccgcagaacagccagccgatatcgccctggtatgcgatgttcagcatgacatcggcgacctgccgttgatcgcggaaaagccgtcccatgccagccggcaaagcgatttcgtaccgatcggcgtgcagtcttctcagacgcgcatacaccgatacgggctccaccggccgcggagagccgagcaagccttccggatatgcggcgatcccgttttcggcgcggggcgattccagcgtccacccatcgccgtcctcgtacagcaacgcgttgtcgtcgtcgacgaaggcgaggcctccgtccaacaccgtcatccgcccggcgagcgctcgtgtgacgcatacgatctccgccgcgtcccggaccatgaagcgttcgaaatccgccttgccgacggtgacgtcctggatgtcgccttcgaaatggaacgtcagctcatccatgccatcgggcttgaggaacacgaacgtgcggaacggtcggcccggcacccgcagcacggtgaccggctgcaggttggcgcggacgagccgcacgccgtccagatccatgttgaacggcaatatgcagttctccccctcggcgaggccgatgccggtgaaccgtatgcgctcaccggtacccgtcgtcacgtcgatttgctcaccgtgacggctcggcacgcgcgcatggtcctggaagttgtcgatggacacgaaaccccgttcgccatcgctgcgcacggcataccggagggtctcggagtcggacggatcgatgcggtcctgcccgtcctgcaacgagaccggcattccggcgagttccggcccgaaggctttgacgaactcgtgcagggtgcgcagccgccggtaggattcccgcacctgtccgaattcgccaaggggcgcttggaaatcataggagcgtttcggggtctgcccctcattgaggaatccggccgcgcccttcgggttggttccgccatggaacatgtagtagccgaggaaatcgcaccccgagccgagcttgatgttggccatcgcgtcgacggagcgcttcggcagcacgaaacggtaatcgtacgaattgaacatcccgccgcccatctcgcagcaggcgtacgggcggctgtccggatcgtacgggggatcgaagccgtcgcttgtgctggagccatgcagcctccggtatcggtactcgtcggtggcgggatgctccgtcatcccctcggcaccgacgccgtcgtagaacagccacggacggtacgcgtatccaccccacagcggcagcatgtcgtccggaaccggtgactgccagccggtgcaggtgaacatcggcgggtcgatgccttcctcgatcgcgatgtcgcgcagccgttccaggtagccggccccatcgtggccggacggcacccattcacggctgatgccggtggtcatctcccaaggagccgacgacgccatgtactcgttgtcgacctgggccgcgatgatcggcccgccatccttgaaatacaggccgcgcagctgctgcgcgatatgcgcgtagagaccgcgcaccgcatcgaggaagccggcgtcgagggaacggacctcatacgacttgccgtacagccagtcgggaagtccgccgttgcgcacctcgccatggcagaacggtcccagccgcacgatgacgtgcagtccgtgccgggcgcacaattccacgaatcggcgcacgttcctgttgccggagaaatcccactccccctcgcgctcctcatggtggttccagaacacgtaggtggatacgacgtcgatgcccgccgcggccatcttcgcgagttccgtgtcccaccgttcggcggcgatccgcgaatagtgcatctcgccggcgatggggatccatggcgatccgtcacgggtcaggaagcggttcgtggcgcccagggtcccgccatccggcccgcatgcggctgcggcgcggatgacggggatcccgtatgcgggcgtccgcgcgaacttgctggcttccgaaagatcaacctcatagcgcataacgctgctccttgtcgaattcccgcaagcaggaggaccggtcagcccttgaccgaaccggcgaccaggccggccacgatccaacgctggcagaagatgaagaacacgaacaccgggatgagcgcgatggtggtgaccgtcatgaacaacggccagttcgtcgtgaaggtgctgatcgcgttgaacacctgcagcacgatggtctgtttgttggtcgacgagatgtacacgctcggcgtcatgaagtcgttccacgtgcccatggtctggaacacgatgacggtggtcaggatcgggcggatcagcggcagcacgatcgtccagaagatgcggaacggaccggcgccgtcgatacgggcggcctcgatgatctcatacggcaggccgcgcatgtactgcacgatcaagaagtagcagaaggtcgcgccgcccgtgtaaagcacgatcaggccgagcagcgaatcgacgagacccacctgtgcctccatgcggtactgcggaatcagcagcgtctggccggggatgatgaaggacagcatgagcagcacgccgatcacggcggtgaacttgctcttcttcaggatcatgccgtatgcggcgagcgcgccgaacagcacctgcaggccgacgccgaccaccgtcacgatgatggtgttcttgaaggcgttgacaatgggcagatgcccgaatgcatacgtgtagttctcgaaattccatgtctttggtaacccaatcgggtccatggacatctcggcgctgcttttgaacgtgttgatgacgatgacgtacagcggcaccgcgcagatcagcgcgatagcgatgacgacgacggaacggatgatcgagccgatacgctcgcgttgctgcagagtcatgacagcctcttttctaccagattggtgattacctgctgcagggcgaccaacagcgcgcagcagatgaagaagatgacgcccagtgcggagcccagtccgtaccggctcgaaccgatgcccgtgaggatgatggactgggtcacggtgtaggtggagtagcccggaccgccgctggtgaggccatacggcagatcatagaccttcaaaccaccggtaagcagcatgaagatgctcacacccatggccggaaccatctggggcagtgtgatgttgaagaactgctggcgacggtttgcgccatcgacggcggcctgttcgtagatatcggcggggatagcctgcagatacgccagatacagcgtggcgtgccagccgatctgagcccataccgctacgaaaatcacacagaatttggcaagttcggaattcgacaaccacggaatcgcatcgatgccgatcttggcgagcagcgtgttgacgacgccggacttcagcggggagaagatgtactgccagaccaagccgagcacggccatggacggcaccgagaagaagaagaacagggaacgggcgaagttacggccgaagaacttgcggttgagcaccacagccagcggcagggcgatcacggtgatgagcacggtggtggccaccgtgtacagcagcgtgaagccgaggcccgcgagcagcgtcggatccttgaagcactgcacgtagttcgcgaaccccacgaacttcgcgtccgcgaaattgtaaccggagtaatcggtgaagctgaacaccaggctttgcaggaatgggatgaggatcaccacgatgaacaccaccatgatcggcagcaggaagcgtgccgaggcgaagttctccatgaagttgcggtgacgacgctgcttgagatgcaacgcctctacctgatcagcggaatgtggacgcgccgctgacgctgttgatactgacatgttggttgctttctacaaaacgtgagattggcaggtccaggcgtggcgcggacggaagggtccgcgccagcctgccgcgatggatgtctgttcgcgatggatcaggagagggtcttgagcttggaatcgaggttctccgcggcctgcgtagggctgatggagccgagggctacctgctgcagctgggtgaaggtctcggcgcgcagcgcggtggtgcccttgctccagtgggcggaattcaggtacacgttgccggtcttgatgtacaggtcgtaggcgtccttgaagtggtcgtccaccgtggcgttgaagcccttgacggacgggatcaggcccagctgcttctggtacagcttgaggccctcgtcggaggtcaggaaggtgaagaacttctccgcggccttgagcttgtctccggagatcttgttgttgatgccgaaggccggatcgatgtagcccggcgcgtacggggtgtcacccttcttcagcatagggatctggccgaaaccgtagttgaggccggtctcattgaagctgtcgatgtcccacgggccggaaggatagaccgcaagacgtccggcggtgaattccgacttgacctggtcgccgctcaggccggacacgtcggagctcatcaggttctgcttgatcagcttgtcccattcgccgtagtacttgccatacacgttcttgaacgtgtccttaccggcgtcgatcttggcgtcgagcgcctcgccctgcttggcggattcagcgccgatccagccctcgacggcgttgcccagtccatccttcggctcaaggtatggggtgattcccgcggctttgagtttgccgcacatggtcaggaattcatcccacgtcgccgggatggagtcgtaaccgaccttcttcagcagatccttgttgtacacccaggcattggtccaggtgctcacgcccatggcgtatactttgccatccacgctataggccttttttgcggcatcgccgattttatccatgaagctttcattgctcaggtccttggcgtagttgcctttgaccagatcgctcaacgcctccggaggaacgatgtagacgtcggccaggtttccgccggagattcgagtctgcagcgtctgctggtagccactctgggaaccggtggtggtgctgtagtcgatcttgatgtccggattggccttttcgaacgcgtcgatgatcggctggtacttgtcctgcgaattgttcgagaagaacgacagcgtggtcttgccgtcggcggcgtttcctccaccgcacgcggccagcggaacaagcatcgccgcagcggccaccgccgcaatcatcctgatggatttcttctccatgatgtactcctccttgtgttccatcattggcacccgctttacgtgcgttcattcgtcgaacccactccagctgcggtagatacacgtcaatatgtcttcaactgaccattcagttgattcgggatatttccttccctttttggtataactgtgtacctgttgaaacagtataggttttccggtgtaccatgtcaattcaaacaaggaaatttgcatcccatcgaccgctacccctacaaaacatcggcgtgtcgtataccggcagcaccgtcgacagcggacgacgacccgcccgcaccatccggagacgcgcagcccgaaagcgtattgcgggtgggcaggacgcatgtggacaagtcggtgtattacgggggattatttttccgatgaattccccagtattagttgggattgaaaagatgctgaaagtccacagataaaaaatcggcggccccaaggaaatatccttggaagccgccgatatgcttgcgtgcgtcgcgctacgggctcaagcgagtacacagcgtgctacgcagaccgtgagcaacacagaccgcgcgctacacagaatcgcaagctacaaactcaggaacagctcgtggatgcgggtgtcgtcggtgagctcgggatggaacgccgtggcgaggatcttgccttggcgcaagccgaccacattgccgtccaccgacgtttcgacggtggcggccggtccgacttcggccacgaacggcccgcggatgaacaccagcgggaaatctttgagcacgatgtcggccggggcgtcctgcggaacatgctcgcccggtgcgaccacgacggcggaatcaccggaagaggagccgaaatcggcggtggcggcgaacgagccaagctggcggccgtatgcgttgcgccgcacgacggcgtcaagcgcgccgaagtagacgttgtcgtcgttatcgagcttgcgggccagcagaatcatgccggcgcaggtaccgaacaccggtttgccggcggcgatatgctctgcaatcggctcgaacaggccggtggagcgcagcagcttgccctgcgtggtgctctcgccgccgggcagaatcacccggtcgatcgaatcgtcgaaatcctcggccgcgcgcagcagcttccacggcgcgccgaggcgatccagcatggcggcgtgctcggcgaacgcgccctgcacggcgaggatgccggtcacgccatgtttcgcggcttcgacgccggccgattcttccttcgaaatgtattcaactgctacaaccattaccgttcctgtgctttcggatgtgccggctccgcggtgcttctcgctgcccgcggagccggcgtcacgcatgcgccgtgcgggccgtcattcgccgcggacggccatgatggtttcgatctcgtcttcgttgatgccgaccatggcctcgccgaggttctcggaaaggcgggcgagcaggtcggcgtcctgccaattggcggtggcctgcacgatggcagcggcacgcttggccggatctccggacttgaagatgccg

SEQ ID NO: 232 - DNA, 10131 bp, Unknown
  R101_18m  MAG No. k141_36755
gacgtgttccgcgccatgtacaagcacgtgcacgacatcgacccgaaccgtccggtgcactacgagggcgtgacccacaaccgtgactacgatgacgtcaccgacatcgagacccgtatgtactcgcatgccgacgagatcgagaagtacctgaaggacgacccgaagaagccgtacctctcctgcgaatacatgcacgccatgggcaactccgtgggcaacatggacgaatacacggcgctcgaacgctacccgaagtatcagggcggcttcatctgggacttcatcgaccaggccatctacgccacccagcccgacggcaccaggagcctgcgctacggcggagacttcggcgaccgtccgtccgactacgagttctccggcgacggcctgctgttcgccgaccgcaagccgtcccccaaggcccaggaagtcaagcagctgtactcgaacgtccacatcgacgtgacgaaggactcggtgtccgtcaagaacgacaacctgttcaccgccaccggcgactacgtgttcgtcctgagcgttctcgccgacggcaagccggtctggcagtccacccggcatttcgacgtgcccgccggtgaggcccgcacgttcgatgtcgcatggccggtggcggcgtaccgcgccgacgcccgcgaactggtgctgcaggtttcgcagcgtctcgccaaggcgaccgattgggccgagagcggctacgagctcgccttcggacaggccgtggtgcccgcggacgcgatcgcgacgcccgacacgaagccggccgatgggaccatcaccgtgggccgttggaacgccggcgtgcgaggcgccggacgcgaggtcctgctttcgcgcacccagggcggcatggtctcctacaccttcgccggcaacgagttcgtgctgcgccgtcccgcaatcaccaccttccgtccgctgaccgacaacgatcgcggtgccggtcatggcttcgagcgcgtccagtggctgggcgccggccgctacgcccgctgcgtggacaacgtgctcgagcagatcgacgacagcacgctcaagggcacgtacacgtatgagctcgccaccgcgcagcgcaccaaggtgaccgtctcctacacggcccacaccgatggccgcgtgaacctgcacgtcgaataccctggagagcagggtgacctgcccaccatcccggcgttcggcatcgaatggacgctgcctgtgcagtacacgaacctgaggttcttcggcaccggcccggaggagacgtacctggaccgcaaacacgccaagctcggcgtgtggagcaccaacgccttcgccgatcatgcgccgtacctcatgccgcaggagacgggcaaccatgaggatgtgcgttgggccgagattaccgacgatcacggccacggcatgcgcgtcagccgcgccgatggtgccgcgccgttcgcggtaagcctgttgccgtactccagcttcatgcttgaggaggctcagcaccaggacgagctgccgaagccgaagcacatgttcctgcgcgtccttgccgcacagatgggcgtcggcggcgatgattcctggatgtcgccggtgcacccccagtaccatatcccggcggacaagccgatcagcctcgatgtcgacctcgagctgatctgatcagaattgatccgatagtccaccgtgcaaacgatgtggcccccgacttcctcgcaggaagtcgggggccacatcgtttgcacggtccttgttagtccagcggatgcgccggatatcgatgcagatccaaacctagtcgttgtagagcatcaatgaataaagatgtcactcataagctatcaagagaatccagaacctttttgaattcatatgctcgacacgcaatgtatccagcgtcgtttataatgattcattgtgccttaatggcgcatcgggctatagcgcagtttggtagcgcgcctgctttgggagcaggatgtcgccggttcaaatccggctagcccgaccagaaaccccggaatctcaacgattccggggtttttccttttatccggttcaaaccgatttatccgattttatccgatgaccgcagaacctacgccgcctcgtccagttcctccgccctggcacggcccacagcatcggccacctcatccagcttctccggccacaaccgcgcatacgtgtcaagcgtgaccatagcgctcgaatgccccaactgggactgcaacgtcttcacgtcgcagccgttggcaatcgcgatgctcgcatacgtgtggcgcaggtcgtggatgcgcacgccggaatcctccatacccgcacgcctgacggccggactccaaatgcgcgacctccacgtgttgacccacagattgccgccacgggccgcacggaacacataatcatcaggatcacgcccatcgcactgacgttccaaaccagccacaagaaattcagggaacgccacccaacgcgccttcccgtttttcggggaaccgagaatcatcttcccgtccttatcctccgcccaggtgcggcggatgcgcgctcgccgacggggaaagtccatgtccttgacctgcagagcgaaggtctcgccgatgcgcggcccgacgtaggcctgccatcgaacgatgagcgtgtcctgcgggtcgttctttactctgccggcctcgatggctagatcctccacctcgggaatcgagagaaataccatgtcgtcgtcatcgtcgacgacgcgtggagtggcgacggactgcatgggattcgcggtgatatatccctgtttcagagcatggccgagcacaccgcccatgaccacgcgcacgatgttgcggatcgaccgtggcttcaacgcgcgagtgttttccgttccgcgttttctgtcggccggatagccgccctccgacagttggttcacccatttctgtatcgcttccgtcttgatgtcccctatgggggtgtcgccccattgggggttgatgtagattctaagttctcgcttgtagcggcgcagggtgccgggtttgatgtcggctttcgttgccgtccactcctcggcgacccgacggaatggcttctgcgcgagcttggggtcgtggtagcggccgcgcctgatgtcgtcctccatggcggctttgaactcctccgcgtccgacaggagccggaacgttttggacttctcggtcttcacgccctgtgcctcggcgtaccagcggcatcgccagcggtcgtactttccgtaggtgctgctgcggtgttcggcgggcaccttggccttcatggggtctttggcgttggcgagactgcgcttcatcgcagcagtcggcggattgccgttctcgtcgtttttgagccaacggtcaacgatgaacactcgtgccataggtatgctccatcttcatctcacgtgctcatagagcagcgccctgtagtcttcgatgatttggacggtgacgttgagttcggcggccatctggtaggggtcgccatcgtacattcgttccgccaaagcgtattccgccgggtcgatgagcagtatggcggtctcccttcggcagcggcgttccatcttgccgcccatgcagccgcttgtggtgtcgtcgccgtgcctccagtggacgagctcgtgcacgagcgtgcaacgtttgcgcgtgtaggtgatgcgccggtcgatgaggatcgtgttcgtctccaggcagtagattccgtccaatataccgggaaggagcgcgctggacacgttaagctccggagccacgtcgtacaacgccattcgcatccgcccataactcattcgtggcgacagcggcggaaaagagacagtctccgttcgcctcaccgcgtcgatgatgcctgcatcgcggttcatgatgcgacctttccgtgcccgtatggacacaccgacattgacagtcccggcgctcgcggacttaacttgtgggaggggatcggctttgtggattacggctgggttcccgaatggggagtaggactttgggtcgagaattcctttgctcctgtggccggtctccgattatttctgtttttagcttgtgatgtttgatttgacttctggagtgtcgtgtgcaagaaaagaagtagctcatctgcctagttgtagaaggagtttcctgggtcgctgcggcggcccttgtttctttctactgtattttgtctccacgattcttggcctgctcgtagcggcgcagctgttttctgtagctgtgttcctgatctagatagtaagcggtgacgagcatgcagtatggccggggcttctctggatgcggttccaacaccaccagataacgctccgggtccacgaggatgttcacccttgtccgtcctctccatggttccttccagaccattggtttctcgcagattgtgtaggcgcattgcgggcattgacggcaatactggacggtgggtcgtggatatcgtatgcgctcgcagcgtcggacatccgtgattcgttccccggtggcatggtcttcagtgctggtgatgtggaagaatccggcccatttgccgtcttcttcttcctcgtggcgtctaacggtcacggtcaaattgtcataggttgggtgtgacaggatgaagtctctgcggaagatgtcgtataggcggttctcgtacgagctaaattcctcccctatgttctgtgtttcgagttcgggtatccagtgaggcgtcatgaccgttcaccttcccatacgaagatgttgaattttcgcgcgcccagactggtggactgagtgaggcgcaaattggtcttagagcgaatgcgctcgatgatttcacgtttcgccccctgcggcaggggaattgtcgttctgttagctcggcagaccgccccgttgatgatgtccactatctgcatcatttgcacttcgtcggagcgtattggttgtactttctggatacactcgtggttgaagtcgtaatggctgttggcgcatacctcttcgagttttttggctcgttgagcagagtgcgtgtctttgatgtcgatatatacgttgtattggttcacggggtcgaacagccggttgagcatcgtgaagtacatcttgtaataccaatcgttgtgcgactggtggaacgactcgtgccgaagcctggtcttatccgccacgagcacacggaaacgcaaatcgtcatcatagaagaagtaatccacgagctctctgtataggtcgagctttgcattgctcagcttcgtccatttaacttcggttcgagccttgaccccatgccgtttcttgatgtccacgatgttgtcgcttatttcctttttcttatccttcggcagtatcagggcacctagtaccataacgttgctgtcgtcgttttccagatgacagctctcatcgcaatataggttgtattcagtcatgccgtctcctttgaggtcagtcattttgtagtggtgtacaaaatgactgggattcagtgttttcaacgatttatgtcatttaatacatgtaaatacattctgaacagtcaaggcttacgctggatcgtccccatcgccatcgaacttgtgctcatcttctagggcgacgatgtccatgtcaccacgatggagtttcttgagcgtttcgtctattcgcgcctgttcatcgtcaacaaagcgctcgccagcgggtttctttgttgttgcggtttgttgttcgagttccatgtgtcttgcctcggtgatgatctcacgcagggtttgcaccgggtctgcgtcgcagacttcgcaaattataagaaactcggatagtctcactggcgctttaagcgcattgcgaatatcacgtactcggttgtatccgatcgcgcttttcgatgctcggtcaattgccgagttattcatacccgctcgattgattactcggtcgagtatttttgcggacacatcatcgacgatggttcgctctcgcttgttcgtactcatgggctcaactatagcagacacgccgagcatttgctacaaaatatagcaggagctatattcagtttcactagagcaaacgctatagggggtctgagatgagttggatttttgccggcgtcagtgtcgcgtcggcgttggtgtccgtggtgaacgtgctgctcttggcaatcaccggcgggggtcttctggattggctggacggtcttctgctggcggagcgtccagagtccgccaggcccatcgatgggatttgctatgtagccataatcccacacgagaatgctcgaaccgccaacgaagcaacgtcggataatgctcgcgcttctcgggaacgggatagcgcggctgtttcggaatgctcccctcaatcgcataggtcaggctcacacgccgacgcaaccgggtcggctgcgccgtccagatcaggcgtatcgcgatgatatcggcgtcgtcgtttctgaaaccgagcagcagaagctcgtccgtggactccacctgcgcgatctggctgggggtgaggaacttcgtgttcgtcccgtcgtcggttatctgcaggaaatacgccttgcagccgatgctgtcgaccttcacgtcgtatgcggccccgtctccggaattgtatatcccgcaaatgaagtcaggctctctctcgccacgccgtttaagccagccgtccaagccgggaacggtcgccgacagcggggtgtccggatgcgtcgaatatctcaacaatgtccaatcggcctgcggccggttatgccagggccaccacaccgtgatcccggccatgaccgcagacaccaccgcagatccggtggaaatccatgcagaccagtcaatcattgcactcgcctcgtaaccagactcgaaaggagcaaacacatgtccaatctaccagcagttgaagccacgaaacgtgccgtgcacgacacccgcacccgcgtgctcctatccaaaaccaaaatgaccagcatcgccgaagcctgcggccgcaaccgcatgaccgtcgccaaatggctcgacggcgacgacatcagcctcgcagccttcatcgccgcacaacaactctcaggcggcgacccactcgaaacactcgccaacgcgctcaacgccgacaacaccgatcccgcgctcgccgccgagaacatcatcccggcgctcgccgaaggaggtgcgaaatgagtggatataaggcaacccctgcggtgcaagcgcaggggtgtggtcacggcccgttctcagatctgttcgaagctgatggggcatccgggcgtccagtacgcagttacgtcgttcccggaatccgcgagcttgccgctgaagacgacccctccttgcgtcctggtcgacgtggtgagcttctgggagatcgcctgcgtttcggcgtcgtcgaacggtccgatcagctcgtcgttaaaacggatattccattgcgccatgtaatcacctcccttctttgcgtgggtgccctcattgtctcgctcgaactcgctggcaaggaggtgaagtgatgggaaccgtcagcacccgcattgaagaaggggacggtttcaaagtcctgagatacgggctcggaagcatcgttctcatcatcggctatccccagtcggaaagcgacctgatcgacgcgcgagatgccatcgccaaacagttcgattacgaaatcagcatgaacgggcgacggcacggcggacatcgttccgtccgcgccgccgccatgccggagtcagtcgtcgatctcaaccagcgaccaccacagggcggcacgcggattgagatagataagagacccctctgggacaccgagagcccgacctcgaaccgagaccacgccacccgacgcggcggcgctctccaattcattgagaatcttcgacggatactcttctcccgctaaatcgacaaaccgtcgcttatcggcggtcgtctcaaacacgagtcgatacgtcattatttttcacctcctctcattgctggtagttaggcaatgtccagcttaggggaggtgggccaacgcataaaaaggaagaaaaccaatgagcgagaaactcaccatcgcgaaccccgaggacgggaaccgtcccctctcctatcaggctctcagccacggcatcgacgaaatccgtttgggtgacatgggcatcacggacgcggtgtggcgcgggccgcacagcgagctcgtggcgttggcccgtcgaatcctcgacgcggaggccggacgatgaacgcccgggattacggacagcacgcgagcggctaccgcaggcccgagctcgacgaattgcctcgcggcttcatggtccggttgattctctgggccgtggttttcgccttctgcatcggctgggtgatgtcgcacgccggttgcgcgcatcccatcggcaatggtttggcctcccttgtgggattcggttgcgcgccattgcggctcctgtgccttgtgctgagcgaggcgggagtcgaataacaggcttgccggggttcctttctttccttccccggcaatcgacaaggacagtcgttaacaccatcgcgccgcgctcggagcagcgggtgtggcgcatggggccggcaggttcgcccccgctggagatcacggtgtcatgtacgtggcaaacagcgggaggccgttcgattcggcacggtccaccccccatatccaccgacatcgaaggcccctcatacgggccggaaaggagaaccatggccgacgaaacagaacccgcgatgttcgacgcgttggaaaaggcgctgatgccgttgaacagcgcacgccagctggccgagctcagcggcatcggcgaatccacgctggccgaatggcgcggaacgcacacgggacccgcctacgtgaaatccggccgccgcgtcctctacccgaaggaggccgtgctcggcttcatgcgcgccaacctgcgcgaatgcaaggaggccagcgcatgaccggccagccgaacgactacgagcatcgcgccgagggcgagtccacgttcgaatggccgttggattccgcggggatgcgcatgagcgcgggcgaactattggacagcctgctcgccaccatccagcatctcaaccgcacggacgcatggccactgaccatactgccgccacgctggacggacgtgatggtcgaccgggaacgccgccagatctcggcggtctgcctgtggaaacgaaaaccagtcaaaacccataaggagggatagatgtgcgagaaacccgaaaccgaaaccgaaaccgtgacgccgcgggtggccttcgccaccatattgcagtcgctggtggccgagtcgccgaacaagcccacgctgcccgtgatgctgtccatgcttgaccaggcgatggatcataccgggctgcgactggagcttgccgccgcgccggcggaccatgaggacgatgtggcgaaagccagccgccgcctctcgcgcagggcgtatgacatgacgagcctgctggccgacggcgcggccggcgccggcgactgggagctgttcgacctggccgacgaggcgcgttccgccgccgttgcgctgctgcgcgcgttggatggtgatgcgtgatggcgggagagaccgttcttaccatcgtcggcaacctgaccgccgaccccgagctgcgtaccacgggcggcggggcgaccgtggcgagcttcacgatcgcttcgacgccgcgcaactggaaccggcaggccaaccagttcgaggacgggcaggcattgttcatgcgctgctccgcatggggcgacatggccggccattgcatccagtccctgcacaagggcatgcgcgtgatcgccaccggccggctgaagcagcattcgtatcagacgcaggacggctcccagagaaccgtcatcgacatgaccatcgatgagataggcccctcgctgcggtacgcgaccgcgcaggtgacgcgcgtgcagtccggacgcggctactcgggcggcagcacgtatggggacccggccaaacccgccaaccagcaacagggctggcaggacggctccccgactcccgcgcagaacctcggcgctcccgaaggcgacccgtgggcgcaggcgccggccacgacgcccggcaccgcgttcggcgtttccaacgatttcccgtcaaacgattccaaccccgaattctaaggagattcaatgtcgcgctagaaaaagaccgacggcgtacaggacgcgc

SEQ ID NO: 233 - DNA, 3833 bp, Unknown
  R101_18m  MAG No. k141_37820
ctcccatgacagtccggcttggaaggtctcgagcaccagcatctcaaagaggtggtggtcatcatgcgacggaaccgcccattcggcatcgtgataggcaacatagacgggattgctgagattgcaccagccgcagcgtggtcttatatcgtccatgtgctctccctatgggtcgttggagacggtcggttctagatgttgattcgatgtgtgatccagtataaacggtgtgttcggatagcggtctggatgtgcggattgtctgaaccatatttgccggattgcaggtataaaggggttagttactgcggttgcgggtatttcggtactagttaggggtgattctgggctgtaactcgacaccttttacctgcaacccactcccgcccacgggattgcacaatcggttgcaggtattttggtgtcatttgagattgggaagcggaaatcgatgtcgcatggaatcgaactgactagcaggtggggtcccaacatcacaaaagtcccttagaccgcaaggccatataggttctacggtcatcggataaaaccggataaatcgtttagcggtcggataaaagaagaagcccagaatcgttgagattccaggcttttttgtttgtcgggctagcgggatttgaacccacgacatcctgttgtattcgacctgttttcgtctttctccatcaaattctgtaagacctaaaacggttggaatttcaacgttttgcgcctatgtagttcattcgttgagttcggtgatatatgtcgttttcagaggtcatcggataaaaatcggataaatttacaccgtctcggaccgcgcctacaacgtgaaaaatcggccccgtccggccgcagtcaagctctatgagagccgtctgcggccggacggggccgtaacattcggggttaaattattctttcaaaccccatccagacgattcgtcacttggatgtggcggtgaaggtgacgtcgatgctgtcgagtttggccgtgacggcctgcgcgacgatctcggcgatgtcggctgggttcgcgccgaggctcttggcgagcgtgtccagggcggtctgctgggccgcgaccagggcggtcagttgcgcgagggccttctcgttgcggtcggcccgctcccagatgcccttgatctcgttgtacaagttgccgccatagcagccgccctggccgtccttgtcggtccagttgtaggtcgcgaccttgcccgccgtctgcgatgcccgggcggggcgttcggtttcagggcatgtcgtggtcgccggcgagcgccgcatacagttcgaatgcgagtacgactgcgatcaggcccgcgtattcggagagtcagcggatgcggttcatacgccgagcttcttcatggtgccgcgcaccatgctgtcgatctggtcgaagcggctccaccatggggcgccgttgttgccgtggatcaatggcacgcctgcctgctggagcaggttggcctgatcggggtgtgtgagcgcggtgcgtcccttgccgggctcgcagtaccagatgactcccgtggagtcgttgcggatcatcattgccgccatgatatctacctcctgtgttccggtgttgccggatagcttctgttggacgagttgaatgaatgccggccacgtgtagccgtagcggctgaaatacggaatcgggtcggtgtggtcgctgccgccgtaggtctgagagaaccatgagtgcgggtgcatgcggtccacgccccacccgtgtgcgcgcaatcgttgtgcgatcacgtcggcggcgatgtcgatgcctttccagaagtccgacgcgttggtggcctcgcagatctcgatgccttcgcacgtggtgttgccgttgccgacctgccagcacaatcggtcgtagggcacgcagtggatcgcctccttccagtcggaggtgaggtgaaccgcatagtcgtagccgcgagaccataagtcgcggtgattgcgggccgttgcgccgggattcgccgtgctgtgaacggcgaacagggacgggctgagataaccgtgcccctggttgactatctcctccttgatctgaaccatgggctcactccgtggagtcggccttggcatccgggtcggagatcatctcgctcatgggcacgacctcgcccggcatatccacggcgttacctgtgtcctgggcaagcttgacggcattgacgacctgctggccctgcacggcggcctcggtcacgttattattgcgccaccacgagtagatgctgacgatgacggcgatgacgccggtgatcgccgtgctcacctggtccgaggtgaacggcagctggctgatgccagcgatggacaggccggtctggacgacgctgaacagctggacgagcagcagcacgatggatttcgtgcgctccacggtcagacctggaatcgtggtggtgttggcggccttgtggtcggccacgcctttggtgtttgccattggtgttcctttctattggtggtggtttcctccgcgccggaggtcgttgacctcgtggcgcagttcgatgaggttctgctcggtagtggtgatgcgacgattgacggtcgcgaactcgccgttcatgtcgtcacgcagaccgtcgaccgcgccgcgcaatgattcgatggcgtccaatgtgcgcagggccttgtcgtcgaggtcgtcgcgcaacggcatctcatggttgttcgttatctcgccgcgcgtcgcccgatccctctcgtcccctctgtggttgatccagatggcggtgacgatctgggcggcgagcaccagggcgctcaccacgatgtacgcccatgcgggcaatccctcgggcaggttcatgcacggctcctacggtatggaaaacccacacgcagatccgcatggaacggccatgctgcgtgtgggttttggaggtatgaaatgttgctgaatgagtattgggacgagtcgtattggccgtcatgtggcaggctgcgcgaatgcacgcgcgtcggatatgcgagtgcatggcgacgtcacatacgacccgaattgggtgacatggacctggctgacctgacagggccgcgtatccaatcgtggctggactcgatcacgtcggccggagcggcgcgtaaggcgtgggccgtattgcggcagatgctgcgttcggcggtgcggctcggattactggatgcggacgtgaccggcagggtcacgccaccgaaaccgagcggttatgaaccggaggttttggatatccgccagatacgccagttgctgcagggtttccacgggcatgagctcgaggcatggctgatctgcagcgtatgcctcggattgcgcaccgaagaagccctcggattggaatggcaggatctgaacctcaacaccggcaaggtcagggtccagcgcggcctgcaatgggtggacgggcacgaggtaatcgtagatccaaaaaccgagttgagccgtcgcaccatcgtgctgccgcgattcgcggtacttcgactccgtgaaatcaggccacgagacggtggccgactcatcggctcgttgaatcccggccaggtcgctcgtcgctacgccacatggtgcagatcgcagaacctgccgtatgtgccgagacggaacctgcgccatagctgggcgtccaccgcgttaggcgccggcgtagatgtggcggtggtcagtcgagcactcggccactccagcatcgctacaacagcccgctactacctgcgcccagacagtgaagtactccgcgaagcgcaacgcacatgggagcacgccctcatacgttgatagggattcgctagccccgctgcatctctacactggcagtggcgtc

SEQ ID NO: 234 - DNA, 5928 bp, Unknown
  R101_18m  MAG No. k141_39918
ccgcgcggccaacttcgccggcaccgattcgatcagccgattcggcgtgcccggcacgctcgaccagatccccgccgtatccgaactgcccaacaacgacgccatgcaacaactcatcgccaccctccaatccacgcaatagctcttttgccagcccccaatcggtgtttttattaaccccctctgacgagctgagtcgtatagcaaacagcccagtgggctgtttgtagacgaaggcgagcgagagcgagcaaataagaaatcggctgtaggccgtccttaattgcgttcgggctcccggcaaagccgggtggggggagagacccaaacataactatcaaaaaaggaaccagaatgccccaaaacatcaccctcgcagacctcaccaaaagctccgcaacccccatcaccaacccgttactcaacaccaaccaagccgcccccaacaccaccctcgtccccaccgccgccgaagcccaagccgccgcggccctgaccccggaccagcagatcgccaaattgcccgaagccgaccaggccacggtcaaccagatggccggccagatcgacttcactcgcgacggcatcgaatccagctacggcaaggacgcccagcgcgccacctccaccttcgccgacgaaatcctctccgacacccgctccaaagacaccggcgaggcgggcgaactactgaacaccatgctggtcaccattgacgaggctgacctcggcggcttccgcaccattccgatcatcggccaggtggccgtcagcgtggataagctgcgccgccgctatcagaaagtcgacgcgcaaatcgacgaaatcatcgtgcgtctcgaatccgcgcaagccaaactcgtggccgacatctccatgtacgacacgatgtacacgcagaacgcccagcaataccgcgagctgaaaatgaccgtactggccggcaagaaggcgctcgccgacttcaacgccaaccagctgccagcgctggaggccgaggccgccgccagtggcgacgccatgcaggcgcaagtgctgaaggacttcaagtccaagctcgaccgttttgccaagcgactcgacgacctcgaccgcatcagcgtggtcaccttgcagaccgcgccgcagatcaaaatcatccagaacgcggaccagaccatcgtggacaagatcgacaccaccatctccaccacgattccggtgtggaagagccagatggtgatcgcgctgggcctgtccaaccagcgcaaggccctcgacctgcagaacaaggccgacgatgtgaccaacaagctgctggcgcgtaacgcggccgccctgcacaagggtgcggtggacgcggaaaaggccaaccagcgttccgtggtggaaatcgacacgctggagaagatcaacgccgaactcatcgccaccctgaaggagaccgtgcagatccagaaggaaggcaaggccaaccgcgaggccgcccaggtcaagatgcgccaaatcgagtccgacctcaaaaacgccttgctcgaaaacgcccagcagatgtgagccgttcgcgcgccagcatgctcccgttggcagaggtatatgagtacgcctactggtgtgcgtatatatgctcccgctggcgggagctggcagccgtaagactggctgagggtggtcacggcgctcggctcggccggctttaccggcaaccattccccgccgcaatttctctgtgggcataatcccggaatgattgccgcgctcgggaattgggtgaagtgaaggttaaaggttgagagcccgggagggttccggaaccggtcacgataaccgctgctagccccgcgatacgggttggcggccggtatccaagccgattctctcctaatcaaggagtaccgattatggcaatgtttccggctttgatgaatgacacgatgttctcggatctgttcgatgatccgttctttgagggttggcgcaacacggacaacacgatgagtgccgcaatgcctgccaacatgatgaccaccgatgtgcgcgagaccgacaagggttacgacgtcgacatcgatatgcctggctttaagaaggaagatatcaaccttgagctcaacaacggctatctgaccgtgtccgcctcgcgttgcagcgagcatgaggacaaggctccggccgctgagggcgaggcttccgacagcaagtgcgcttgcgcgtccgattcgggcaagtggctgcgtcgcgaacgctacatgggctcctgctcgcgtagtttctacgttggcgaggacgtgaaggagtccgacatccacgccagctaccggaacggcacgctgtgcatccaggttccgaagatgcaggcccagccgcaagtcgagtccaagcaccaaatcgcgattgagggctgacgatacttgattcgtcccgaagtcccgcttcgagtagctttgccccctctgacgagggagctcccgcgaagcgggtgggggagagataaatcgtaaccaaaccatgcttcccacgccgcctgccctacgctttcaacgccgactaacctgacagacggcgggaaacatagccaatgcaaatgccgagtagggatttaccctacccggcattttgctgtttcaatcaccgaaccccaccctgttcgcgcgccggtcgtgtgccgttctgcagctgtacacatccgatgagtagaatgccttcgaaacgaggcaagagaggcggacatatggcgaacggcgcacagaacgcaagcggcacgccggccccagcggcaagccgttccggcggccacgtcgtatccgcgcgcgccacgaccatcggcctgatggcgatcctgctgtggagcttcatggccggcaccgtgcgcatcgtctccgaaaacttcggtgccacgcttggttcggccctgatctacacggtcggcggcatcctgctgctgatgttccggcgcccggccccgattcgcgagttccccaagaaatacttgattatcggcggcctgttgttcgtattttacgaatcgtcgatatccctctcgctgggtctggcctctaccgacgcatcctcggtggaagtgagcctggtcaactatctgtggcccacgatgatggtgctgctgtcggcgggcgtatcccatcgcaagcacgcggtcgtcaaggtgctgccgggcgcgattgtggccactgccggcgtggtgctggcggtcggcggtaattccgggctcgactggcatgcggccgtgcagcatatcgccgccaaccctttgccctatgcgctggcgttcgcgggcgcgctcgcttggtcggtgtacgcggtgttcacgccagccatgagtcatggggtggacggcacttcattgttcttcccctgcgtggccgtggcgttgtggattatccacttcgcgtccgggcaggggtggccggccgagccgccgagtctggtcgcatggctgtttgtgttgattgccgcggcggcgattggcggcggttatgcctgctggggctatggcattctgcatgggtctatggagcggctggctattgcgtcctatgccacgccggtgctgtccaccggggccggtgcggtgctgctgggtttggcgctgtcgctgccgttttggtgtggcgcgctgctggtggccgccggatcggtgctcaattacttggtcagtgcgcgcaaatagcggggtggctttgctcatggggcggtaataatcccatggggcggtaaaaccctcatggggcggtatcccaaaatggctttattctgccgtttcacaatttcttcaaaccgccccatgggccttttaccgccccatgggtaaattaccgcccgatgggcagcagcaacttactcgccgcggcgctcggacgggcggcgaatcgggtcaagcagcgtattcggatcggagatgccgaacatgctgcgcccgccggtggattcagggtgcttggcgagaacggccagcgaaatcgcccccggaatcataatgatcaccgaaagggccgccaatccccagttcacgaagaatccgagccccagtacgatggccaccacaaccaccaccgtgacgataatcgtcaacagtgctcgacgtgggttggtttccctggtccaagaggtgctggctgcgggttttgctgttgaactggccgcggcgtttgtggctgttgtgccatcagccgtgccggtcgtgggccttgccgccgcgctcgtcgcggggtcagtaggggcgtcagacacgttatcggcgacattgccggtcgctgctggacgttgttcgtttgcgtgagtcatatccaccaacatattccctgcttccggctaaagctgggacaagcctgcgcaccgctaatccagcgccgacactggccttgagctgcggacgtccaggccggatgtgaacaggagctgaacggagtctggggaaaccatgagaactcgcgacaatttttgtgaaattgggtgacgctctatgaatcgcgcgctagtattgcgtgagcttacaagacgaggagcctggagcgcggggacgaaggatgaagaactccgtttggaaaacgttcatggaattgtcgctggtccgcggaatcgtgccgtggaccgtgttcggactgaccgcgatcgcggcaatcatactgattgttgggctggcattgagcaagaagcgcggcccggcagcagacggcctggcgccggacggcctggcgccggacggcgaatcgtcggcccaatcgcccgtcgacccagataaccagccggccaaccagcctacgaacgcggctgctacggcgtcatccgcagcttcgacggaagagacgtttatttcccatggcctgcgtacgccgcaacgtcgtcacttgcatccgctggccgccgcgctggccgccgccgtgctcgccggcgcgggcggactactggccacatggctgatgtccgacgtgttcatggtgttcggcgtatcgctgggctggccggtgatcctcaccgtcgcgggaggcttcgcgggcctcggcttcgtgctggccgccgccgtgacgttacggggggcccgtcgcgcgctggccgtcgtgctggtgccgctggtgctggcgtccaccgcgcttggcgtggactcgatctacggcgaataccagaccatcggcagtctcgtcggctatacgccatatcccccgctcggttcggtcaccgtgcgcaaggcctcgatgagcgtcggcgagtggcgcgacaaggcgcgcaagggcgctctgccgtccatgcccgactcgggcagggtgttcgccgtcaccatcccgaacaccgaatccaagttcaaggcgcgcaaggcgatggtctacctgccgcccgccgcgctgtccgcccgcccgccggccctgccggtgatggagctgctcgccggtcagccgggcagccccggccgcctcatcgacgccggcaacatcgccgccacgatgaacgcttacgccgccgaacacgacgggctggcgccgatcgtgctcgcacccgaccagaacggttcggccatgcacaacagcctgtgcgccgacaccacccgaggcaacgccgaaacctacctcaccaaagacgtggtgaactgggccagggcgacgctgccggtagccaagtcggcccgtatgtgggcgatgggcggattctcgcaaggcggcacctgcaccacgcagctggtgccgcgtcaccccgacatctacggtgcgatgctgccggtggatggtgagctcgagccgaccgacggcagcgtcgagacgatggttcggcgatatttcgccggcgaccgcaaggcctacgacgggcaggtgccggtcaacgccatcgccgccaccggcacggccggccaggcgctgttcgccggcgccggcaaaggggatcggaagtcggtcgccaacatgcgcaccatcgccgcggccgcgcgcgcggccggcatgc

SEQ ID NO: 235 - DNA, 8198 bp, Unknown
  R101_18m  MAG No. k141_40175
ttcgacagtggcctcgtcggtgaggttctcccccagtttgttcggtttgcctttgccatgccagtcagatccgccggtgaccagtagctggtgccggcggcagatggtgagcagccgttctcgttgctccggtgaattgcctcggtgccatacctccagcccgtccaatccctcgctgatcaacgcttcgatctggtcatcggacagcagtctgcggttacggctcacatcaccggcatgggcgatcagaatcacaccacctgcccctttgacggcggccaccacttcatgagaggtcggcgagggcgtgggaatatagtatttggatgaggcgctgaccgcattcgcaaacgcttccgaacgagtccgatatacgccggcactcaccaaagcatcagcgatgtgaggccgcccaatggtggttttgtcaccctccttgacttgggcgagcacggattgccaggtaatcggataatcacgagacaacaattcgaccatgcgctgcgtgcgttgcaaccgtgcggctcgagtatcggcgaacaagtccgtgatgtgctgattcgtgggatcatactggtagccgagcatgtgtacggagacgttctcatccgtggcggtgatttcggtgccgcggagcaacggcaaaccgaccctatgggatgcggcttcggcctccggccagccggcggtggtgtcatgatcggaaatggccacgcccttgagtcccaatgccttggattgttcggccaatgtggccggcgtttccgtgccatccgagaagacggtatggcaatggatgtcccacccgacggcgggcggctccaaaggcatcacatatccagtcataccttccatcgtaacctcatctcagcattcccacgcaaggcgcagacaggtcgtcaccttctgccaacggccaagaccagacatccggcactcagctgacaaccgcagaggctaatctggagcgcagcgctatcgaaaggggcatgatgactcgtaacaccgcaaccgacacatcatccagcaccacgaacaccacgccgcttggcttggcggaggcgcgaccgttgattggatggcgccacagtgccacttggacatatctcatcatgctgatcgcctcggcagtggcattgggggcctcgctcattctgtccgccgagactttgcagttggctaggcatccggagtccgcgctcggctgcgatctgaactcggtggtgtcctgttcggcggtggcccagtcctggcaggcggaaatcgtgaagttcggcgggctgagctatccgaacgcgttcttcggcatcgccgccgaatcggtgttcattaccatcgcggtgatcggtttggctcgtgtgaaggtgccgcgttggttcgcgacctgcacgtggctgggcggactggccgctttggcctactcgtactggctgagcacgcagtcgctgttcgtgattcacgcgctgtgcccgtggtgcctgaccctgatgttctccaccaccatccagttcatggcgttgagccatgcgaccgtggccgtgcagggattgccgtcacgtaaggctgtggctgctgatgatggcgacggtgaggttgaggtcgcggcggtgccggccggactcaataggtattaccgcctcaacatcgacctcatggtcgatatactgtggatcgtggcgatcgtggtactcatcatcgtcaccgaaggcgcggccctgttcgctgcctgattcctttacaacaaatcgatatcggcgaccagcgtggctgctccggtcagctttacgtcgctgtcggtgacgtccacgcgcagggtgccgccacgtacggtgatgtcccagtggctgatgccggtcttggcccgcagcacaacgcctgtggcgcataggccggtgccacaggacagggtttcgccgcaaccgcgttcgttgacgcgcatcgtggcttcacccacgccggtgttctgatcgatgtcgtcgacccgcacgaattccacgttctggtcggattcgatgaccggagccaccactggtttggtgaccaaatccagtgattcaaccactggcagggacgcgaaggcgtcctcgatcaccgcgaccacgtgcgggttgcccatatccacgaacgtgccgcgcgccgagccctcagcgccggggatggtgacctcgtaggcgtcggtttcgccgatcttccactcccccatttcgacctggaacacgttggctccgtacggcctcatattgccgcgtggcgtcagaatcttgacgccggcacgggtgccgaggcggaacggctcggtggagtcggccacgccctcgcgctgagcgaacaaggtgatggcgcgtgtaccattgccgcacatctccgccaacgatccatccgcattgcgatagtccatgaaccatttcgcgcccccggccagtacgtccgaaagctgatcatcgcttaaatcagacacgaaatcaggcctggtcaggcgaatcaggccgtcaccgccaatgccgaagtgacggtcgcacaggaatcggacctcatcggcggaaggctcgaatttgccggacttgtcgaggtacaccacgaaatcattgccggttgcgtgtgtcttggttactcgttgcggaagactcatggctttcagagtactctagggagcgaaacaacaccgcaaaacaatcggctttgtgatcggtcgcggcaacatacggttgcaggcatggctatagggaggattcaggcatgagctcttcggctccaatcggcgtattcgattcgggtcttggcggtatttccgtggctcgccaaatcgccaaggatatgccggccgagcgtgtgctgtattttggcgattcggccaacgccccgtacggcgtcaagacgcctgagcaggtgagggccctgagtttcgatattgtcgaacggttcgtgcgtcaaggcgtcaaggccgtggtcatcgcatgcaacaccgccacttccgccgcggtgaacgatctgcgcgaacactacgatattccgatcatcggcatggagccggccctgaaagtggcgtgcgaccggggtgacgtgccttccgacccgcatcatattccccagagggtgattgtggcggccactcccctgactttgcgtgagcggaagttcgccaagctgatggatcgattcgattccaacaacacgattttcaaggagccttgccccgacttggtggagattgtggaatccgggcggctcggcgaccatgacctggtgatgcgcacgctgcacggctacttcgaccagtacgacatggagcacatcgactcggtggtgctgggctgcacgcatttcgtgttttaccgcgactacttccgcgaactgctgcccgaacgggccgccgtcatcgacggcaacgaaggaaccgtacgccacctgggcgtggtgttggagtccctgggcaaactggcacccgaagacgcgaccggcggcgtggaactcgccaattccgatctgtccgaacgtgttacacggctttcacgcgacctgctgaatgcgtgatcggatgcatgatgatgaataggaggctgatatggcactgaagacggcaatgattgatgtcggcggcgggttccgcgcgattttcggctgcggcgttatggaccgcatgctggaggacggcatcgacgtggatatgtgctacggcgtttccgccggcgcggccaatatgacctcattcatcgcccgccaacatggacgcaaccacaccttctacaccaaatacgccttccgcaaggagtacgcgagcgcggaaagctacttcaagaaccgcaacttcgccaatctcgactatatctatggcacgctgagcaaccatgacggcgagaatccggtggatttcgcggcgttcgaggccaatccgaccggattcaccgtggtggcctgcaatgccgaagacggctcgaccaagtatttcgacaagtcgcgcgtacgcttcgatgatttcgacatcatcaaggcttcgtccgccgtgccggtggcctgcgagccgtatgtggtggatggcgtgccgtatttcgatggcggcatcgccgatccgatcccggtacagaaggcgctggatgacggctatgatcgcgtgatcctgattctctcccgcctgcgcgacgaagtgcgcaagcagcagagggatctggccccggcccgcatcctcgaacgctcccaccccgccgcggccgagaggctgcgcatgcgctacaagacctacaacgacgaactcgaactcgccaagcattacgaggcggaaggcaaagtgctgatcctcgcacccgaagacctgtatggtctcaacaccctgaagaagaacttcgagggcctggaaatgatgtaccgcaagggatacgcggcggccgaggccatcccggcgttcctcgggaagtgacggcaccggcgaagtacccgttcacgccaaaccgtatagccgttccgcattggcatgcgcgatggcgtcgataacccgtttcgcctgattcgcgttccatgcgccatccgatacccagtcgatggcgattcgcgcaatatacctgcggaacagcaccgcggccagataatgcaattcactgatgccgacgccgtccgacgcatagagcaacttgtcaaatgggcaccacgccagaacattgcgcagcacttccctcacctgcgctcccatatgcggattggcaaggctgacatccatgtatacgttggcatgcaccgagcagagaaacgccgcttcacgctcgtatggcacgcaatgcagaagcggaagtgtcaaggtgcaggcgcagatcgccggacacgttgaatttctcgttttcggcgaacgagttgtccgcgccgaacaccacccagaccagggcggcgcccaatccgttgcgttcgaaggcttcacgcctgcgggcgggaacggatttggcacgggtcacgccggcatagtccacataggtgccggtgacgatgtccacgggcttgcgttctgcggaaacggtgttgggaatgaagttggacatggcgatttcctttactggtaagaagacaatgaatggattgttagtaagttatcgatatgagtagctgaggcggaatgcggatggacgacaagcccgattcaggcgaaatactcctgaaggttctcgctggcacccagcttcttgcggaagaagccggtgcgaatcgcaatgatgatcaggccgacgaccaacctctttctgtgtttccccaaaccatcgggggaggaacgttgtggttcactgtagtacccgcgaccggctgatggggccgtgtccttatttgaaaatcatcgcttttgatataaggcgtgccatctcccgcatatccgacgcgacccgcgttatgatcactcgcgcgagcctcgtcggacgaatctgtcggccggccactgagtttttaacaatcaaccggatatgccatcgagctcattcgaggctgtcgtgtgcgagccgggcgaaggtgccgttgcggtcgaccagttgacggtaggtgccggtttcattgacgtggccgtggtcgaggacgataatccggtccatgccggttagcacgcggggccggtggctgatgacgatcacagtggtgcccgccggacggttggcgatcagatcatggtagattgcggcctcggcggtggcgtcgaccgcggcggtcggctcgtcgagtatccacaacggcttgccggacaggaacgtgcgggccagcgcaagccgctgccattgcccgccggacaggccaacgccgccccactcctgaccgagctgcgtatccaagccgccgggaagcccatccacgatgtcgagcgcgcgggcgcgacgcaacccgtcacataactcatcgtccgattgccgcagagcgggatcgatgaactcgcgcacggtcacctcgatgtgcgtgaaatcctggaacaccatgctcgacgcgcccaaccgttcggcccacgaccccaaggtacgaccgttcccgccgtccgcgcccgagggcagggtcacggtgccgtccggggcgtcgaggatgccggcgatgagcttgacgagcgtggtcttgcctgacccgttctcgcccaccagtgcgacgatcgatcccgcttcgacatccaacgacacgtcgtccaacgccggagtctgaacggccggaaccgacgctgccgacgcgtcatccgcgtcatcgtcatgctttgcaacagtcggatacgcgtacgtcagatgctccacgtgcacgccgaccggaccggtcgtttcggggatcgcggggttcgcgcgcagcaggcccatgagccgttcgtaggcaagaatcatcggcgtggacgccatgaggttgccgaacgcctcgccagtggtgcgcgtgaccgacaatcccgtcatgatgcccaccaacgcggccgggatgctcgacacggacgcatggccggacgtcaggatcagccagaacgcgccgcccgtcagcacggcgaacacgagcgaactcacaccggtcaactgcaccgtgcgccacgagatacgctcccacatgccggccatattgaaatagcgcacgcgcgcctgcgcagggatgccgaacgaaccggccgtggccgcgatctccgtgctcgacggtggataatccaacaaccgctcgaaatagttcgcccgacgcgactccctgccgcgcttgggccataactcgttcgtgagcttctccacgccgaactgggccaacagctccgggaccatcgccaacgcgatcatcagcgccgccaacggatgcatatgccacaaggacgcggccagcatgaccatcgacgccagcgcgcccaccactgaggtcgcgtccgcggcctgcgaagccacgttgtacgggatcgcgtcgcgcgcggcccgcacctgcgtcgtcacctcgtcgtccaacgtctgcgcgggagtcagacgcgccagcgcgtcggtcagatcggactggtattcggccatcaatggctcctgcaacaagtcacgcatgttctgcgccaacgacgacgacaccgacatcaacaccgcgcccaccgtcagcaccgccaggatcactgcgaaccggcccacgcccagccccgaccccataccaagcccgtccgggccgcacgcccaaccgatcagccacacctgcaacgacggcatcgccatcatcaccaacatcgacagccacatcaccaccgtacgcaccggacgcctacgcaacgcatacgcactcgtccgccacgacgtcgccgccgcatcacaaaacggccgaaatcccgcgacaatcggcatttacgacgcctccccacaatagcgaaacacagatgcaacgatagaccgcccgagttctaaatagaagcgcaacacctgtctatggctgaaagtgttcaagttcataaccagagagaaagtgtcgcgctcgatatgagagtgtattcccacctgtcggcagaggaacgtgtccggatcgacgagctgaggacacagccgatcggcgaacgtccgaaacgcgtgggcccgcgccgcaagttcggccattatgagtccgacacggccgtcggcgcctccccgtcgaggcggtgcggcgacacgcaggtcgaacgcaagagccgccgtctgttcgccgggttcatccccgacaagagcgcgctgtccaccgcgcgcgccgaatacgacatctacaaggacatccccgcgcccgcgcgcatcgaccggacctgggacaacggcacggaatcctcctgccacctgctcgtggacgagtcgctcggcatgctcacctactatgcggacccgtactcgtcctatcagaggggcaacaacgagaaccgcaacgggcgcatccgccgctacctgcccaagagaaccagcttcgacgacctgacggacgcggacctgcaggccatcgtcgacgagatcaacgacacccccatgaaggtcctggactgggaaacacccaacgaggtttgataccgcgaactcggcaagctaatgtcgaagacaagctacccaaagacgaacgttgcacttacaaattgaattcgggaagctcactcatgtttaatgtaatatttagaattacattaaacatatcgcatgcaccgcatttttcgagaaacactgtactctcggcaaagacaccaccctacacaccgcaactttccaatgacgcctcatgaccagcccggaaccggtccgacaacagaa

SEQ ID NO: 236 - DNA, 3542 bp, Unknown
  R101_18m  MAG No. k141_40810
ccttcccgcgtgcgacgtttttctgccctaccagcataccgttaccccacctgcacacggggttgagtaaggtggagaatatgattacgcccgccgaccttgcccgcatactggggcaaacaccagattcggcggatagccatacccaagaccacctgctgtatacgtccgaaactccgcatcattccgccgattcgggcgattctcccgatgccggcggcaccgtgagccactccaccaatcaggccgttcatcaagacgaagtagacgcagtaccgactgcgcaacattccggtgtacccggcacacccgcaacgcccgccacacccgcaccatccgaatccgaaatatcggacgccgccagcgacatgcccacaccgaagccgatgatgcccacaccggccaccgtcttcggcatgcatgccaccgtcaccatcgccactaccagcggcactatcgaggggcaggccgatggtatcgccggcgaggccggtgccgagacgattgccgaggtcgagccgattatcgccacggcacaaacgtccgtaaccatcgtcacgaacgattccgcggcgaccacccacgcggccgtagatactgccgttgcggtcgccaaggccgccgccgcgcataccgcagcgataccgactccgcgcgacgtgctgatgccgcctgcggcacgtaccgcaccggccgcaacgccggtcaccatgccggtctcagcgccgtctgcagcaccagtgaggcccgcaacgtcagcgcatcccacgccggccacggtcttcggccggcatccgtccgcggatgttgcctcgccggaaccggcagtgccagtagaaccggtgacgccatccagcccgactccggccatgatgccgcaacgccgtacgtcggacggtccgaccacattcgcttcactggatgcccaggaactgccggtcgtacgcgaatattcggcaggcggtctgattttcgatgaccagaatcgcgtggccattatcgcccgtcattcccgctccggccatctcgaatggtgcttgccgaaggggcatatcgaaaaaggtgagaccccgcagcagaccgctgtgcgcgaagtgcatgaagagaccggcatcctgggcgaggtgatcgattccatcgccaccatcgactactggttcaccggcaccacgcagcgcgtgcataagctggtccatcacttcgcgctcaaacagaccggcggcgaactgacggtggaaggagacccggatcatgaggcggaagacgccatctgggtacgttttgaagatttggatgacgtgttgagctatcccaacgaacgcaaaatcgcgtggctctacgccaggaagaagaacaggcaggcaaacgagtgaacctacccggagtcttacgacattgcacacgtctggcacacgcactggcggctggcgtcgccgttgtggcgatgctggccgctccattgaccgtctacgcgaacgatacgacggacacgactgattcatccgatacgacggacgcaacgggcaatcagaccgagaatcagcccaagcagagcattgccatcacgcaaagcacccccatcgtcacctccaaatcgggctatcatgtcaccgcggtcatcagcaatacggacagcacggccacgtcaagcggcacactgcacctgaccaccaatacgctgttcacctttgtctcgcgcaccgatattcagaattgggccgagaacaacgcccccatccccacccccaacgagttgggttccgttgacgtgccatcgattcccgccggcggcactgccaccgtcaccatcgaggtgaacgccaatcagcagacccttgcctccatagggagctgggggccgaagccgctgatgctgtcgtatatcgtcggcaatcggatactcgccgatttgccgagttttctgacccgatcttcggatgggctcaacaccgcgacgacaccggccatgaacctgaccgtggccatgccctacaccgccagcggctggcaggtcgataacaaggccatcagcaatcgcattgccgaaaccaccacttcctcgacatcaacatcgtccaagtccaacagcacggacaaggccgacaagtccgataacgccgacgccggcaacgcggccaaagccactgatacgcaagccatatccttatccgagcaggatgccgataccgcgcgatcccttgggcagacattcgccaagcaccgctcgctgcaagtgatcgcggatcctctgtattggcgtcagtccgcagtgcaaccgtccattgccggcatcatgcagcccgccgactttgacatcaccgcctataccgcgctgggtgataccgcggcctacgaaaaggcaggcatcaccactgaacagtggaacgccaagcaggcggccgcatggtatgccgccggaaacgactccgaaacaccctccgcgtacgcatggcagggcaacaactgttggacgttggatgcgctgaccgcagcacgcgagcagggctatgacacggtgattgccgatgcctctttcgatgccgaccagactgaagccgtacacacaggcacctacgtggtggatacgcctgccggcgatgtcaccgtgctgaaggagcaatcgaccttgggcacgctggccaagggccaagccaccagcacggacgcgcaggccgagtccagcgatgccggtcggttggcccgactggtcgctcagagcgcgttctaccagatggaacagccctatacatcccgatacctgcttatgacgttctcccgcaccacggaggccggctggatcgatcaggtgatgagcgccttcgagcaggcgtcctggttgaatctgacggatctgaagaccatggccaaggccgatccgtacaatgtcagcgattcggtcaatcccgacaaggccgatgatgccaacaccgccaatacccggtcggcgttgagacagttggctgacagccggcatgacatcatgcgcatggccacctccatattgaagaacgagattgattccgacgaggtctcgtcgttggccccgcaggccctggcccggcaggacgccaatgacaccgcctcgcatagcaacgatccgacgcaatggattggctctttactggcgctgcatgacgatatggcgctgcggtccatgtctggctccccccagccgacagccacgcgaaaagccatggtcaaagccacgaaaacactggccagcgatcttctgaacggcgtacgcatcaacccatcggaatcaatatccgtgttcagcgaatccgcgaaaatgccaatcaccgtcagcaatgaccttccctacgccgtcagcgtgcaggtcaactcactgactgactccatgcagatcgtcacctcgcgaaccgctgacatcgatattccctcgcatagcgacgctcaggtgaccttcaccatccgcgtttccacttccggctcatcgacggcccatgtgtcgctgagcgaccgggaaggcaacagcttcggcaacacgcaggataccgcgatcaccagtgtgatgcgcgtca

SEQ ID NO: 237 - DNA, 15519 bp, Unknown
  R101_18m  MAG No. k141_41043
ggaccaaatggccgacgcctattcccagcaagatgctgacccggtgaaatcctcgggtattcaagccaagaaagtcagctacaagtggcgcacggtgacgcccgaggacatgaccaatttcaataaggcatggttcgaaatcgtcaaggacaatccggttatcgcactggatgcattgctggccaagtgtttcggctacttcaatgtgaccgaccagccatacgtgtcgatggactactacgtgaccagcgactacgtgcagaagaactccacatggattaagagctacaaccacaactggcgcgagcaaattactggattcacccggagctggggcaaaatcccggtgatcggctggattacacacggcaatttctatgtggtgatgacgctgctgatcggtgccgccgaagtgattcgccgccgctggctcacactgatgacccatattccactactgttgcttatgggcgtgatgattaccgcaccggccaacaactttgaacggcacatgcttccggtggcgttcgtgttcggtttcgtggtgctcacctattggcgtgaatccttggccgaacgtcggattgctcggcaggcacaatcttcagcatcgacgacaatgaccctgccgcaatagttgcgtaaaacgattgacaatgtgatgccggcagaatcgttgtccagtgccggtaccgccaacgctagactggtacatatgtcagattttctcgaactacttgccgccgacgccgccaattcgtctgatttcacagaccgttccggcatctctgcgaccgaccgtgcacgcactgtgctgttcgagtgcctgttcaatcatctggccgacgaccgcgtggcctcgctcttcaccatccttggcttcgagcatgattttacctgctacgccattgccggctaccccgctcgctccgccgcccgcagccgtgttgacattgaaaaaatcgtggccgattttggcggaacatgtctgactgccgaacatccgataaccggactcacaggtgctgacaatggtacgggccgtaccgctgttgtggccctgattcgtccggtcggtgcggccacaccggaaatcatctgtaacaccatcgccccggctttcgacgccgaccgtcctatcgccttgggaccgcaacgtaccggcgccgaaggcgccatgcgatccgttcaggccacgctgtactgtctgaaagccgctccggccttggctgccaccgcgcagtccctcccccgcccgctgcgcactgatgacgcgctgccagaacgcgcgctgattggcgacgaagatgctcgcgatgagctgatccgtgtggtgtacggtagcctaaccgctgcaggaccggatgaccctacattgctgaccgtctcgacgttcctgaaatacgggggatcactggagacctgtgccaaggaactcaatgtgcaccccaacaccatccggtaccgtctcaagcgtgcagcggaatccaccggctgggacgccaccgacccgcgtgaggcgtacgtgcttattacggccatcgctctagggcgtatggccacagcgcagtaaatcgttttttcgtgctccccgctgacatgcgctgaatcgtatcccataccaattccgcctatgacgcgacagcctcatcagacaaggcagacgaaggccactgcggctattgcagggcgttgtctcgtacagtaggactgagccgcccccagccggctgttgccgacatgcagcgtgaaatcacccaacccaacaaccaacctgcatatagcaaaaggcggctcccaccacagtgggaaccgccttgattagctactcggagctaagcccgatcaggccaaggtgctcgggtcaaccgggacgcccgggttcatcgtggaggtgatggtcgccttggtcaggtaacggcccttcacggtggacggcttcagacgcttgacttcgtcggccacggccttgaagttctcgtcgagagcggactcatcgaagctcatcttgccgatgaggaagctcaggttgccgttcttgtcgacacggaactcgatcttgccgcccttgatgtccttgacagccttggtgacatccatggtcacggtgccggtcttggggttcggcatcaggccacgcggaccgagcacacggcccagacggccgaccttgcccatcatgtccggagtagcaaccacggcgtcgaagtcgaggaagccgccctgaacctttgcgatcaggtcgtcatcaccgacgatgtcggcgccagcctcggtggcctcggtggccttcgggccacgggcgaacacgaggaccttggcggtcttaccagtgccgtgaggcaggttgacggtaccacgcacgagctggtcggccttacgcgggtcaacgctcagacggaacacagcctcgacggtctggtcgaagttgtaggagggcatgctcttgagcagagcgatggcctcgttggcggtgtagaggttgttgcgatcgacgcgctcagcggcttcgcggtacttcttggaacgctttaccatctgtccttctccttatcagtccgtaaccgtgatgcccatcgagcgagcggtgccctcgatgatcttcatgccggcctcgatatcgcgagcagacagatcttccatcttggtctcggcgatttcgcgaacctgcgccttggtgacagagccgaccttgtgggtcagcgggttctcggtacccttctcaatgccagcagccttcttcagcagagctgcagccggcggggtcttgagaacgaaggtgaaggaacgatcttcgtaaacggtgatctcgacagggatgacctgacccatcttgtcctgcgtctgggcattgtatgccttgcagaagtccatgatgttcacgccatgcgaacccagagccgggcccagcggcggggccgggttggccttgccagcctggatctggagcttgatcagcgccgagactttcttcttgggagccatattatggttcttctttctataacgcggttcgaatggtcgccgtcctcagatccgcttgcctgctatcacgctcggtcttgactcgttatttatccgtgcatgctgtaggcaatcggcctgtggtcggtctcctcccgcaacttatattgctgtgctgtgctagcgggtcttccctccagacacaagctttcctattatgcaaatccacccggacaacgcaaaaagcccgaccacgatggtcgggctctgcaaagtttggggttaatccagcttctgaacctggtggaagccaagctccaccggcgtatcacggccgaagatggacacgagcacggtgagcttttgggtggtgggctccacgtcggaaacaacggcggccatggtggcgaaaggcccatcggtgacggtgacctgatcgccaacggcgtaggagacttcgaccttgcgcttcttggcggcggcgggcttgtcgccggcggccttgagtgcctcggaagcgatcatcggagccatcatcgccacgacttccttgcgggagagcggcgccggatccttggtcgggccgacgaagccggtcacgccttcggtttcgcgaacgatacggcgggcgttctcatccggccacatacgaatcagcacatagccaggaacacgtacgcgggtgatgatcttcttacccttttcggtgtgcttctcgacttcttccatcggcacctcgacctggaagatctgatcttccatgccgaaggaggcgacgcgggactcgatgttggtcttcacgcgcttctcatagccggagtaggtgtgcagcacataccacttgccatcaagggaacgcagggacttggagaattcgtcaacggcctgctgaccggcatcggtttcctcggcctgctcggattcgttgacttcttcctcgtcctcatccagagaaacggtctcggtctgagtggaagcaacgggagcggattcagtcgcggccggagcggcggactcaacatctgcattgtcgacggatgcgtcagattctgcggaaaggtcagcaaccggttcagccggggcagctgcctcatcggcagcagcttcggaagcctcgacaacaggctcctcagccggcacggcgtcgagattctcgagattcagttcatcactcatgcgttgttattcaccttaggttgtgcggatcagccgaacacccacagcacgagcttgcccagaccgaagtccatgcccgtgacgagggccatcagcagcagcacgaagataaacacagccagagaccagaagaacagttccttggcagtaggggttacgaccttgcgaagctcgtcgatgatctgcttgataaacagaccgatacgcatgaagacattcggcttgactaccttttcgctgttgttcgtcttagccattctgtacctcgcgtcagctgcttgattattgaaaacttggcagggaaggcgggactcgaacccacaacctacggttttggagaccgttgcgctaccaattgcgccacttccctaggtgaaaatccacctcggcgtgcattccgtagagaacgcttcgccacggcgaaaccgccaagttgttatagtaacggctccggtggattatcgcaaatcgcgtgtcgcgcgcatggcatgtgcgcggcacacgactcttctcagttagcccattccttgaatcgacgcatgccttcggctaggtcttcgtcggccagtgcgtaggagaaacgcaggtaaccgggagcaccgaaggcctcaccagggacggcggccacgtgggcctcatccaacagtgcggcggcaaaatcagcggacgtatcggacacagtgccgttgggccccagcggcttgccaagcaaagcggtgatgtccgcaaaagcgtagaacgcaccggtcggagtcgggcagttaacgccctcaatatcgttcagagcagccacgatcgcgcggcgacgtgcatcgaacgccttgcgcatctcatgcacctcgtccagcgggccagccacggcggccagagccgcacgctgggagatgttggccacattggaggtcatatgcccctgcagcttggtggcggccttggccacctcaagcggcgcgaccatccagcccacgcgccagccaggcatcgcataggtcttggccacgccgttcagcaccagcagctgcccgcggcattccggcacggcggcaccaatgtaggtggtgcgcgcgtcgtcgtagttcaggtgctcgtagatctcgtcggagataacccagatgtggtgctcgacggcccaacgaccgatcgcttccacggtttccggcttccagacggctccggtcgggttgttcggggagttgacgatgattgccttcgtacgctcggtacgggccgcttccagcgcctcaagcgagggctcgaagttcacgtcggcaccggcgaatacttcgaccggcacgccacccgccaatttgacggcttcaggatagctggtccagtacggagcggggatgatgacctcatcgccatcgttgagcaagatctggaaggattcatacacggcctgcttgccaccgttggtcaccacaacctggtcggcggacacctcgtagccggaatcgcgcagcaccttagccgcaatcgcttcgcgcagctcgggcaggcccggcgtaggcgtgtacttgtaattctttgggtcaaggcaggcatctgccgcagccttgaccacgtttgcgggggtcgggaaattcggttcacctgcgccgaagccgataacgtcaagtccggcggccttcatggccttggccttggaatcgacggcgagcgtagcgctcggtgccacagtgttgatacggtcggaaagagtctgccattgcgccatagtcatggcttccatgctaaacctacagcacgaaaaatcgccagagccgcactatggtgatgggatctgtcgtgtgacagatcccatcagtcacacaagtacaagattgtcgcgatgaaccagtgggtgggcgtactgggggccgaggaaacgcttgagttgggcggtgttacgcccgagcatctgcggaatttcttcggaatcgaagccggcgaggcctcgggccaggtgttcgccgctttcggcatcgatccagaccggatcgccggcggaaaaatcgccatgcacttcgagcgcgccggccgccagcagcgaggcacgcccgccgcgaatcgcctggccggcacccgcatcgaccacaatagtgccgcgcgggtcggcggcgaagccaatccacagacggcgtgatgagccgcgggccttaaccggtgcgaacacggtgcccaccggatcgcccatcatcgcagggcccgcgttcgaggcgcaggtgagtaccgtggggatgccggagacggccgccacgcgcgcggcctcgagtttggtgaccatgccgccggtgccgaccttggagccggagccggagacttggatgtcgccaagtgcatcgataacgttcggcacatattccacacggcgggagccgggctgcgagggcggtgccgtgtatagcgcgtccacgtcggtaagcaataccaaagcttccgcgcgaactaggttcgcaaccaatgcggacagacggtcgttatcgccgaaacgaatctcgttcgaggccaacgaatcgttttcgttgataatcggcaccacgccgaggtcgagcagacggtccagcgtgcgttccacattgcggtactgggtggcacgaatcgtatcttcggcagtgatcagaatctggccgacgcgaataccgaaacggccaaaagcagtctcgtagcgagccatgagcaaaccttggccgaccgctgcggtggcctgctgagtagccacgtcggccgggcgttcgtcaaagcccagcgggccgaagccggccgcaatagcaccagaggaaaccagtactacacgcccgcccatcagtcgtatttgggcaagggcggcggccagagcgtcgagcttgtccgggtcgaggtgaccgctcggctgcgtcagcgagctggagccgactttcacgacaatggttccggctgctgcgaccatgcgccgcacctcggcctgactcggagtgctcatttattcctcggtttcaccatcttcgctggactcaccgtggccgaacagactggtttcgtcatggcgatcgtcgtcaacggtcgggtcggcccagtggccggccttgcgttcggccatcatcgcatcgcgcacggcggcacgggcgtccatcatctcgtggtatcgggcacgacgttcggcgttggagcggcggtgcgtgcgcgggtcctgctcttcgagacgcagatccttgcctcgggcaccgaggttggagccgtcgagcatttcggcaccggcggagatggtcggatcccaatcgaattcgaccatacgggcaccgcgaccgatgcgcacctcgtcaccagggtgggcacccttgcggcgcagctcatcttccacgcccagcttggccaagcggtcggccagatagcccacggcctcgtcgttgtcgaagttggtctgcatgacccagcgctccggcttgacgccacgcacctcgaagaacacttcgccattgccgagttcgcggcgctcgaccgtgaactcaagcgcactgccgccctcgtcagcgcgacgcggacggcggcccttggtctccaatggcttgataaccacgcgcgtctcctcttcggcctgctcgcggttggccacttcctcacgcatctcatgcaccagcgcagacaacgcgaagttgagctccttcagcccctcatgagaggcggtggagatctcaaagaccttcagcccgagtttctcgaactccggacgcacgaactcggccaattccttggcctcgggcacatcgatcttgttcagaatcacgatgcgcgggcgttcgggaatcgggatggcacccaatggcagttcgagcttgtcggcgtagagcgccaactcgttttccagcgcgtggtagtcggacatcgggtcgcggtccggttcaagcgtggcgcaatcaatcacgtgggcgatgatttcggtacgttcgatgtggcgcaggaactccagtcccaggcccttgccttcagaggcgccaggaatcaggcccggcacgtcggcgatggtgtatcgagagtcgccggcgatgacgacgccgagattcggcaccagcgtggtgaatgggtagtcggcgatcttcggcttggcggaactcatcgccgcaatcagggacgactttccggccgaggggaaaccgaccaacgccacgtcggcgatggacttcagttccagaatcacgtcgcgttcctcgccgagttcgccgagcagggcgaagccgggggcgcgtcgggtcttgttggccagggcgatgttgccgaggccgccggcaccgccctgggcgacgacgcagcggtcgccctcgtggcgcaagtcggcgagctgtgcgccgggatgcttggctttgccctgttcgccgcgcgcctcaaagacgacggtgccgcagggcacgggcagaatcaggtcctcgcccttggagccgtccttattgtcgcccaaacccatggtgccgctgccggcgacacgatgcggcatgaaacgatagtcgagcaggctggtggcgttacggtcggccacgaacaccacggaaccaccgtcgccgccattgccgccgttcggaccggccaacggcttgtatttctcacgacggatgccggccgaaccgttgcccccatcgccgcccttgacatggacggttactcgatccacaaaatcactcatattgattaccttacaaaaaagccgcgtccttacgggcgcggcttgaaaaagcttgacgctatatcgctcaggcgatgacgtcgacaaccttgcggtcgcgacgcacaccgaacttcacggagccatcggtgagggcgaacagcgtgtggtccttgcccatgccgacgttgtggcccgggtggaagttggtgccacgctggcgaacgatgatgttgccggccacgacggcttcgccgccgaacttcttcacgccgaggtattgcgggttagaatcgcgaccgttgcgagagctggacgcacccttcttatgtgccatgattcatggtcctttctataactcaggcaatcgccgtgatcttgacgatagtcagcttctggcgatgacccttacggcgagcaacaccagtcttgttcttgtacttctggatgtcaatcttcgggcccttggcttcatcgttcacaacctcagccttgacggacaccttggccaaatcggcggcggcgagggtgaccttgtcaccatcgacaacgagggagaccgggaattccacggtatcgcccttcttggcgtcgagacggttcacgaggatgacgtcgccaacctcgaccttttcctgatggccaccggccttcacaatcgcgtacattatcgttccttttatgttttggaaagctaccttgcctaacacgcaccgagcctgcggtcagacaccgagtttcgaatctacaccaccatgcggactaaatcaaatgatttttgcccgcgtgtcaagcacgacacacctgttactcttccgcttactctttactcttccgccgtgttgttggcggcgacggcagcggcggcaatctgagccagtttggctttgacgtcggcgctggaaccagccggttcgggagcgggagcggtgccgcgaccgtgcttgttggttttgacgaacgggtcgccaccgcgaagcgcgtagggatcgtcgtagtcggccgaaacggtcggctgatcatgcaggatgaaaccacggcccttgcaggtcgggcattcctcggagaacgcctcgaccagaccctggccgatgcgcttgcgggtcatctgcaccaaaccaagcgaggtgacttcggccacctgatgcttggtgcggtcgcgtgccaggcattcgaccaagcggcgcagcaccagatcgcggttggcgggcatgaccatatccacatagtcgatcatcaccatgccaccgatatcgcgcaggcgcagctggcgggcgatctcttcagacgcctccaggttgcaacgcgtcaccgtttcttccaaggacttgcccttgccgataaagcggccggtgttcacgtcaatggtggtcatggcttcggtgcgatcgatgacgatcgagccgccggacggcaggtagacctgacgttccatgcccttacgcagctgggagtcgatggaccacttgtcgaacacgtccttgccttcatgctcggccgggtcccacttctccagcttgtccttcaagtcgggggccatggtgtcaaggtattcctcgatacggtcgtagaccttgtcaccttccacgatgagcttgctaaagtcgtcgttgaagatgtcgcgcaccacgcggatggccacgtcgggctcgccctgcaggagcttcgggcgcttgccgtgccagaattcctcgcgcttggcgttgatgcgctcccactggcggaccagtgattcgagatccttgacgatggcgtcttcggatgcgccttcggccgcggtgcggatgatcacgcccatgtctttcggggcgatcttggagacgatgttcttcagacggctgcgttcgcgctccgaaagcttgcggctcacgccggtcatgccaccggagggcacgagcaccaggaagcggccggcaagcgtgacctgagaggtcaggcgggcacccttgtggccgatcgggtccttagtgacctgcacgagcaccgggtcgccggacttgaacgccagctcgatgcggcgcggctgaccttcgagacgagcggcatcccagttgacctcgccggcgtagagcacaccgttgcgggactggccgatatccacgaatgcggcctccatgctgggcagcacgttctgcacgcggccaagatagatgttgccgacggtctgtacttcctgaatgtcggagacgtaatgctcgaccagaacattgtcttccaccacggaaatctgggtgtggtgttccttctcgcgcaccaccatcaggcggtccacgttctcgcggcgtgcaaggaagtcctgttccataagctggctctggcggctgcgctcacggcggttgtcacggcggcgctgcttcttggcctcgagacgagtggagccttccacatcggtgatttcgtcgatgtactgctgcttgcgggagcggcggaccagcggctgttcgctgttctgactctggtcgtcggtgccctcgccgttcttgccgccacgacggcggcggcgacggcgagtgacggtctgctcctcatcgtcctcatcgcgatcacggtcatgatcatcgcgatcgtcacgacggcgggaacgcgtatcctcggcatcgttctcggcggtatcgtgctcgccgttggcaccggtttcgccgcgtgagccacgacggcggcgacggcgcgaacgggtgcgggtgacgtcggattcctcgtcgccctcctcctcggcaatcggcgagtaggcgatatcgtccagctcgaggtcttcctcaatctgctcgacttcggcggctgcacggcgctcctgggcgttcagacggcgggagcggcgcgaacggcgggagtccgaggtgtcgtcggcgtcgaaatcgtcgtgatcggcgttggtatcgccggacgcggcgtcacgggaagcgtcacggtcggcggaggcgcggccgcggtcgtcgcgatcgtcgcggcgacggctgcgcggctgggcatcgtcatcgtcgtggctgcgcgagcggcgggagcgacgagacgggcgttcgccggcgtcaacatcgtcatcacgagtgtcagcggtatcgtgcgcatccacggcggcgggcagcaccggttcctggaacagcagggacgtcatcggcttgccacggcgcacggtctcgtggccagagggcagggattcgaccgcgtcgaacaggcgctcatccggggtgtcctcgtgcgtatccgcaactgcacggcgagaacgacggcgaaccgtacggtcctcgtcatcatcatccatatccataggcgcacggcggaggcgggagcgaaccgggcgatcctcgtagtcatcatcgtcggactggcgggagcgagagcggcggcgaaccgaacggtcctcgtcgtaatcgtcatcgtccacgactgaacggcggcgggaacgcggggcgtcatcgtcatcgaaatcatcggcactgaccgtgcggcgcgaacggcgcggacgatcatcctcgctatccaagccggccactgcggaagcggcgcggcgcggacggcgcggagtctcgtcgtcatcatcggtatcgctggaagatgcggcggacgtacgacgggtgcgacgcggcgtttcggcggcatcgtcggccgtggaaacgcggtgcgtacggcggcgggttggacgttcggcggaatccttggaatcgctggattcatcggaatcgccggaatcggatgacttggaatcggccgcggtgccggcattgggaagcgcgggggcttcgaacagcggggtgcgttcctgcacttgcagttccagggaggcgccggcagcaccggtgccgcggaccacgcggcggccgccacgacgacggcgaacaggttcgacgggctgggaggcggcggcaggcgcagcgttcacggctgcagccgaatcggcattggatacggttgaattatcggttccgtcgttgacgaaaccttcacggttgtcagtgggcacaatgctcctcgcggcgcgctgcatcacgacgcctatttccaggcctatacgcttgactcacaccacgctctcaccgtggccgcgcgaaaacgcgccgcgtaaaggcaacttcgtctcaagtctgtcctgcgggtggcggacaccggcgcttgcgttgtctcattctcgagagccgcaaggggatcgacgccatctcgcacgctgatggttatgcagaaccaccatcctttagtatgccacatattttgtgcgggcgtggcccggcgaggctgacgttctctcggctcccctccctgcggtgacagctcccctcagagaggggagctggagaggtgtcagaccagccagtcggtaagaattgcggtcatggcggccaggtcggattcgggcacctgctcgtcgtgcttgtgcgccagcagcgggtcgccggcaccgaggttgacggccgggatgccgagctgggagaagcgtgccacgtcggtccagccgagcttggccaacgggtcgcggccggtgcgctccttgaccagtcggaccagatcttgggcgagcggggcgttcaggcccgggcgcgcggaggggctttcgtccttcatttcgatgccgtagccctcgaacacgccgccagtggccacatgctcgccattgccgagttcggcaccggcatccgcgcccatcatcagagccttggcctcggccagcgacttgtccggggcgaagcggtagttgacgtgtacgcggcattcatccggaatgacgttcgtgcctttgccgccggaaatcagcgtggcgttgaggccctcgcgatagtcgagcccgtccacgttcacggtggccggctcgtaagcgttgagtcggctcaggatgtcggccgccttgtggatggcgttctcccccatccacgcgcgggcggagtgcgctgccacgccgtgggtcacgacgtcgaagcgaatcgtaccgttgcaaccgccctcgatgccgctgttggtgggctcgccgatgatggcgaaatcgccggtgatccaatcgggatgggcctcgacgactttgcgaaggccgttcttttcggcgacgacttcctcatggtcgtagaagacgtaggtgaggtcgactttcggggtggtttccggcgtgcggccgtcgagcgtggcggcgaggtagagcatcaccgcgtcggaggccttcatatcggtggcaccgcggccccacagcacgcggtcttcgggatgagcgtgggcgatttcttcgcgaatcagcgaatcgccgggctccagccacttcggtgggaaattgtcgatgaccggcacagtatcgaggtgcccggccaagatcacacggttcggctcgccgaagtcggtgctggccaccactgtgtcgccgtgacggcggacggtcaggtgctcttgctcgttaaggaaggcctcgacctcgtcggtgaggtggccctcgtggtcggacacggagaagttctccatgatctgggtgagcaggctgttcagctgctcggcagtggatgcggtgcggttcaattcaagcgtcatgtgaacagcgtaccgcgtgggcggcgggcccagcacacccactacatgagattttgcggccgaatacatttttatgtgccacactggggtggcgaaagggaggattatgtcaggtctaatcagcgccatgcaaggcttctgcgttatcggcatcgtgattgcggtgggatatgtcgccgcacgaatgcgaatcggcgggccgtccgctcagatggtgctcaaccgtttctccttcttcgtatcgagcccgtgcctgatgttcgccatcctctccaaggaaccgatcttcgacatcttccatccctcgattatcgtggcgttcttctccgccgtgctggtaggcgtggtgttcctggtgctcaaccgcatgttcttccacctgaacgccccggacgccaccatcggcgccctgaattcgctgtacctcaattccaataacatcggcctgccaatcgccacctacattctgggcaatccggctctggtggcaccgattctggtcatgcagcaggccatcttcacaccggtgggcctgacagtgctggacgtgaccaccaagggcaaggtctccatcaaggaaatcgccaagcagccactgcatcaaccgctgcttatcggttcgctgctgggcattgtggtctctgcgatttccgctaaaagcggctggttcccagtgccgaaattcattttcgacccgatcgacatgatcggcgattcagcggtgccaatgatcctgatggcgttcggcatgtccctacacggcaccaagccgctgcagcagaagggcgatcgcccggccatcttcacggtcgcggtcctcaagaacatcatcatgccaatcatcgcgttcctgctcgcctatttcgtgatgggcttccgcggctccgagctgtacgcctgcgtggtactcgccgctctgcccaccggccagaacgtgtacaactacgcggcccgctacaacgtgggcctcaccttcgcgcgcgacggcattctgatgagcaccatgaccagcccggtgtttatcgcgatcatcgcggcgctgctgagctgagccggcaactgtaatcaccgtaaaaaaaacttccgcgaaatccaccgtaggattccgcggaagcctgagatatacactacttgagaatcgccttaatcgcctcatactgctgagcagtgagttgcaccgctggctcacggatcagggtggaaatgttcagtcccttggccttgaccgcacccttgatggcggagatgaacaggtcggtctgatcgta

SEQ ID NO: 238 - DNA, 5519 bp, Unknown
  R101_18m  MAG No. k141_42301
cgcccgtaccggaccgctgcccggcactcatcatcgacttggccatgttcgccttctgcgtcacgcccagtgaaaccacgtaggtgcgcgcgtcggccgccttggtggcgtcgtccgagggcgagaacgtcatgccgttgagcacgttcgtgttcgggttggccttctgatcggtgacgatggcgctggaggccgcacggtcgatcagatcattggtcagagcgcgcgtgtatcccacgccagcggccaacggtgtggccgaagcatccttcttcgccttgacgacgcccaccaccttgagtttggtggccgtttcgaggcgctgttcgattacatccttgtcgttgccgatgaatcggtagtggccgtcatcgcccttgacgtactggtcggatgccggaatcatgtacagcgtctggtcgagcgccttagcatagtcgatcttgtcttgtggagtgctgaccttgtcgccggcgttgagcttggacatcatctcgtggtagtcggaggcgggcagcaggccgagctcgtacagcgtggtcagcggcacgctgttgttgtcgtcgagcaccagcaccacctcgtccttggacttcggccatgaaccgttgaccacttggtagttgtcggtgatgaccttgcctacgagcttgctgtcgtccgctccaggcatgatctcattgaacgagtcgggcgcggcgttctcatcggttttgccggtcagcatcgacatctgctgcgaggtgatcgacgaggtgccggacatgccggacgagcttgtggacgccatctgcgaggccattgaagtggagtcgctggcaccgatcgtcacgccgtccgcattgaccagcgtgccatcggggtcgtggtcgaacacggagaatttcacgtcatacgtgtactggataccggcggaacccacatactggtgaatctcgctcttggaattatccaggtatttcttgaagcgggtcaggttgttttcggtaatcgaactggtcaggctggatgcctgcttgacgctgcggtcgtccgggtagatgccgtcggttctgtgcgtcttgccgccgtatccgtcatcgccgcccatctggccgcccatcatgctgctcaggtcgaaggtctgggagtcgatggtgatcgggtaggcggtcatcgtgtcacgctggatgtcgctgatgtatgcgttcacgccagtcgacaccgatagaatcagcgcaatgccgatgatgccgattgagccggcgaacgaggtcagcagggtacgcgccttcttggttttcagattgttgaagctcaacgccagcgacgtgacgaacgacatcgacgcgcggcccatcgtcttgtgcacggccggctgttcggccgtctcatccacgacaaacgggtcggagtcggagcggatcacgccgtcgcgcaggttgacgatgcgcgtggcatattgttccgcaagttcggggttgtgggtgaccatgaccacgaggcggtccttggccacgtccttgagcaggttcatgatctgcacggacgtgtccgaatcgagtgcgccggtcggctcgtcggccaggacgatgtccgggtcgttgaccagtgcgcgggcgatcgccacgcgctgcatctggccgccggacagctggttcggctttttattgatgtgttcgccgagtccgaccttctccagcgccttgcgcgcacgttcgcgacggtcggccttgccgatgccggaaatcgtcagcgcgagttcgacgttcgacagaatcgtctgatgaggaatcagattgtagctctggaacacgaagccgatggtgtggttgcggtacgaatcccaatcgcgatccttgtattggcgcgtcgagatgccgttgatcaccaaatcgccgtcgtcataccggtcgaggccgccgatgatgttgagcaaggtggtcttgccggaacccgagggacccagaatcgcgacgaattcgctgtcgcgtaggttcaggctgactttgtcaagcgcctgttgaacgaaatcaccggttttatagcgcttcgagatcgatttgatctgcagcatgaatgcctcttcctggctgacggttcgctgttatgtactgtattgtcacgccttgaatttccggccgactttggtgctccccccccccgccgcgattccgctatgggcggacgcgtcgcaaaatggtgtgtctcaccgcgctctggggtgtgaggtcagatacgtttcgatcagggtttcggggcttacgtgtgtgtagatctgcgtggtggtcacgctggcgtgcccaagcagttcctgcacggtgcgcacgtccgcgccgccttggatcaggtgcgtggcgaaggaatggcgcaaggtgtgcggatggagtggtttggtgatgccggcccgctccccggttgctttgacgatttcccataccgattgccgcgagatgcgcttgccgcgtttgttgagaaacagtgcgcgtctctcgggaatcttggcgctggagcgccgttccagctcgccacgccccgcattgaggtatgcggtgatggcccggcatgcgtagctgcccaatggcacaagccgctgcttggagcccttgcccatgagtcgcgcgatgtgctcgtccaggtcgatgtcgtccagattcacaccggtggcttccgagacgcggcagccggtggcgtacatgaattcgagcagggccttgtcccgcaataccaccggatcggttgagccgccggctgccgccgcgtcgagcagacgggttacctcgtccacggtgagtacgtcaggcagggtgctggcacctttgggtgccttgactgcggcagaaacgtcggcagtcaccgcgtgctggccgagcgcgaagcgatggaattcgtggatcgaggccagtcttcgggctttggagcgggcggactcccccgcctggtcaagggcggcgatgtagtcttcgacgtcttgtttggttatggcgtccggttcgtggatgccgcgggtttcgagccaatcaatgtatttggcgatgtcggattcgtaggcggtgacggtggccgtggcgagtcctcgctccacgccgatgtggacgaggaactgctctgtgagtttggtgaatccgttggtcatgtgtttgttctcttccccacccgctgcgcgggagcccccctcgtcagagggggctaataataggaaaccccgctcggaagcggggtttctagtgtgaagtcacgacttcaagcaatcaggcctcaaccggagcgttgacgtcctcaggcagggcggccttggcggcggccacgatggtcttgaaggtgtccgggtcggagacggcgatctcagccagagcgcgacgatccagctcgatgccggcgagacgcaggccctggatgaagcggttgtaggtgatgccctcagcgcggacggcagcgttgatgcgctggatccacagcttacggaaatcgcccttgcgagccttgcggtcgcggaagttgtagttaaaggagtgcagcagctgttccttggccttgcggtacaggcgggagcgctggccacggtagccggaagccctctcgagaacaacgcgacgcttcttgtgggcgttcactgcgcgcttgacacgtgccataatctattcctcagctttctaaagtcttattatttccgggtaagccctatgctcacttctgcagaagctggtgcagcttcttggcctggccgccgcgcagcacatcgtcggcggacagttcacgacgcttgcgagcggacttgtgctcgaggttgtgacgcatggcggaaccgacatgcttcaccttgccggtgccggtgatcttggcgcgcttggaagcggcggaattagttttcatcttcggcattgctgccctccttgctggtttgcttcttgtcggaagtcttctgagaaatcgcggactgcgcgtcggccgcggcctgagcctgagactcctgcttggccgcgagacgagccgcctggcgagcctgacgctcggcgcgggactcggcgccacgacgacgctgctcggactgggtgtggaccttcttgcccttcggcgcaagggtcatgatgatgttgcggccctcctgcttcggcttggactcgacggtgccgtattcctcgacatcgtcggccagacgctgcagcagttccacgccaccaatcgggcgggagatctcacgaccgcgcaacatgatggtgaccttgaccttgtcgcctccgttaaggaagcgggtcacatggcccttcttcacgtcgaaatcgtggtcgtcgatcttcaggcggaaacgaatctccttgatttccgcggtgctctggttgcggcgagcctcacgagccttgatcttctcgttgtacttgaacttgccgtaatcaatgagcttggcgaccggaggcttcgcgttcggggccacctcgacgagatcgaggtttgcctccttggccaggttcagcgcgacggaagtcgcgatgacgcccacctgctcgcccttcgggccgatcaggcgtacctgcgggacgcgaatctcgtcgttaatacgtggttcgtcgctgatgatgactccaatcctctacttcaattccgtggcggggcctttgctggagtcctgttcaatgctttgggttcatggcaagccaaaaccagcgccaatatgcgctcagcttctgcagacgcatatcagttctttgcgtcattcctgattgcgcgttgtatatcgcaatcgctaggctgtttgccttgaacccgaggccttgaaaggcttccaggtggggttgccccgctttcttgatttctcaagccaaataggaatcttaccacatgcccggacattcgcggaccgtgtgtcgatgggtggataccggctacagtaggcataatgactcaggtatgcgtgatttttggtgcgggcgaatactatgcgggcacgcccgtggttcccaccggtgcgtatgtgattgcggccgatggcggactcgaccatacgcgcgagttgggcatcgtgcccgatgtggtggtgggcgacttcgattcgctggagggccggccgccccgcaccgatgtgcgcaccatcgcgctgcccgcgttgaaggacgacccggacatgctttccgcgctgaaggtcggctggtcggcgggttgccgcgagtttcacgtgtacggcgggcttggcggccgtattgaccatacgatttccggcattcaactgatggcgctgctggcccgacacggggcaagcgggtatctgtatggcgacgggctcatcgtcacggccatcaccgatggcaggctttcgttccccgcgcatccggtgcccgaggacggccgtatggtgtcggcgttctcccactccgatgtttcgcttggcgtgaacgaaccggggctgaaatacgagcttaaagacggcacgctgaccaatacggtggtgcagggggtcagcaacgagttccgcgacggcgtggacgcggccatcagcgtgaaacgcggcacactgatcgtcaccttccccatcgaagtggcgttgc

SEQ ID NO: 239 - DNA, 10157 bp, Unknown
  R101_18m  MAG No. k141_43298
aacgacccgcgctacgccggcgatccggttccggaagccgagtgcctggccaacgttgttgagcgtgtgaagccgtacttcgagtccgccatcgagccggagctcaaggccggcaaaaccgtgctgattgccgctcacggcaactccctccgcgccatcgtcaagatgctggacaacctgtctgaggaagagatcgccaaggtcaacatcccgaccgccatcccgctgctttatgagctggacgagaacttcaagccgatcaagccgcgtggcgagtacctggacccggaggctgctgctgccggtgccgccgctgtcgccgctcaaggccagaagtgagcctaagccgctaacacggtacaagctgtaaggggagtcgcacataatgtgtggctcccctttgctatgcctgccaaatccccatggggcggtgattaccccatggggcggtaaaactctcatggggcggtatgccagaatggcttaattccgcggtttcacatatctttcaaaccgccccatgggcaagttaccgccctatgggtgttttgccgccccatggatacgccggtgtaccgcccagaagcaacaaaaaaacggcgtccagccgtagccggatcgccgctttcgggcatcctcctcaaaccataggaggacaagtgttcagttattcgcccaatgtgaggacaagccccaatcagtcgatgtcggtgccctcgtcgcgggtcggctccttggtggggtcgaagccggagacgatgtacaccacacggcgggcggcggacacggcatgatcgccgagacgctccaagaagcggcccagcagcacgatatccacggtctgctgacgggtgatgtcatcggacagcgccagatcgaaggtctggtggtgcaggttgtccagcttgtcgtcggccaggatgatggcctcggcggtcttggcatcgcgatcggagagcatggccaccagctggtcagcggtgttgtccaggaagtcgatcatctcggcgaacaccggctgagcggattcgggaatcgcggcggccgggtaggtgcggcgagcggcctcggccacgtggcgggcaagatcgcccatacgctcgaacgtggaagccagacgcatggtggaaacgaccacacgcagatcggtggccaccgggttctgcttggcgagcagcttgacgcactggtcgatcacagaggactccagggcatcaatctcgatgtcgccgtcaatcacagtctgtgcggcttcaacgtcctgattcagcagggcttccccagctcctttgatcgccttgcgtacgttctgcgccatacggtcgaggtcgtcagcaacctgcttcagctcctcgttgaaaataacgcgcatttctctagcctttcatgcttgcttattgcaacctgtaccagtgtattattccagtacttgttccccacttcaacgtaggtaatggcaacctcaagttgttctactgttcattgggttgttcacctgaaattcatgttaccggcgcgccggcaaaccgcaatcccggcgtgtggtgtgaaagaatgggggcatgacacagatgccgctcgtcgccgcgattgctcttattgtcgcggctgttttatttgtggtgggaatcatcacgctcatcgtgggatttgcgacacatcgagtgtctgtggaatcgccgctggccgatgatgacgacaatgacgatctgtccgacgacaccgccacgctgctgtccatgctgccgggtgcgtccgtggtggtcgacgagcacgacgaggtggtccgctgcaatcccgccgcctaccgcctgggtgtggtgtcagatgacgccatcgcccagcagcaggtgctggatgccattcacgaggcgcgcaagtccggtggcaagcgccagttcgacttgaccaccgatactccggagcggtacgtcgcagaccagaacaagggcgatcacgtcgccacgcagtccgtccaccgccccaactggctgaaggtgactgtagggcgtatcaacgagcagttcgtcatcgtgttgattaccgatgtcagtgacgtgattcgtttcgctcaagtgcgtgactcgtttattaccaatgtatccgagcaattgttgggccccactgaagctctggccaaactcgccgattcgctggagtccggcaatctggacgaacagcaggtggctgccgatgctcgccaggtgcgttccagctgcagcaagctcaaccatatggtgtccgatttgctgctgctcatacgcgcacaggagccgattacgccgtcttccgccaaccgactgaacgttatggaacagctcgaggccacggtggcgcgactggagccgcaggcggccgcggctggcgtgcagctgaacatcaagggcgacgatgatctagtcatcaatggtgaggcggatcagatcgacagcgccgtgaccaagctcatcgaaaacgccatcggctattccaaggaaaatggtgtggtcagtgtgtcggcatccaaagacaaggatggcgaccgtgcggtgattcgcgtgatcgaccagggcgcgggcatcgcgaagaaggaccaggcgcgcatcttcgagcggttctaccggggtgcggaacagagcaatcgcacggcggatggcgtgggccttggcttggccatcgtcaagcatgtggcgctaacccatcatggcgatgtgaccgtatggagcgcgcccgggcaaggcagtacgttcagcctgacgttgccgttggcgcagtgaactttattactgtccgaggcggcggtagtcccagcggtcgaagtattcccaaatcagcagtagcaagccaataatgacaccggccacgcacataatcaccaacggcattacgctgtagcccacggccagcagaatcagcacgacaatcaacgccacaatccatagaccggtaccgatggcaaacaccttacgcaggtccacccgtacgggcttgggcgcgggtttgcggacggcagggtcaatgagaggcgcgaacttcatactcatgcactgtagtaagagtagggaggggcgtcaaacacctctccctacgatttattcaatcggtatcagttgagaccgatcaatgtgcatggcatatatggtcggccatgcgaggcatagaccgccatcacaggtgctcgaccacatagtcgacgcacttggtgaaggccatgacatcagccggttccaccgaggggaacacgccaacgcgcagctggttgcggcccagcttgcggtagccggcggcgtccacgatgccgttctctcgcaggatggacagtatctgggaggcctggacgcgctcgtccagatcaatggtgaccacggcgttcgagcgggcgtccgcatcgacgacgaacggagcggcgtattcggagcgctcggcccacgagtacaggatggatgcggacttggcgcaacgcgtggtggcccaggcgaggccgccgttgctgttgagccagcgaatctggttttccatcatgatcagggtggccacggcgggcgtattcagggtctgatccttgcgggagttgttcagtgccgtggtcagcgagaggaacggcggcacccagcgatgtgcgccttccagatgagcgcttgattcgacgcatgccgcacgatcgatggcttcgggggagaggatggcgacccacagaccgccatcggcaccgaaggccttctgcggtgagaagtagtagatgtcggtctggctgatgtccacgggcaaagcgccggctgcgctggtgccgtcgatgacggtcagggcaccggcttcacgactgccgggcacgcggcgaatcggggcggccacgccagtggaggtctcgttgtgagcccagcaatatgtgtccacgcccttggtgagctcaggcagacggtaagtgcccggctcgccggggaacagcaccgggtcttcaaggaagggtgcgttcgcggcggacgcggcgaacttggcactgaatgagccatacgtgccgaatgcggcgcgacgggtgatcagcgaagcgcaggcaatctcccagaacgcgctggcgccaccgttgccaagcgccacctcatacccttcaggcaggtggaagaactcgcgcagaccttcacgaatcgaagcgaccagttgcttgactggtgcctggcgatgtgatgtgccaagcagggtggtggcgccggcatcgagcgcggcgatctgttcggggcggattttgctgggaccggagccgaagcgaccatcttcgggcttcagcgactcgggaatactcagtgtgatagtcatggtttcaagggtagaccagtgttggggaatatcgcggataatgctcggtgtgcgggattgctgcggggctactgcggaattccggggtgccgggcggtagtagcggcaatgcggaatgcagtgcagaatgtacgcagcacatcatggctacggtgtgtcggaatgacatgagttagtgattcttccgataaccggatagtgaggttcgtgaacgggcggaaacaaggcagtttttcaccctgccgcacggttacgtaaatcgtttgacatgcccggatggtgggggatcgcattgaggattgacctctgttcgttgtacagtactcaattgtgccggtcatacggggtcgttgaaaggaccccgccgaacccatccaaggagttaacgtagtatgaagcatgcttcgcataaagcgaccacggtctcgcgccagaagttcagcttagcgaaggcattgtttgcctccggcaagggttctcattccgttcgtgccgtgcgcgcggtgcaatccgctggcagcgacgccgttgttttggggcttgatccggccattgccgagaagatcaatgaaatcgctccccagactcgtcgttccattcgtgaggccgctcgtgccgctgaacgccgtagccatattcttgcctcggcctcactggccgctctggtcggcacggccgcaggtgctctcgcgttttccaacaataaagacgccacgaactcgttcgtggctgatccggccacgacgaccacgcagattaagcgcatcagcgatgtgactgcggcttctcgttccgaagcacgtactgatctgagttcgtcctccgttaccgcacagtccaccaatgaaggcggttgggggctgagcaattcagacagcaccttggacgccaagctgatgaatcgcaataatgcgaacaatcctgtggtgtcggctctcatggatgccgatggcgatgctgtgccggctggcttcaacccgaaccatgccgttggcaccaactccaacaactatccgtggggtcagtgcacgtggtacgcgtaccagcgtcgtgccgaactgggcctgccttccagcggcaacttcggcaatggtggcgcgtgggcggcgtcagcttccgctctgggctattgggtggacaacactcctcgccatgtcggtgatgctgtggtgttcgctcctggccaggccaatgccgatggcacatacggccatgttgccgttctggaaaagatcaatgccgacggctccattgagatctccgaatccaatgccaagggattgggtgtgatttcgacccgtacgttcagcgccgccgaagccggtaagttccagtacgtccactactgattcatttcattggcttacattcggtgattactgttcggatgtgacgtcgccctatcggcaatcgttcgcgcgaaatgacatttcaagtgttgcgaccgcgtattagtccgaactgacctgtgccgacacgccgatatatcccaatagctccggggtgttttatttcttccatcctgtacgagttaatgcgcaccgtgtaaggtgatggttctatgaagaccaaaactgtagcttcttccattgttgccgcgattgtctcctgtgcttgctcgtttatgtttgttcctacagcgactgcagctgagggtgttactgtgacttccaccaagtccttcccctcgtacacccaggtgcgcaaagatctgacgactgaagccactgccacgagcgttgaggacaatgctgattggggcggcattgagaacctcgatgtgccgcagacggaatctcaggcggaaaaggatgccgcagcggccaagaaggctgccgaagaggaggccaagaagcagacggaggccgaggctcaggcgacccagaagcaggccaacgccgcgagccgtaatgagtctcgctcttctgttacttattccgatgccagtggttcggtttccgctggtgccggtgcctctatcgaccgtgcgtattctttgatcggacagagcatggactgcaccgcattggtcagtcaagcgttggcggcccgtggtattaacttccacggttggcctgaagagtacgtcaatgttcccggtggccacgtagttacagacgggtccctgcagccgggcgatattctgatttatgccaacaccggtggatggaatggcggcgcgcactacgatcatgtggcgctgtatgtcggcaacggtcaggcggtccatggtggctggaacggctacagcgtggctctcgctagcgccatgaccgaaaaactcaccatcgtggtacgtatcccgtgatgcagtcttattgattgatatattgcaggcctcggatgccaatcggtatccgaggcccgttgcgttctcctgccgagtgatacacccgcgacatcatcttcgaaaagacattcctgttatgaaatcgacccatgtgtgctaaggtaaggcgctgatgacgaacgttaagaatattatttccacatcagtggcggttatcgccacgggtgccatgtttgcatgcgtagccccgtttgcctctgccgattccgcgcagacgagtgctgtggtgtcctcacgttctttcccgaaggcgagttcggtgaagaagaatctgttcgccgaatccacctccacttcggttgacgagaactctaaatggggtggcatcgagactcttgatgtgccacagaccgagtctcaggccgagaaggaggctgctgctgcggcggcggctcagaaagccgctgatgaagctgcggcagcccagtccgctgctgctgctgcagccagccgctctgaacagcgtgcgtcgattccacaggttgacttgggtaaaatgactggcactggcgctgagcttgccagcttctcactgaagttccaaggctatccgtatgttgccggcggcaacactccggcaggatgggattgctccggttttgtacagtacgtcttctcccagtttggcatttccctgccgcgaacctctggtgctcaagccactgtgggtactccggtcgcaagcttggcggatgccaagccgggtgacattcttgcgaatggtactcatgcggccatttacatcggtaacggacaggtgatgaatgctatgaacccggtgcagggaacggcaataagcaacgtttccgtgttcggtggagctggatattccattcgccgcgtgatgtaacaagaattatgcggtaagcgaattcgtattaaggcacgtcctttgggatgtgccttttttcgtatacgcggatttctttttgagcggaggataccggccaaaccgagtgtcgcggggtattgttggaggtacgcggtattcgtgccacaataacttcaaggaggtcgtcatgattaacgacaaggccattctcgtcggcgttgacgggtcgcatgccagttacaaggcaacatggtgggccgcgaattatgcaaagcacgcggggctgacgctgcagattgtctgcgcatattccctgccgagctatgccgccgtttcgttcgatgcaacttacacggcgatgggggacgataacgccgcgcattccgatgctcaggagattctggccaaggccaaggccatcgcagacgagcagggcgtcgaagccgccacactgattgttaccggagacccggcatcggtgttcgtcgaattgtcgcgtaactacaatctgatcgtcattggtaaccgtggcaagggcggtctggccgagcgtctgctgggcaccacgtcctcgtcgctgccggcatacgcctactgcccgattgtagtggtgccgtacaccgatgatgacggcaacctgatgcacctgaacaacacgattaccaaggtggccgtaggctccgacgaatccaagtggggtctgaaggcgctggacattgccgccgacttcgccacgtgctggggtgcggaactggacgtgatttccgctgtgccgaacctgaagggcgtggatggcgaggatgccatcatggagtcctacaaggacgatcttgaggtgcgtatcaagccgttgcaggaatcgcatcctgatctgaaaatcaacaagcagatcgtttccggcccggccgtcagcgcactgaccaaggccagctacgatcacgatgttgttgttgtcggctcccgtggtcgcggcggcttcaccggtctgctgctgggctccaccagccagggactgctgcagcatgcggccggcccggtgtacgtggtgccacgcaagtatgttgaggctgcggaatcgcgtctcgacaccgtgccgagctcgcccgccgaagtgcctgccaagtcgctggaggagattgccggcgtcgaggagattccggtgtccgcagccgagcctgaagtcgcccagcagatcgaaaagaccatcgatcccgacaggcagtaaagtccgggtatacaatgagctccctcatcagagggagctcaatttattagtacgtcggtttattagtacgtcagtgcttgacggtgacgttcatgcgcaccggggtctcctgtacgtaggtgtgcttgaccgtgcagcccttgtcgatatggcgggtgacgcgttccttgagcttgttggcatcctcctcggacaggctggcgtcagaagcatcaatcaccacctgctcctcgaaaccggtgtaggcgtcgttctcggggtcgtacgtgccatccaccacgatcttggcacccttgccctcacccagcgtatgttcgatggcgaactggctggacagcgcggcgcaaccggccagcgcgaccttcatcagatcgcccggcgtgaactggccacgatccttgccgaacttaatgtgcgcgccatcgtcgctgaacgcatcccacgaaccgtccttgttgcgttcaacccacagtcgcttacccatagctgctcctttattttcagccgccggcgatctggcccatcgccatgccagcgggggagcgcggcacctggccgctctcccgcatcatcggacttctctattatgcccctaagctacactggtgcacatggctttgaccgaagaacaactcgcagatattcgctcccgtatccccgcacgtcccgaaacggacattccgatgccctatgaggacctggtgcgcaagatcctgaccgaaggcacgctgaagtccgatcgcaccggcaccggcacgatttccctgttcggccagcagatgcgctttgacctgtcgaagtacttcccgttgctgaccaccaagaccgtgttcttcaagggcctggcctacgagctgctgtggtttttgaagggttcctccaatatcaactggctgctggagcacaacgtgcatatttgggatgagtgggcggacgagaacggcgacctaggcccggtctatggcgcgcagtggcgttcctggcccgcaccgacccccgaggacccgaatcgcaccatcgaccagatctccaatgtgctcgacctcatcaagcatcatccggattcgcgccgcatgatcgtctccgcgtggaatccggccgaggtggagaagatggcgttgccgccctgccacgcgctcttccagttctacgtggccgacggcaagctaagctgccagctgtaccagcgttcctgcgacatgttcctcggcgtgccgttcaatatcgcctcctactcgctgctcaccatgatgatggcgcagcagaccgggctcaagccgggcgaattcgtctggaccggcggcgactgccacgtctacgacaaccacgtcgaccagttccttgagcagctgggccgcaagccctacccgtacccgaccatcgagatccgtaaggccgattccctgttcgactaccagtatgaggacttcaaggtcgtcggctaccagcatcaccccact

SEQ ID NO: 240 - DNA, 41533 bp, Unknown
  R101_18m  MAG No. k141_43702
cggttttggcgaggcgttccggagtcagggccttgaccttaccggattcgatgatgcgacggccgaagaagtggccgatccagtagttgcactggtcgccgatgatcggagcgcaccagaccacgggcagcagcgcgaacagcggcagcgcggaaacgccggtctgggcgtcgggtgcggcgaagaagccggcggcgaacagtagggagtcgcccggcaggaacgggaagaacacgacgccggtttcgacgaacacgatcaggaagatgaaaccaagcgtaggggcgacgcccatggagatccagccggcgattgcggtgcgtggatccttgagcagattaatgaagaagttgataattcccatggaatgctctctgtgagtaccttacatttaaacgttcaaaattacgtggttcaggctgcctgtggcagttggcctgaacttccgcacgcctgcggaaccaatgtcagcctaccagtggccctctaatgtagcgcttagtaacgcccgacgggtggcaaatctgcacaaaccgtcaatgtttacggtggctatggctctgctcaatcagcatgattccggtggtctgcaggcgcatcggaaactcgttggcggtcgtccgacttctgccagcgaacccgaccggagggcatccgtttggtcggcagatgtcacgccagcaaacaccgggtgggaaccgtccgtgtatgtcggcgactgtggcctgattcatgagtctcgtccgctgaaggggtctttttcccgttcgtcaggttcgaatctgcctgctgatgcgggtggttgcgtccgtaggttgcgagtatcttgcgactactcgatggctacggcctctaaatcgacgttttggggccgtcgcggtcgaggagaggcctgctgctcgcagatggtggtcttgtagtcgcaagaaggtgccgccttcagcgtgtcgaaacgtttgatatattttctgtgggggggtatgactattgaaacgttccgacgaaacgattcgattagtgagatcgaggggtttcgccagtgacgactagcgtcgatgcaacgcattgcagcgttgaaggacgcaaaagatgatgtcgagaacgcagggaagccgaaggaggcgatgacgatggcaggcatcaaggatgtggcctgtgaagcgggggtgtccgtcagcaccgtctcgtatgtgctttccggcaaacgttcgatttccgccaagacgtccgacaaggtcatggcggcggtggagaagctcggatacaccccggacgccagcgctcgcaagatgcgtggcatacgttcataggtcatcacattaagtgtgccgattcgtggcgacattaatcaggccaaatacaacgcctacttcctccataccgcgtgggcggcgaggaatgccggttatgatgtgttgctgctgaccggactggacgcggtgaacgacatccgtcgtgtgacgcaaagcaatttggttgatggcgtggtgctgctcgatgtcgagcaggatgacgagcgcgcgacctcatccggcgatttctccaaaccctgcatagccatcagctacccgcaggcgcatgagggttatgcctgcgtcgacatcgatttcgccgaggccgggcgcaaggcggtggattttctattcgacaaaggccactgtaaggttgcgttcctgcgcaacaacgaggccgattatgagcgtcgttccggttatgtcgtgatttttcgcgaaagcatgctgtcacgtgcgaaggaacgcggcatgacggttgttgaatcctcgcgatatgaggatgaccgtttcgacgcgattcgctttgtgcgagagacctttgttgatgaggatcgtccgacggcgataatcaatcaggctaacgccaatgtgctcaactgggtattgcaggaactgtcggtcgcagggctatcggtgccggaggatgtttcggtgctgtcatgcggcacgtattttgacggcgaactgatgatgtcgcgtccgattaccgagatgccggtcatgccagagaagttatgcttgcaggccagggggcttttggtctcggcgattgagcaaggcgtcaagatcaagggtgatgtcgagcttgaggctcccgcagtgaagtttcgcggttccgttgccgagataaatcccggcgaaaggactttgaaggtggcttcgcggtaaaacggcgaagttttcggtgtgattcacatggcataacttcataagtgtaatcgaaacgtttcaacaatcacggtttttggagcgttgcaaggaaggcgttctagaaggaaaacaaggagaaaagaaatgaatatggaaagaggactggccacgatggccatcgcagcactggcgctgacctctctcgctgcatgcggcagcgacaccgcgcaagacgaggaaacgccagatagcctgtcgttctggtactacgaggaagacgacgccggtcagacccaggcatggcgtcgcgccgcggaagcctttgaaaaggaaaccggagttgaaatcaagttcgaacgcaaatccttcacgcagatcgcccagaacggtagccagttcctgaactccgacgaagcgccggatcttatggaatccagtcgtggcagctgtggatgtggcccgcacgttcgccaagctcaaactttcgctcatgccgtatctgttccagaccggcctgcagccgcatctgaacggcactccggtcatgcgttcgatgttcgtggaattcccggatgatccgacctgccgtacgctggaccgccagtacatgttcggtccgaacctgttggtggctccggtgttcacctactccggtgatgtggagtattacctgcctgctggcgtgtggaccaactggttcaccggcgagaaggtggcttccgagcatggtgtgtggcgcaatgagcggcatggcttcgataccattccgttgtgggtgcgtgagggcagtgtgctggttaccaagccggggccgagaagccggattgcgagtatggcaaggacgcgctggcgtcagtgttcctcgatcagggtgacgccgctgaagcggtggttacggagacagacggatcgtcggtggtgttcagcgctcgtaagactgcagacggtgttgaagtgtccagctcggacggacgagcgttcaccgcacgtctgggattcggggaggtcgtggccgcttcggaaggcaaggtgatgctgtcgtaggactgcccggttcggaaccgtcgtttccgaaccggatgggcgaggatcgaaacgccactggggtgtactcgtagcttgcggagtttaatccgggtgtttggggccctgatctgcgagtaccgcagggttcttcgcaaatcaggacctctaacatgcgtgtttgaggtcctggtcgttgagcagcggtgcggttctcgctgatgagggccttacacaatcgtgaagagggcaggcggtcgcgttccgcgtgctcgggggatgcgttagatacgggttattggatggaggcgctgggcaacgagtagtcaggcttttctcgcggcgtgtttgggtcgccgctgacacgctggaacgcccgcagatagagcagtgacttagcataggccagccatacgaagccgagcaggatgaataggaatcgcagatatggcgtgaatgcgaagatcgcacccgcggccacgtcgatggcgaggatgccgagcgtgtatccgaaacaggcccaaggcatcatgaaggagttgcgcagcgtctgccggaaggtattctcatagcgagcctgaagcggatagtagtattcgaaggtcaggaacgtgagcacaccgaagatgatgaggatcggaagcgttatgtaggcggcgttggtgtcgagcgcgttccaaaacacgatggcgaacacgatggcggcaatcagcaccacgaagatgatggaggagccgatgccgcgcttgaattcacgtttgaagcgtcggatgtattcgcggccgaggttgatgtcgtcattgtcgctgaaggcaaacacggtgctgtacagtgcggctcgggccggtccgatggttacgatcgggatgatggagatcaggaagaacaggttgaggatgaaataccgcaggcagagcgagacgaactgccatacggggctattgggattgtagtgcattggacctccgttttcgttgatattccaagcatactcgccgttgagcgcgctgaattgacaagttagtaagacgaatatactatagctcctaacagcttatttattaagcaataaataagaaggttaccagatgggacggcatcaaggaagtgttgcgttcctgaaggggccatcggatgcatcgccgaaccaaaggaggaatgatgcagtcgcaagagggaatggagagtgtggtgacatctgctgatggcagtggttcaggtgctatgacgctttccgataaaaaaacacggcgagctgtgcgcaaggccgagaagctgagtcagcagcaaagcgacaggaagcgccatggatttaagttgttcctgttgatttcgccatttttgattctgtccgtgctgttcagctacctcccgctgttcggctgggtttatgcattctatgattatcagccgccgattccgctgtcccagagcgaattcgtcggtctgcaatggttcaagatgatggtgcagaacccggcgcagcttcagaccatcggccaggtgctcatcaacaccttcgccatgtccggtctgaacatcctcacctcgttcttcccgttgttcttcgccatcgcattgaacgagattcgtgccaagtggttcaggaaccttatccagacgctgaccacgctgccgaacttcatctcctgggttctggtctacgcggtggccttcgccatgttctccaccaccggcatgctcaacgagatgctgcagaacttgcacatcatcagcgagccgattaaattcctcgattccgattcgcacacttggctgaagatgctgctgtggggcctgtggaagggccttggttggggctccatcatgtacctcgccggcatcgcaggcatcgacccggaactgtacgaagccgcccaggtggatggtgcaaaccgcttccagcagatcatccacgtcacgatcccgcagttgctgccgacctacttcgtgctgttgatgctgtcgatctccaacttcctgaacaacggcatggatcagtacttcgtgttccagaacgccttcaacaccaagcacatccaggtccttgacctgtacgtgtacaacgtcggtatgggcaacaactccctgtcgtatgcaaccgcaatctccatgctgaagtcgctggtcagcgtaggcctgctgattgttgtgaactggctgtccaagcgtacccgtggcgtatcgatcgtctgatgaggaaagagtaaggaagcaatcatggcaaagaaaatcaagcagggtatcgcaccggctatgaggcgcaccaagggtgaggaagtctacaatgtcttcaacatcctgttcttcctcgtgttcgcattcatctgcgtctacccgttctactacctgatcatcaactcgatttccaacaacaacgcctccgcggcaggccaggtcaactggtggccgcagggcatccattgggagaactacaagcaggtcttcgcactgagcggtctgaccacctcggccttcatctccgtggctcgtaccgtcatcggtaccgtgctcaccgtgatcgccagcgcgttcctcggcttcatgttcacccaagagaagatgtggcaccgcaagttctggtaccgcttcatcgtgatcaccatgtacttcaacgcaggcctgatcccgatgttcatcaccatgaagaacctgcatctgaccaacaacttctgggtctacatcctgccggccatcgtgcagccgttcaacatcatcctggtgaagaccttcgtcgagtccatccccgcctccctgcaggaagcggcggaaatggacggtgccggcacgctgacgatcttctggaagatcgtgttgccgatgatggccccgattctggcgaccgtcggcatcttctccgccgtcggccagtggaactccttccaggacaccctgatctacatgacggattccaagctctactccctgcagtacgtgctttacacctacatcaaccaggcgaatgcactggccgcttcggtgcgagcgagtgcaggtagtgccatgaacgtagcggctctcgcaacgcagcagacgcctacctcgatccgtatgacggtttccgtaatcgtggtgctcccgattctgttcgtctatccgttcttccagcgcttcttcgtcaagggcatgatgctcggtgctgtcaagggctgattcgtaacggttcggtactccctatagccattgtgggccggcgagatctgccggtcggaccggccccgcaatctcagttcccatccctgcaaaataaaaggaaatagagaaaggaaggacgcaatgtccctcaaaaagaaggtaaccattgctgcggcagtgacgcttgcagcaatgatgtcgctctccgcctgcggagggtccggcagcaccacggccgccgaaaaggatgataactccctgatgaccgttgaggtctttgacggtctggcgaactaccagggcgagcagaagggctggttcgccaagatcatcaaggataagttcaacatcaaactcaatattgtggccccgaacgtcgcaggcggcggcagcaccctgttcgatacccgcgcggctgcgggcaatctgggcgacatcgtgatctacggctatgacaccggtaagggcgccaagctggttaagtccggcctgatcgaggacatgaccccgtacctcaagggcatgaagtacatcaacaagtacaaggatgccaccgattacgtcaacgaacagatcggtcagaagtccggtgtgtggggcgttccggcatccgtggtcgacaccctgactcccgaccagccgtccgaaggcctcgaaccgaccttcggcccgtacctgcgttgggatctgtacaaggaaatcggttatccggagatcgacactctcgaggacctcatcccggtactcaagcagatgcaggacaaggctcgcgaagagtccggctccgatgacatctatgccatgtctctgttcaaggactgggacggcaacatgatgaacaacgccaagcagccgacctgcttctacggctttgacgaagtcggcttcgtgctggccaagggtgacggctctgacttcgagtccatcaccaaggaaggtggcatctacgagcgcgtgatcaagttcttcaatgccgccaaccgtgccggcatcgtcgatcctgaatccaccacccagaactacgacaccatgaactccaagtacaagaacggcaaggtgctcttctccttctggccgtggcttggacaggcagcctacaacaccaacgccaacaaggccgagggcaagggcttcatgctggctccgctcaaggacatgaagatcttctcatacggcgccgctcctcgtggcgacaagaccatgatcgctctgggctccaaggccaagaacaagcagcgcctggtcaagttcatcaactggctgtactctccggaaggcgtctatgcctcctccaaccagaccggtggctccgctggtccgaagggtctgaactgggagatcaaggacggcaagccggtcctgaccgaattcggttccgcggtgctttccggcgaatccaagaacgtgccggaggagtggggcggcggctcctactccgacggtatttccgctctgaacttcaccaccgtgaccgtgaacgacattgatccggataccggttacacctacaacccggtcatgtggccaagcgagatcgagaaggccaaccagaacccgctgaacaaggattggcaggagcatatgggtgcctccaccaccatggagtacctggagaacaacgatatgctgctcgtcggtgctggctccagctatgtccagccggaggagaactcccagatctccacgttgcgtggttccatcaagaccgagatcgtcaactcctcttggaaggcgtccttcgccagctccgagtccgaatgcgagaagatcttcagcgagatgatcaagaccgtcaacggtctggacatcgattccgtgctgaaggtcgacatgaagaacgccaaggatcaggacaaggcccgtaagaacatcctgaaggagtatcagaacaaggagaagtcctccagctccgattcctcctccgagtgatgaggcgttagtccccaccacgtaatccaaataactgaaagaggcggggcgccagatgtgctgaaccggtatctggcgccccgcctttctttacatgccaacccatcaatccgaccgttcatatgaaccgagcgctgttacaacgccgtatgacaccaaaggaatcaaagttgattatcgaaaagcactcacgcattgttttcgtaggcgattccatcacggacgccgaccgcgaccgtactgctatccccggaggctggggctatgggcatgggtatgtcaacacattgcataatcttcttacggccgtatatccggataaggcattgtgcaccatcaatgaaggcatcaacggcaacgatatcgtcgacatgtccgaacgctggcagagtgacgtcatcgacatgaatccggactatgtgtccatcatgatcggcgtgaatgacgcctggcgttatttcgacggtccgctgtggcaggcccgcctcaacaccgtggaaacttacgagcgtgtctatgatgagcttattgaacgcgtgaaacaggatgcgccgaatcttaagggaatcatcgtcatgcgtccgttcatgttcgagccgaacccacaggatgccatgcgcgccaaggttgaggaattcgcggccgcgtccaagcgtgtggccgaacgccatggcgcgattttcgtcgatacgcaggcggccgtggaccattggctcacccagttgcacggatgcctggccagccaggatcgtgtgcatccgtacgagcgcggtgcgatgatcatcgcccgtgcatggtgtcaggccgtgggcttcgattggaacaggaccacgttcgatgattgatctgagcaccgtcgaggcggtcatcgcctccggtccctatgccgacacctgggagtcgttgagccaggctccgaccccggcatggttcaacgacgccaaattcggcatcttcacgcattgggggctctacaccgttcccgaataccgcaatgagtggtattcgcgcaacatgtacatcgagggctacccggagttcgagcaccacgtgagcgcctatggcccgcagaacaggttcgggtacaaggatttcattccgatgttcaccgccgaacggttcgatgcgaacgagtggctcgatctgttcgccgccgcaggcgcgcgctactacttcccggtctccgagcatcatgacggctatcagatgtaccgtagcgaattgtcgcactggaacaccttcgaaaccggtccgcatcgcgacgtgctgggggagttgcgtgacgccacgcacgcccacggactgcattttgccacgtcgaaccatcgcgccgagcactggtggttcatgggccatggcaaggacttcgactccgatatcaaggagccgttgcggaagggcgatttctattggccggccatgcccgaaccgaacgaattcgacattcacggcactcccacgccgaccgccgaatatctggaggactggctgttgcgcgtctgcgagatcattgacgactaccggccggaactgctgtatttcgattggtgggtgcagcacgagtcgttcaagccgtacatgaggaagctggccgccttttactacaatcgtggcgtcgagtgggggcggaacgtctcgatctgctataagtacgacggtctcgcctggggcgcgggcatcgtcgacgtggaacgcggcggttttgccgatgctacgccgttcgtctggcagacggataccgcaatcgcccgtaattcgtggtgctacacgaactcgctggagtacaagacgcttgccgagctgatcgtcgcgttggtcgacgcggtatcgaagaacggcaatctgctgctgaacgtaggtcctcgcgcggacggttcgatcgcggaccatgatcgtgagctgctgctcggcatcggcgattggttgcgtgcgaacggtgaaggcatctacggcacccgaccatggaggctcacgcaggaagggcctacgaagcaggccgacggcatgttcgccgatcagaagccgaccgaatggaccgccgcggattggcgattcaccacgaagaacggagcgatctacgcattctgcctacatcccgacgatatcgcggataatcatgaaacatcttgtgaaacacttgcaatgtcgacgtttgccgcatatcacgacggcgtcaaaccgccattcaatggcatcgtcgaatcggtggaacagctgggggcgggaccggtgcgcttcaaacgcggcgatgaggccttggagatctccccactgccaagggaacccgatcggcaaggcctgccaatcggattcaagataaccgtcggttgacaagaagaacaacgtagtgaccgctttcagccagcctcccgctgacgggagcgaggaaagaagaagacatgaccgtaatcaccgaagccaacaagaccaaggccagggacctgaccgccaaactcacgttggacgaaaagatcgccatcgtgcacgccgccggcctgttcaggaatggctgcgccgaacgactgggcatcccatcactcaagatggacgacggcccgatgggcgtgcgggccgagctgcataacgacaactgggcgccgctgtacaacacccgtgactatgtgacctacctgccgtccggttccgccgtcgcttccacatggaatcccgatctggcccgcgcgaccggcgaggtacttggcgaggaagcgcgcggccgcggcaaggacgtgattctcggaccgtccatcaatatcaagcgtagcccgctgtgcggtcgcaatttcgagtacatgagcgaggatccggtactgaccgccacgcagggcgtggcctacattcagggtgtgcaggaatccgacgtggccgcttgcgcgaagcactatgcggtcaacagccaggagaccgaccggcttgacgttgacgagaccgtaagcgagcgggcattgcgcgagatctacctgccggctttcgaggcggcggtgcaggatggcggcgtgctctccgtcatgggcgcctacaatctcgtcaacggcatcaaatgctgtgaacacaggcagctgcttgacgacattctgcgcggtgaatacggtttcgacggcttcgtcgtctccgattggagcgcggtgcgtgacaccaaggccagtgccgaggtcggcatggacgttgagatgtcggtgacgccgaacttcgatgattactatttcgcgaatccgctgaagaaagccgtcgagaacggcgaggtcaaggaaagcgacgtcgatgtgaaagtcgaacgcgtgatcgccgtcatggatgcgttgcacatgctgggcgacgcccgtgcgacccgccagccgggacgctacgccaccatcgaccatgccgcgaaggcattggagatcgcccgcgaatccatcgtgctgttgaagaatgacgaaaacctgttgccgcttgacgagcacggcatgacccgtctgctggtgattggcgcgaacgccgatcgcattcactccaacggcggcggttcggccgtgatcaaggcgctgcatgagatctcgcctctgctggggctcaacggcgaactcggcggcaacgtcgacatcgagtatgtgctcggctatgacgccaagcaggtgaaccaggacgagtcctggcaggaggaaagcctcgagaactccaagggttccgacgccaaggacgagctgcacgcacacgaactgcgcgaagaggctgtggccaaggcacgcgaatacgcggctgccggtgatccggtgctgttcatcggcggtcttgaccacgagcatgatctcgaagggcgcgaccgcactgacatgcgtctgccgtacggtcaggacgagttgatcgaagcgttgctcgaagccgctccgaatacgattctcgctttcgtggccggctccccgatcgagatgccgtgggccgacaaggccaaggccatcgtgtggaactggtatgcgggttgcgaatccggcgccgcgctggccgaggtgctgttcggtcgcgtaaatccgagcggccatctgccggagaccttcccgatcgcgctggccgacgaacctgcgcacaggatcggcaccttcggactcgaaggtcacgtcgactatgaggaagacatctatgtgggctaccgttacttcgacaccaggcaggttccggtgctcttcccgttcggacacggcctgagctacaccgactttgcattccgcgatcttgacgtgcgtcaggtggacgacgagatccgcgtcaccttcaccgtcgagaacattggggattgcgccggtaaggcggtcgctcaggtgtatctcggtcttgaaggcaccggcgaggaccgcccggccaaggaactcaagggattcgccaaggtcgagctgaacgcaggggagttccgcgaagtcaccgtggcgatgcctgccgccaaggcgttgcgttactggtccaacgaatccggagcctacgctctggcgccggaggcaagcgtgttcgtgggagaatccgtggaagatatccgtctctccggacgtgtcgcataacgcttatctataaacttataaataaagtaaaatgaaataacgaacgcctttggaggatgggtcgcgaccgatcctccaaagcggaatcccactaatgcaaaggagcaatgtatgaagttcctcaacggcggctggctcgtcaaggatggcttcagcgtcaagtatgcggcaaacatctatgccgccaacatcgagccgaagaagctcactctgttctgcccgttcggttctccgatctacaacgccggcatgaccctcgacggcggcatcctgaccatcgaggtgacgtcgcctcgcgaagacgtgatcaccaccaagctgatcaacttcaagaaggatcgcagcaactgcccgaagttcggcttgaacgaaaccgatccggatgtcgaaatcgacgaaaccgacgacaagtggaccttcacctccggccgtctgacactcgagatcgccaagggcgagaccatcgacttcaagtacctgtacgacggcaaggtcatcgcgcattccggctggcgtgccaagggcctcgtcaccgacccggaaggccagttgcacgtctccgaacagctcgacctcggtgtgggcgagaagatctacggccttggcgaacgcttcaccaacttcatcaagaacggccagaccgtcgacatctggaatgaggatggcggcaccggcaccgagcaggcctacaagaacatcccgttctacctgtccaacaggaagtacggcctgttcgtcgacaatccgggcaaggtcagcttcgaagtcggctccgagaaggtctcccgcgtgcagttctccgtgccgggtgaggaaatgagctactccgtggtcggcggtgaggatctcaaggcgatcctcaacacctacaccgacctgaccggcaaggccccgctggttccggactggagctacggcctgtggctgtccacctccttcaccaccgactatgatgagaagaccgtgcttgagttcgtcgacggcatggccgagcgcaacatcccgctgtccgtattccacttcgactgccgttggatgaaggaactcgaatggtgcaacttcgattgggacaagtccaagttcccggatccggaaggtctgctcaagaagctgcatgagcgtggcctgaagatctgcgtgtggatcaactcctacatcggccagaagtccccgctgttcgaggaaggcgccaggaacggctacttcatcaagaacgccgacggctccgtatggcagtgggacaagtggcaggccggcatggccgtcgtcgacttcaccaatccggaggccaccaagtggtaccagggctacctgaagaacctcgtggccatgggcgtcgattgcttcaagaccgacttcggcgaacgcatcccgaccgagggcgtcaagtattatgacggttccgatccggagctcatgcacaactactacacctacctgtacaacaaggccgtctacgatgtgctcgtcgagaccaagggcgccgatgaggccattctgttcgcacgctccgcaacagtgggcggccagcagttcccggtgcactggggcggcgactgctcctccaactacccgtccatggcggaatccctgcgtgccggcctgagcttcggcatgtccggcttcggctactggagccacgatatcgccggtttcgaggaccaggcaagcccggacctgtacaagcgttggacgcagttcggtctgctcagctcccactcccgttaccacggctccaccgcctacaaggtgccgtggctgtacggtgacgaggccgttgatgtggcccgcgagttcaccgagctcaagctgcagctcaagccgtacctgctcaagatggctcaggagacgcacgagaccggtgttccgatgatgcgtgccatggtgctcgaattcccggacgacccgacctgcgaagacatcgacacccagtacatgctgggcgatgacctgctggtcgccccggtattccgcgaggatggtgtggcccgcttctatgtgccggacgacggcaccggccaggcctggaccaacatcatcaccggtaccgcctacgagccgggcaagtggtacaccgagcagtacgactaccacaccctgccggtgctggcgcgcccgggcaccgatccgttgcacgtgtgatcgcacacgctgtcgccgtgcatgccgtaaatgaatgacaagagcgtgcggacaaaaggtgtgtccgcacgctctttgcacattgtgttggatgcgtggcctacgaactcctcgcaatccaacccacgttggcacaacggtgccaatgaaagtgtaccaaccggccatcaaaggtgcctgcgcttcggcaattgtaggcggtgaccggtcggcacctatcagaaagggaaaatagtgttgttacatacgaggcacgaagctgtgccgcaagtcatggaagggaacggccgccagcggtgcatgggcgcgctgctggccgtggtcacggcgatatttgccgcgttcctcataatgaccggcatgacgacacccgctttggctgccgatcaggatgctgcggtagccatcaccgccgaacgggtttccgccggcgaatatcagttgaccatcaccaacaacggcagtgaaaccatcatcaaggcaaccggcgtcaccaccgtgccgcaagagattctcacggatggtgccacggccagctacacatggcaggtgagcggactgaaatccggcgcatccgcagtcgcgcaacaggacggtaaggctctgatcatccacatcaaggaggggtccacttccggcaaaaccgaggagcaaatcacagacaacaccgccgcaaccgtatcgacggatacgcagcgcaaaacaaccgacaagaaggccgttaaggagagtgctgaaatcctcggcagcaccagctccgcggtattcgcagtcgcgctgattgcggtgggtctcgctggcgtcggcatctccttcaagtgggagaacggccatcttgccgcgcgccgtacgatcgccgtgctgggaaccgtcgccatgattgcgggctgcatgtatgccgttccgcaacggcaggcatccgctgcgcagcacaccgccacagcccaaggcgtcacctcggcgatcaccgtgaacggtaaggaatatcagcttgcctccgacgtgactattacctacgagcaagttgccacgttgtcttccaccgaatatgccaaggccatgggcgccggctggaatctgggcaattccttcgatggcgtcaacaccgatctgagtgccgaagacaagggcgaagaggcctggggcaatccgaaggtgacccgcgagctcatccattccgtcaaggagaaaggctacacgagcattcgaattccgatgaccgtctaccatcgttccagcgaaaacaaggatgcgaaggacggcgaataccgttacgtcatcaacgcggattggctgaagcgatacaaggaagtcgtagattgggccgtggatgaaggcctgtacgtgatgatcaacatccatcacgattcctggatctggctgaagaactggaacggcgacacctccgccgccgaataccaggagttcagtgactattggaaacaggtcgcctcctacttcgccgatgaaccactgtccgtatgtttcgagaccatcaacgaaccgcagttcgcggatggcgacgcgcaagccaagctcaatgccgtcagcaaggcggcatacgacatcatccgcgccaccgcaggcaacgagcaacgcatgatcgtaattccgacactcggcaccgcacatgacgacaccgccaaactgcaggcgacggtcgacttcatccacaaggatctcaagaacgatgcaaacgtcatcgccaccgtgcactactacagcgaatgggtgtacagcgccaatctcggtcgcaccggtttcgacgaatccatctacggcgacgagcgcaccccgcgcaacgtcatcgattccttcgccgaccgcatgaatcagtacttcaccgagaacggcatcggtctggtaatcggcgaatacggtctgctggcctatgattcttcctccgacggcgcgctacaggcgggcgaggagctcaaatactacgagtacatgggcgcaatggccaacgagaacggcttctcctatatgttctgggataacggttcgggcatcgaccgcaccagctaccagtggaagaagcctcttgccggcaaggtgctcgaagcgagcatcaacggccgttcttcctatgcaaccggactggacaccctgtatctcgaagaggatccgaccggcgacgtcaagttgccgctgaccttgaacgccaacgaattcaagggcatcgagggactgactgagggctccgactacacctacgatgaagccagcgccacaatcacgctcaagcagggctatctagccaagatgtacgaggccaagggtggttacggcatcatcgccgacctgacgctgcagttctccgcaggtgccgactggcacgagtacgtagtgcattccggtactccggccgtgaacgccaccggaaccgtgaccggcaccaagagtgaaggtctgacgattccgatggacttcaacggtgccgagctgaagaacatcaccgcgaccgaaaacggtaatcgcgtcggaccgaactccggctggtggcagtacctgcagaacagcggatcgttcagcgtgcactacgattccgccgaccgtgcaagcggtacgctgaccgtgctgccggccttcttcgacgacggttcagtgaccgacggcgacgtgaccttcacgatcacgttccaagacggccaaacgctcgacgtcaacttcaatattgccggcgaaacggtgacgttgaagtagccaacataaccgaatccatatgactctcgtcgggtggaagacccaccaaggtcttgcacccaacgagagcgtcagccgtaccagagaggaatacgaatgaccacggcacttgagtttgtgcgcggcctcggacttggttggaatctgggcaaccccttcgacccggttccgctgaacgacgaacgcaacaagacaatcaccaccgggggagtgtggacgcccgaagaccagcagcgactgtggttcaacaagccgttcacccgcgactgcgccttcttcgtcaaggaggcgggtttcgacaccatccgcattcccgtcacgtggaaggattggcaggacccgtacaccggcaacgtcgatccggtatggatggctgccgtgcaggaagccgtcgactggagttacgaggccggattgaacgtgatcgtcgacgtgcatcacgacggcggcaacggcccgttcggatggattcgtaccgccagcgaggactatccgggtgtctgctcacgcttctccgcactatggcatcagattgcggaacgattccgtgactacgatcatcatctgattttcgaaggcggcaatgagatctgctttccgcacgctgcccatcaggacaccgcctacgaactgctcaaccggctgaatcaactgttcgtcgatatcgtgcgcgcttccggcggcagcaatgccgaccgattcctcctgatccccggttacaacaccgacaccgcactgacctgcgacaaacgtttccgactgccggaagatactgtcgacgatcacctgatcgtgtcgatccactactactcgcccgccgaattcgtgctcgccgaacatgacagcgactggtgtacgccggtcgacgtgtggggcagcgacgaggaagtggccgcggtcgaagccgacttcgccaaacagaaggcacgtttcatcgacaacgacattcccgtgatcatcggcgagtacggtcttctgaccgaacccgtcgaccataaggatcacgacagcaacatcaagtggctgcgtaccgtcatccgctgcgcgctggacaatggctcctgcccgatcctatgggacacctccaccaaggaaatgtgcttccttaaccgcgaaaccggtcgtttcttcgatcccgagatcgaaaccatctaccaagaggcgcgcaccatgtcggtggcacaataacacaacccataacgaagaaagttccctgcaatgacccttttcaacgtaaccgaagccaagcgtatcgcgtcaggtttccatccggatccgaccatctgcgaaacccctcagggtacgtattacatggtcaacagttccttcgaattctttccgggactgcccgtgttcgaaagcgccgatggcgagcattggcgacgtatcggcaacgcaatggacagagagtcccagttcccctatgaatccataggtaacagccaaggcatctacgcgccgacgttgcgttaccatgacggccgatactatctgatcgtcaccaacgtcaacgaaggcaacatgatcctcaccaccgacgatccgcataacggatggtctgatccgatctgggtggagggatggccgggcatcgatcccagtctgttctttgatgacgacggttcggtctacatctgcggcaacgaaggttccgagccggatgacgacggtgaacgcgaacccgcgggaatctatctgtcacgcatcgatgtcgccacgggaaccgtgctgaccaaacgtcagcgcatctgcgggggcatcaccggatcgaatccggaaggcccgcacatgtacaagcgcggtagcacatactatcttatgtgggccgaaggcggcacggaatccgggcacatggagaacatcgcccgctcgtccagtccgactgggccgtacgagatgtatccgggcaatccgctgatcaccaaccgcagcacacatttgaccctgcaggccatcggccactgcgattgcgcccatttcgacaccgatcgaaccctgatggtgttccatggcacgcgcaacaacgacgagtatcctgcccaaggctggcttggccgtgaaccgtatggagtgtggttcacgtggaaggacggttggcccgatcttgccgaccagtcctacgattgcccgctcgacggttgcggcgaggccctggagcatgagatcgcatggatcacaccgagcatcgacaaggcgcatcgctttacgatgaacgatgcgggctcgcatatcaccgtcacggccgcgcggcaggatttcggtttggaggcgggagcgccgatgatcggcacacggcagaccgatttccgttgtgcattcacggcgaccatcgccgatccgacgcaacttgtctccggaacggccggcatcgcgatttacgcgaatgccaaccactatatgaccatcgcagtgcatgccgccgaagccgataccgtcgcgatcgatgcgaccgtacacaatgcgggtctgatatcacgggtcggtggtgtgcatgtgccagcgggcggaccggtacgactgatcgtccgaggtgacgattacggctacactttcgccgtcggcaccgcttccgacgaaaccacgctcggcaatgctcccggcaaagtgctgagcttcaccaacgccggaggattcaccggaatcctgcttggcgtctatgcgcatggtgacggcgtcgtcgatttcaacgaagtgcactatcaggcaggcagtggcgtcgccgatgagtgacggcagctgttgccaagtgaacacatacaagattcagtctgaagaaggagaaccagatgaagccgatttatgaccacttcctgttcggcggcgattggaacccggaacagtggccggaggagacctgggagcatgacatcgaaatgctcgaagacgcccatatcaacgaggtcaccatcaacgtgttctcgtgggcgctgctgcagccggccgaggaccgctacgacttcaccatgctcgacaagatcgttgcgctgctcatcaagcatgatttcaacatcgtgatggccaccggcaccgcggccctgcccggctggatggtgcgcctgcatcctgaagtaatccgcaccgaacagaacggcatccgccacgtgttcggaggccgacacaacttctgcccgacctcgccgtacttccgcgaagcgtcccgcgcgctcgccgcacatgtggccgaacgctataccggcactccgggtctggtgaactggcatgtgtgcaacgaatacggcggaggcggcggcctgtgctattgcgaccagtgtgcggaatccttccgcacatggctcaaggccaagtatggcaccgtcgaagcgctcaaccaggcgtggtgcgccaacttctggagccacaccatcaccgaatgggccgacgtggtgccacccgtcagctatggcgatggcatcggcgacgccaaatgcgtggtctccggcctgcagatggactatcgtcgcttccaaagccaggcgcagctcgcatgctacaagaacgaacgtgatgcgattcgtgaatacgacgccgttacgccgatcaccaccaacctcatgggcacgttcaaggatctcgactactttgaatgggccaaggagatggacgtggtcagctgggacaactacccgggcatggacactccgtcgagcttcaccgccatgtgccacgacctcatgcgcggcatcggcggcaacaagccattcatgctcatggagcagactccgaaccagcagaactggttcccgttctgcaaggtcaagcgccccggtgaagtgcgaaaactcagctggcaggccgtggcgcacggtgccgacaccgtgcagttcttccagatgaagcagtccatcggtggctgcgaacgcttccatggcgcggtcatcgcgcacgatggcaccgaagattcccgcgtgttcaaggaaactgcggcgctcggcgacgagctggcgcgcatcggcaagcggatcatgggttccgagattcgcgcgaaagtcgccatcatgttcgattggcagagctattggtcgcttgaaggctgcgtcggcccgactgccggcttctcgtatccaaacgaggtgcatcgtttttaccgtgctctgtggcgccgcaacgtgcccgtcgacatgatcgaaagcactacgccgctcgatgagctcaagaaatacgatctggtcatcgcgccggcactcatcaccgtgctgccgggcgtcgccgaaacgttggaaaactacgtgtccgacggcggtagcttcgtgaccggctatatggcgggtctgcatgacgagcatgatctcgtggtgccggggggatatcctggcaagctccgcaggctcatgggcgtatgggtcgaggagatcgacgcactcgcaccgaacgaaaccatcgaagtgcacggcgacatggtcgacgccacgggcgagatcgtggccagcatcatccatcgcgaaggcgcacgccggctcgccacctatggcggcagcgaattctacgcaggccattctgcgctcaccgtcaacgatttcggctccggcaaggcctacttcgtcggcactccgctcgacgagaccggcatgaacgccttcatggcatcaatcgtgagcgaactgggcttggggtcggtcgacaccccggaagacgtgagtctgtcggtgcgctacgccgatgacggtacacgctatgcgttcctcatcaacaacagcaacaccgacaagcgcctgtgcgtcagcgaactcaacggcggtgaggagctactgtcgggcggccgcatcgacgatgcgatcgaactcaggccgtacggcgtcaacgtcatcaaactataggtgggtgtgcgcgagtgtcggggatagttctacaatgaagaagcaccatcgggcgaatatagacgggttagatgacgaaatgacggcgaagaagcatatcctggcattcgaaatcggcacgttcttcacccgttatgtggtcttcgaagacggccgtatgggcatccccggcactatcgcgacgccggtggacagtgcggaatccttctatcgggcactcgcgcacatcgccaacaatcaacgtttcccgctcgacggcatcgccatgagcatgcccggattcatcgatatcgacaggcagctggccgtcaccgctggcgcgcttggcatgctgtataagcatgaaatcggcaaagagttgcagaaatatctcgatgatccggtgccgacatggatggaaaacgatgcgaattgtgctgcgatggcggagaaactcagtggcaacgccgtcaagctcgatgatttcgcgctgatcaccatcgattccggcgtcggcggcgccctgttccttgacggcaagattcgacgcggcaaggattggcgcgccggcgagctcggtatgatgatcccgaattatgaaaacggagggtttcagaccctgcaaaactatctgtccaccattgtgctggccgaaagctatgcggaggaattggacgtgccttccgggtccatcgtgccggcgacgttgttccacaagctggatgatccgcatgtgcgcaaaatcgtggatcaatggatcgactatcttgccattgccgtgttcaacattaccgcagtcgccgatcccgaatgcgtgctgttgggcgggggcgtctgccgtgagcagcagctgttgccgttggtcaatgcggcacttgacaagattccagcatgggattcgttccgcacgtccgtgaaacgctgccgtcacaccaacaacgccggcctgatcggcgcctactacgccttcgaaaccgaagtcgatggcttggaggaagtgccgattcgctgattgtcgccgtgcaacgccgttatgctccggatgtcacttcagcgtgccgccaaaccgcgagaaccggcatgcgtaccacagttccgcggtagtgcccggatcgttcagatcgacacccagttccttgccgatgactcccagatatttggtcagcgtatgccgatgcatgccggccatccgcgcggcctcttcggtcctgccgcggctttgcagccatgcccacagcacgtcgatggcacgtacctgcgtgcctgaatccgttttgtcgcttgacgattgcgttgccggtgcggcttccgtcgttcgtgccgttcccgccttggtgtgcggtccggttgataggtcgaacgtgagattcgcgatcggcgcgagtttgagatccgcgaacgcacgcatcagcgacggttccaccacgccttccagcgtcgcaccgccctcgccgttgccgtactgtaccagcgccttgccgctggtcagtgcctccgcgcccgcctgatatgcctcatgccgcgcacgaggcatatcgatccaggtcacacctgaggattggcccacggtcagtcgacccgtatgggtcgactgctgcgtccacatcgccgcattcgattgcgacacgatcgcccacatatcgccgtccacgatgccgaacaccacacgattgtcgttcttcgccaccgtacgtcggaacggctcgaacagtcggccggcatcttccaacgcatcctgctgtccgataatgcgcaatacgaccaacggttgcaccggcagcccgttccatacgtcgtccgcgaaacggcgcaccgattgcgattcgccttccaggcacagccgggtcatgctggagcgcaggtgcgtgagtgcacgattggatgccgcttcgctgttcacggccaaagacaacagtgaagcggcttccgccaccaacggatggtcgatggcgccgcgctcgcctttacgacccgcgaccagatagcccagtgtctgtcggttgggagaggccacatgaaaaatcgcaatgtcgtagcctttcgccaccgtgaacttcgcctcgccgagcacgctgaacgcgagcacgtcgcttaaggagtccatgtcgaccggcaacgtgtgatgggaagattcgatgatgccgcccgccggattgagcagtgcggtccagccgccgatcagttcggccagacgcgagatgatcgtgctcaccggatcgagcgaatgcacgctacggagcagccgttgctgattacggtacattcgttccacgttgcgatgcgtatcatcggagatgccgcgcgcgatagttttggagatggcgatgaacggtgtcgccaatggcactgtaaacaagggcaggccgaccgcttcgcattgatagatgagccattgcggcacatgctcatgctggatgcctaaaccgaatccgactccacgtgcgccaatctccgcaagacgggaggcatattctcgatgagccgcgtcgggcgtgccatccggcattaccagaccagtggtcagtaacagctcgccgccctccagatatgtggttgggtcggctgattcggatacctgcacccatgagatgggggagtccagcgtcgcgccggaaccttctacagccagtcgtaggttgagggagcgttgctcaagcagattgcgtacggtaatcgccatggcttcagattaaccggccgacagcgaatcataacggattcgtctatatcttgacgatattttcgacaactcgtctataacaaattatgggcaaactttctaacgtgacaaccaacagtgatgaggaacggatcgaaaggaagccatcatgtcagtcccacaggtagcacgcaagatcgtcaccgccattccgggcccgaagtccgaagccctcaaggccgaacatacccgctatgtcagcgccggcgtcggccagggcatgccggtattcgccgagaccgcaagcggctccaccatcaccgacgtggatggcaaccgcttcatcgaccttgcctccggcatcgccgtgaccggtgtcggcaactgcgcgccggaagtcgtcgcggccgtgcaggaggaagtggctaagctcacccacacaactacgacggcgtcgttcctgacctgatcaccgccgccgaggcactcggcggcggcatgccgattgcggccgtgaccggtcgcaccgaaatcatggacgccgtgcagcctggcggcatcggcggcgcctacggtggcaacccggtctcctgtgccgccgcgctcgctgcaatcggcattatggaggagcaggatctgccggcaaaggcctcacatatcggtgagatcgtcgaatccgtactcggtccgctggtcgacgaagtgccggcggtggccgaagtacgtagccgtggcgccatgatcggtgtcgaattcgtcaagccgggcaccatggagccgaataaggagctggtcggccgcatcgccaagcgcaccatccaagaaggtctgatcatgctgacctgcggcatcaacggcaacgtaatccgcttgctgccgtcgctggtcatcaccgatgacgagctgaacgaagcgctggcggtactcaaggagatcattgtcgaggaaagcgccaagtaagtacgcaatcgttgcgggcgagcgaaatcgccgataacgaaccctcaagcaaacagacatagagttggctgcaatcgccggaatgggcgcggttgcagccaacgttttggaaaggacgcatcatgaaactgttgacggttggacccgacaatacctacacctacgatactgtcaaggaattcttcgcatcgttcgaactcggaccgaaggacctgctggtcagcatcgaagtgatctacaagtagttcctggaaccgtatgagaacggtgcgaacgtgattcttgtcgacaagtacggcgcgcaggcgccgaccgatgtgatgatcgacgaattcatcgcggatgcgggcaaattcgactatgaccgcatcgtggcagtcggtggcggtgccgtcatggatatgtgaaggtcgtggcggtggccggcggtatctccatcgacgacgtgatcgaccatctgcccggcttcaggcgctccgtacgcctcgtgctcgtgtactccgtggaatccacgctttcgccgaactccacgccatacacgcgcatgttcggctatgaggccatgaagatgatcatctccggctacaaggccgttgccgaagccggtcccgccggttcgccggagcgccgcgtcaagcgcaacgaactgatgcgtgacttcctgatcgcctccgactatgcgggtatcagcttcgataccggcgggtgcgctgccgtgcatgcgctgaactatcagctgggcggaaaaaatatcatgtgccccacggcgaatccaactacgccatgttcaccggcgtgctacgcaactatatggagatcaagccggaaggcgagatccttaagatgaaccagttcatcgccgacattctcggctgtgacgtggcctatgtgtatgacgagctggagacgcttatcaacaagctgttgccgaagaaggcgctgcatgagtacggtgtgaccgaacaggatctgcaggaatttgccgatcgcgtgctcaagatcttcaaggagctgtactgattttcttgggttgcggcgtgatgcgtccgtagcgtgtacagaggcggattgattttgaggtggtaccgttttcttgggctccctactgggggtatcggggatggcgccatctcggttttcaacgtaaggctgatcattcccgttcgcatgatcgcaatggattctgctggccggtatctgaaattccggcataagggcgcatatgcccgtgtattatcgggcacagacacggggggtcgcaaggctgagaggaagcatccgcttcgaccgtttgaacgtataccgggtaataatgctggcgcacggcgactacgcttggttgggcgcggagtcggactccgtcgccgaccggatgtacatgctgaataccgaggattggcgagaagccatcaacttgcgtttcgtcaacgagctgttggatgacgccctaccggaagagatattgaaatcatatttgattcaggatttcaagttctacaacaacggcatgatgacccggcgcatcaagttggctccgcgtcaggaaaccaaggacatgctcgccgcccagtcgcgatggttcgtggacaacgaggccacgtatttccagcatttcctcgaggactaccacgtcagccagcaggagtatgacgacaccgaacagacccaggcgaacagagattacggtgcgtacctcgatacgctgtccgataaaagctggccggaactgatcaccgcgatctgctgcatggaatggctgtatctcgcatgggccaagcgcacggtcgacgccggggtcgtgcagcaggtcccggcacacaagggatgggtcgacctgcacgaaggcgcgcatttccgcaaatgggtcggcgatctcatcgcgctggtcaacgaatactgctccatcgacggtccggaagccgaggtattccacactatcgtgcatctggaacgccgcttcttcgacgattcctacccacaggactgattcctgcgggacatcccgtatcggtttcagtgggtagcgtatatgagatgcaacatgttctgatatgcgcggaatccatccggactgctgtggggccatcgggccggtggccccacatggaagttgactgtgaacagctcgaatatgcaggttgcctactgccgtgccgaaagcgtcttcggcagcaggcaatctgcgctggagctcgcgtattcgctcggatcggtgtatccggcccattcgctcggtgggaagatgatgtcggaaatcgaaatccactgctcaagcaggttcattgaatcgtcgcccagccagcggtactgtagaccgtccatcgcgctcatggcaagcgtgtacaggtcgtagaagcgctcctcgtcgacgtgttccggcagtatccaattcatggagcagatcatttcccagttgcgcatatggcggccgatgaagaagctgtgtgccgggtgttccgggctgagcgcctcaccgttgagtacggaatagagttgcaccatttccggacgctgcaggttatagcgaacgatgttcaggcaatatcggggataatagtagacgcgatgtccgtcatcgtcgattaccgcagcggtcacggcattgtattcatctgcatccggagtgtcatagccttcggaaagcaccatgttgagcaggtcgtctttcgatgagatgtagtggtagagtgcggcttcggtgatgccgagctcgtctgagatatcctgcagcgacataccccagaaccctttgatggcgatgatcttggctgcggcctgcagaatctgcagatgccgctcttcctgactcatgcgcttgcgtttttcgaaggttttttttgacgtggtgtcacgtgcggtgatgctggtgctggaggtgtccgggccggagccggattgggcttccaaaaactgagaccatgctgcaacgctcattgtccctcctcctttgcaaaatggcgcgaagattgccggatgacgcattcgtcaattcttttgattatatccgaaatccgtcgaaatacttgaaaatctacgcaagacaagactacaaattttgtaggacagtatgcttacggcatcatggatgatgaccatctcgtgataaggggtgttgatggcgggaatcaaagatgttgcggtgcgcgcgggggtctccatcagtacggtttcgtatgtgatgagtggcaagcgttcggtgcggaatgaaaccaagatcaaggtgatgcaggccgcccgcgagctgaactatttccccaatgccggtgcccgcatgctgcgtggggaaagaacgcggctcgtcgcgctgagttctccgatgagtgacgagacggcatatggcgattggtcgccgttctttttcggggtggcccgtcgcctgcgccattatggctatgacgtgttgttgctgatgggtgaggatgaggatgaggagttggtgcgcatgtccgactccggtttggtggatggagtactgctgttggatgttgcgatgagcgacccgcgtgcccgcgcggcgaagacatcccgggtgcccgtcgcatcgattggatgccctgacgatttggatggagtctatgcggtggatttggatttcgagcagatgggggagatggcggtacaaaaactgatgaaggccgggcatcgtcatgtactgtttctcggcgcgaactcccatgcatacgagcggggcgtgaactttctgatccgtacgcgtgattcggtgcggatctgcgctgagaaggccggtatgcggctgacgtgcgatgtgatcgataccggtgacgctgatgagatggaatgtgtggttgaaagggcctttgcttcggatccacggataactgcggtgctcgggcaagttggattgatcgcaatgtcgaatctcaagtcggccttgcaatcgcggggctatgacattccgaaggatatctccgtcatccagttgggtgccttcggtcaggcgtcagtgatgaatccgccgcttgatgagattccgctgaggccatgtgccacctgtgcccgtgcggtggatgtgttgatggaaatcatcgaggggaagcgtcggatgtccgagcaagggacaaaggaactgattgcggtgaagtatttgagtcgaggttcggtgcatgacgtttcgaaaggcgtatgatattcctctgcccgtgaaggaaggcggcgcaatcgaatgtcccgcatgctttttgtcgaaaatcgtcgaaacgattcgacaatgaaggataaggccttgtaccctgaaaacgtaaacgtccacggcatggtgaggaagccatagggcggagcaaatgcagggttgcttgtatacgcgcattcgtggcggttacgcgcgattcacgacggaatcgtcatgattgtggacgtttgcatgctcgtgacaatagctacgaaaggacaaggtgagggaagatgcgtagtgtcggaagaaaactcgtcgcggcgtgtggcgtgcttgccatggcatgcacgatggcggcctgcggcggtgacaccgcgagcgatgccgatgacaattcgctgatgacggtcgaggtgttcgaccaactggcgaactatcagggcgagcagaagggctggtttgccaaggttatcaaggataagttcaacatcaagctcaatattgtggccccgaacgtcgcaggcggcggcagcaccctgttcgatacccgcgcggctgcgggcaatctgggcgacattgtgatcatcggctctggcagcggtcaggccgaaaaagtggtcaagtccaaactcgtcactgacctgagttcgtatatcaaaaacaccaagtatctcaagacttatcagggggccatcgatcagttgacgaaggacgccaaccaggagagcggtatgtggggcattccgacctcggtgtcatccttgtctccgaccgagtccagcgaaggtgtcgagccgactttcggcccgttcgtacgttgggattactacaaggagatcggctaccccaaggttgccacgcttgaggatctgctcccggtcctcaagcagatgcaggacaaggcgcgcgaagagaccggcagcgatgacgtctacgcgctgagtctgttcaaggattgggatgatcaggccatgcagaatggcttccagcttccggcgttctatggctatgccgaagggaccggttacgtgatgagcaatgccgacggcacggatgctcaatcgctgatcgacgagaatggcgtttacgtgcgtgcgctgaagttctataacaaggccgagcagatgggcctggttgatccggaatccaccacgcagaactacgacaccatgtattccaagtacaaggaaggcaagatcctgttctccttctggccttggctcggccaagcggcccataacacggacgcccataagaaggacggtaagggtttcatgatgctgagcatcgatgacatgaagatcgcatccaagggtgcccagccgaacggcaccaccacgttcatcggcgtcggagaaaaagccaggaacaaggagcgtctggtcaaattcattgattggctttactctcctgagggtatccaagctgcgggttcccagaccaatggcgctgccgggttaaagggtctgacctgggacatcaaggacggcaaaccggtacttaccgatttcggtgtcaaggccatgggcggcgaaagcgtcaatgttccggaggaatacggcggtggcggttactccgacggcgcatcccagttgaacgtctccaccgtgctcaacaaggacatcgatccgagaaccaacgcgccgtacaactatcagatgtgggattccgaactcgccaagcgtgataccgcactcgacaaagattggcaagagcatatgggcggtgcgcgcacgaccatggagtatctggagcagagtggcaaactcgcggtcattccgggcgcctcgtacaccactccggatgaagactccgtgatctctaccacccgtggacagctgaagaccgccgtggtgaacgcctgctggcaggcagtgttttccaagagcgatgacgagttcaactccatctggagcaagatgcagaaagaggttgacggtctcggttacaagaaggtctatgacgtcgatatgaagaacaccaaggatatgttcaaggcgcgtcaggcaatcgaaaaggagtatgcgagccgcgagaaataacccggtatcattcgaggcaaaagccacctgaaacgtgagggtcccgacctattggccgggaccctcacgctgtgccgctcgctatgagcctatttggcgaacgtcctacgcatccacgcggtagccaactgcggccacacctgcacgcattcctcgatgccgtggacaccctgccacgccgtttcggcggtgccgagcgacaggccatggccgccgctggggaacaggtgcgcctcgacactgacgccggcctgcttgcaggcgttgatgagcataagcgtgttctcatacggtacgcagtcgtcgggaacggtatgccacacgaacaccggcggcgtcttggcatcgacatgcttctcgatggacacggattcgagcgcttccgggtcggtcttgcgttccccgagcagcgaatcaaagctgccgcggtgcgcgagcgggccggacgtgatcaccgggtaggcgagcatcaggccgttcggacgcaccgcatccggatcgtagccgtgcgccgcgatcacatcgtcactggcggaagtggcgagatttgcggcgagatggccgcccgcggaaaaaccgatcacggcgatggcgttcgtgtcgacatgccattcggcggcgtgttcgcgaatctgcttcatcgcttcggccgcttccaacagcgcaaccggaaagacggacggtttcacggaatatcgcaggacgaaagcgttgtagccggttgcaagaaactgcatcgcaatcggctcggcctcacggtcggacgtcatctcgtatccgccgccgggaatcaccagcacggacgggcgcgcgtaatccgggatgacttcttcgctgttgtcaaggcaatatccgacgaacttggcggcggtgccgtcaatgccggaaatctcatgttcgaaatactgcatggatccatcctattcgtaaagtcaattcataagggggcgcatgggcgacgtgatgtcgtccatgcgccccgtttcagtcgtttggcagctacttgactgccgttcggccatcagaaggtgacggccacctcgaccaacttggtgtcgttggtcgggaccggcacgacgttgcctgcaagctgctcgccattgacgctcactgtgcgctcgccggtgcgcttcatggcaattcggtaggttacgccacggaacacacgggtcacggtcaggtcggtgaactgttccggaagatgcggctcgatggccagaccgtcaagcgtcgggcgcacgcccagcagatactgggacacgtccacgaacgtccaggctgcggtgccggtcagccaggagttcttgccttcgcccggggtcggagcctccgggccggccaccatctggcagtagacgtacggctccaccttgcgaatgtcggacttgtcttccacgtaggccgggcagttgcgctggtagaccgcgaaggcctcctcgttgttgtcggccagcgcattggcgatggagatccacgggttgttatggcagaagatgccgccgttctccttatagccgcgcggataggacgagatctcgcccagctcgatgcggtaggtggaataggccggggcaaggatggcggtaccccaatcgcaggtcagcttgtccttcacggacttcagggcctgctgggccttgccgtcatcgaggccgatgccggccatcacgcacatgccctgcggttcgatgtagatctgaccctcggtgtcttcgtgcgtgccgaccttgcgcgaataggcgtcgtaggcgcgcacgaaccattcgccgtcccatccggcggttttgaccgcttcggagatctggccgatttcggcacgcacattggccgcctcggcggcgatttcggcatcggtcatgccggtgagctgaccgtaatgttcgatgatgtcggcatactggccgccatacagcacgaacatgccaccgatgaacacggattcggcaacgccggtgtcgttgttctccacggtctggaagctctcgcccggagtgtcggagaagcagttgaggttcaggcagtcgttccagtcggcgcggccgatcagcgggatgccgtgcggtcccttgtgcgtgatggtgaagttcacggagcggcgcaggtgctcgagcagcggcacttcggagccttcgacgttgttgaacggcacgggctcggtcaggatcgatgcgtcgccggtctcggcgaggtacgcattcacgccggccacgagccacagcggatcatcgttgaagccaccgccgatgtcggcattgcccttcttggtgagcggctgatactggtgccacgcggaaccatcctccatctgggtggaggcgatgtcgatgatgcgctgacgcgcacggcccggaatcaggtgcacgaagccgagcagatcctggttggaatcgcggaagcccatgccgcggcccatgccggactcgtagtaggaggcggaacgggacatgttgaaggtgaccatgcactggtactggtgccagatgttgaccatgcggtcgagcttctcgtcgccggattccacgctgtaggtggtcagcagttcggtccagtaggtgttgagctccttcagggctgcctctacctgctcgacggtggcgaagcggcggaacagctcatgcgccggcttcttgttgatgatgcctaccttggccggatcgttcggattctcccacttgtcttccttggcgacttcgatgtagcccagcacgaatacgagcgacttggtctcgcccggcttgagctcgaggtgtacgcggtcggcggcgatcgggaaccagccgtgggccacggaatcgtgggcctggccttcggcgatgacctgcggagtgtcccaaccattgaacttgccgaggaactcgtcacggctcgtgtcgaagccgacgacgggggagttgacggcaaagaacgcataatggttgcgacgttccttgaattcggtcttgtggtagatcagggtggcgtcatcctgcttctcgatctccacttcgccggtggacaggttgcgctggaagttggaggagtcgtcgactgcgttccacaggcaccattccacggaaccggtcacgtcgagcacgaccggtgcgtcggtggtgttggtcacgtcgagacggttgacttcggcattggtcttcagcggcacgaacgcggtgagcttggattcgatgccgtgcttggcggcttcgaacacggtgtagctgatgccctgacggcacttataggagtcgagcggcgtcttgcatggcaggaaggttggcgaccacgtgtcgatcggcttggcgttgacggcgttggagtccatgaggctcagatagtagttgcgcgcgccgttgtcgccgggcacgttgttgtaacggtagcgggtgatgcggcgcagtttggcgtccttgtagaaggagtagccgccgccggtattggagatcagtgagaagaagttctcgttgccgaggtagttgatccatggcagcggggttgccggagtttcgattacatactcgcgggcggaatcatcgaagtggccgtacttcatgggaatcctttcagactgcttcgttgcggcttctggctgcgggcgtgggtatacgtggggcggcgttgcgtgcggcgacggtcagtgttcgttggttattgcgtttccccataaggataccacgttatttataactttataaataattggttcgaccgtgttgcgtgggctcgttccgacctcattccgtgtgttctgggaaaagccgaatcgtaggaaaggggaatccgaatcccataggggcgaaaatccgaatcgccggcatggcggaggcaggcacgggcggacgccggtagagtaggggtaaaagacatggagtgacacgaaggagcgctggtatggccgaagacggcaccatcataaagtcaaagccggtggatgacgatctcaatgccaagactcgcgctgtttgacgcattgcaccgcgcaacgggcgaattcgccatgttaggccattagaatgaagctagcaacgtaattggcgagcataccgactccgatgtgcatgcggtgaccggctcctacccggctgtgtggggcaacgacttgggcggcgtggagctggaccggaaccgccacctcgacggattcggagccgaagccatccgaaacgaaatgcttcgagccttcaacatgggcgccgtcaacacgctcagctagcattccgccaacccgctcgccctcggcggttacggccataacgtggccgaggaccccgtcgaagcggtgctgctcggcggtgaagcgcatgagaagttcctcggctggctcgaccgcattgccgccgcgctcaccaccatcacggacacgaacggccaaccgattcccatcgtcttccgcccgttccatgagcataccggcgactggttctggtggtgtaccggttctcccgcgcgcccgaccgacaccacgcccgaacagttcgtcgaactgtggcgcatgaccatcgaatacctgcgtgacgtcaagcatgtgcacaatgtgctctacgcctactcgcccgaccgtagccgcatcgatatgagcacgccggaatcgttggagaccggttatctgtatgcctatcccggagatgactatgtcgacgtgctcggcttcgacgattactgggacatcgcgcccgccgagaaaagcgcggaggatccgcaggcccgccatgccgatctgattgcgatgcttgcattggtcggtcgcctcggcaaggagcgcggcaagctggccgcggccacggaagtcggttctccgggaatattcgccgactcgtacgtctgcgattcccacgatctcaccatcatcggcgctaatgatgacgctgcggccgaagatggttcagcgttgtcggattcgccatggacgaagtatctgctgaccgccgcgctcgccaacggatacacccgccgcgcactgtggtacttgccgtggcgcaatgatccgaatgccgccggcaccggaacatacggcacgcccgttgccggttcgcggtatgccgacgatttcagacgattcgtccgtcacgacttcatgcgtctcgccgacgcccttccgcctctgtataggtgatcggcttgccgcgtagggtcccatatgtggtcagattcatgatctgaaccacatatgggacagccagaattcgtaaggcaccggtatcgccgtccagatcgggtagaagaaggccgaaaccagtatgattaacataaggccctcaagcacataacagattgcaagcacgatccacggcagaatcacaatcgaatagaacgtgaacgtcgcacgattcagatactgcgcccacggcagccaaccgcccaaaaagccggccaaaaccgcccaaattcgccaatagccaccatcttcgcggggtgccgccacgaatacgcccgcgcaccaggccggcgatggcgatgatgatcgccgtcaccgtgccgcccaccagatcagcggattgccgagcgatgtgatcgctgccacgcattgcgaatccggcgccaacgaacacagtcccggatgtccagacagcttctcccaataaaagccggtcggccttacctgcaacggccaggtaagcggattcgtcttgtagtcgtgtggcgcgtcaagcgtggtgtggaatcgccacatctgcgcatggtaggccacaaaggaacgcaacgattccggctgccaggtcacgccctcgccgggatgattcgtggcccaatcgtgcatatacgagtcggcatgcaggaaccagttgagccatccgcccaaataagtgagcgcgtagatcggcaccatgtagcaagccgccacgagcccatccttcaccaaaccggtcgtgaaccatgcgcggtagccgatccgccggtgctcccacgcatcccacggcatcgagatcacgcagaacacagcgaacagatatgtgaccgaccacttcacaccggtcgccatgccaagcaggaaagccgcatctacgcggtatcacgacaaggcgatcatcggtccacgccgttgcagtatcaagccgcgccttcccgtcttgaaacgtgctgtacgggaggtcgcatcaatcgcatattgccgtcgcagccgtgcacgggcccaatcgcgatgcatcaacatcagcgaaaacgctcccaaggcgaacaccatgatgaaattgtcgagcaggccggcaatcagcgcgatcggcagattgtggaacaggcacaaggccacgcgggtgatcagcgcgatggcgacgacaccggcaacggcaacgctcgcacgccaggcggcgggattgtcggcgccgccgaacagtttcagcccggccgcgatcatccacttgccgaccggcggatgcaccacatattcggccgtattaagccaacggtcggtgtcgccggctgcgaacagtcggtcgatttcgacatccacgccgtcgatggtcaccagtttcggccaatcgcgcgcctcgccggtgttcagcatggttcacgcgtctttgacgtaatacgtttcgtcgaataccaccgcgcgaggggagccaagtctcacaaagcgcaggattccgccgaaagcggccacaagaatcgtcatcaaccatgcgaaaggcctaggggcggtccaacgtggttcgggagtgccgagcgcatcggagccatcacgttgatgccgccgtcgtcgaagtgcggcgtatcgcgcattcgccttgaccgtctgtatactcatagtcgtctcatttcgcccgcaagacatgcccttggatacacagtaggagatactggaagatatggagagcatacaagcgcaatcaatacaggagccaaccgaattcacggacgggacggatgacggcggccggattaccgccgccggtgcgctcgatgcgttggtggacggcgtcggcattccgcaaggcacggtcgtgctggcggccacgccgatcggcaatactgccgacgcgtccacacgcctcattgcactgctggagcgcgccgacatcgtcgcagccgaagacacccgccgtctctatgcgctcgccaaccgtctcggcgtgcatgtgaacggtcgcgtggtggcctaccacgatcataatgagcgagacaagtccgatggcctgcttgatcaggtggaaaccggtgcgaccgtgctggtcgtgtccgacgcgggcatgccgaccatcaacgatccgggcttggcgatcgtgcgtcgcgccatcgaacgcggcctgcccgtcacctgcgctcccggcccgtccgccgtactggacgcgctgtgcctgtcaggcctgccgaccgaccgtttctgttatgaaggattcctgccgcgcaagcattccgaacgcgtgcaatacttgcgcacgttgcgttcggagcgccgcaccattgtgttttacgagacgctgcatcgcatcgacgagtccatggccgacctgcttgacgtgttcggtccgaaccgcaagatggcgctttgccgcgaacttaccaaggatttcgagcagattcgccgcggaaccatcgcacagattcgccaaagcgtgatcgacgaacctccgcgcggtgaaatggtgttggtcgtcgccggtgcttccgaagaggaggccgatgccgcggctcccgcgtcgctgagcatagaagacttggcggtattgtcgatcgaccgtgcgcgggaagacaatctgcgcatcaaagacgcgatttcgcaagtcgttgccgagcacccccttgcggacggctcgttcgccaatcgcaagcaggtctacaacacggttcttgccatgaaagagtaggattttcgcattgtctgacgtttggcaatcgcttgccgcgcgcttacccgctgcatacttgcgattgcgttattgcgttgcaatcacttgcggtcatgctactttagccatcatgtgcaatcgcatctaatgcgcgcgattccaacgattcaagcagtatttgcagggagcgtgccacatctggcccgccgacttgcgcaagatattccagcatcgcaggtgttgcggaaggattggcgatcagccatttgcgcagttgaggcgcgtactccgcgatatgccagagcacgttctgtggagtgccgggactgcatgccaccagcggcgtcaacggaatcgggggagacggtggttcgatcagcggtttcgggcgcggcttgggctggtatggcggcggttcgcggcgcgtgcgatacgcatggcgatgtgtgcgattccgtgcatgccgtcgtgttgcccggtgcgctttgcggcgttcacccggcttgcgttttttgcggattccgaacggcccgcgggatctgccggtgtcgtccgattggtgcgggcctcccaagccacgttcgcgcgctttgctccagcggtgctcatgtgctttgcgcctgccgtgtgccttatgcctgctatgcgccacgcacatattcggcatccttacggttcttacggtcttcgcaatccttacgtttcccgtgttcgtaacccctgccgtcaatcgcaagaatgtgattccgtgcctgtggagcgttgcgaatatgcttcgtgtcttccatgatttgcatgcaatcgttggaacgaaaatgaaattcctgcataagcatgcagatgatttcagaaaccttcgattccgtttcggggacgcagttcagcgccagatcgcatgcggtgcgaacgggtgtggtcacggtgattgggccgaccttaatggtgtgctcagatggtgcggcgcggttgaaaacgttgatttttcgcccgtatcgcagcgttctgtagtgggctttcgcgatgatgtctatggagtcggggaacgcgcctcccagccagacccatgcggcggtgcgcgcacatgccacggaacggcttggcaatagtgtcgcgataatgcatgcccgcccgtacaacgtgtccgaatcatggcttgagtaggcgttcgcgttgtcgagcttgcacagcgcgccggatgaggccaacaggttcaggcacatcggtcccggaaggtcgtcgttgcccagaaggggtggtgaagtgtccatggcggtacagtagcggattcgattccttcctcgccactttccccgaaaatctgtggatatgtggaaaatgattgtcgcgcaatgcaacaatgtgaataaatcgacagatattcaaacaatcgaaatcaacgatcgcgcgccagccttccaataaaaatccgactaccgaaatacattgaaaatgcgggatatggcggtttgtataatcaggcaccatgagtcatattttggtgaatgttgcttggccgtatgctaacggcccccgtcatatcggtcacgtcgccggcttcggc

SEQ ID NO: 241 - DNA, 11151 bp, Unknown
  R101_18m  MAG No. k141_43709
gccagcgtctcatgggcgatcagatcgcggaactgctcgacatcggccacattggcggccggcacggtcagcaccagcgagatacggtccgcgatgtccagatcggcagccttacgtgcgtcctgcacagaacgaatcacgtcgcgggcgtagccttcggccagcagatcggcatccagcgcggtgtcgaggatcacgaagccaccggtcggcagagcggcggagaccgaagcggcggcctcggtggcgttctcctcctccacgcggttgatcagctcgtactcgccttcgaccagcgcaaggtcgccggacggcgtggagaccaccggcgcaccggacgcagcatcgacatgccagtcgccggacttggaggccttgatggcgaactgcacctgcttgccgaggcgcggacccgccgcacgggcattcacacgcagctcgtgcacgatcttcagaccgtgggcggaggcgtcctccagagtcgagaactcgatattcttgatattaagttcggacttcagcagatcgtcgtacgccttgacggcgtccacgttcccggccaccacggtgagcttggaaagcggctggcgcacgcggatcttggcggccttgcgcagggacagggtgccggagacgacctcacgcaccttctccatcgcgtccaccagagccggatcgtcgaccagcacgcggccgagttcggtgtcttcaccggtcttctcgtccaccacgaacggccaatcggccaggtgcacggattcaccgccggtcagaccacgccacacggactcggcttccatcggggccagcggcgcaagcacgcgcatgaacgcctcaagcacggtgtacagcgtgttgaacgcggaagcgtcctcattccagaaacggtcacgggtgttgcggatataccagttggtgagcacgtcgatgaagtcggagaccgcatcgcaggcgtcggagattgcgaactcgttcagcgacttctcggcggccagcaccagacgacgggtacgggccagcaggtagcggtccatctccggcaggccggcgacctcgtccgcgcgcagctggcgagcgtcgaatccggccccaccgttggccgcgttggcgtacagggtgaagaagtagtaggagctccacaccggcagcatgacctggcgcacggtgtcgcgaatgccttcggcggtgacgatcaggttgccgccacgcaggatcggcgaagacatgaggaaccagcgcatggcgtcggaaccgtacttgtcgaacacgccgttcacgtccgggtagttgcgcaggtgcttggacatcttctggccgtcggagccgagcacgatgccgtggcagatcacgttcttgaacgccgggcggtcgaacagggcggtcgccatcacgtgcagcaggtagaaccagccgcgggtctggccgatgtattccacgatgtagtcggccgggaagtgctgttcgaacttttccttgttctcgaacgggtagtggaactgcgcgaacgacatggaaccggactcgaaccagcagtcgagcacatcggaaatacggtgcatgtgcgacttgccggtcgggtcgtccgggttgacgcggaccaggttgtcgatccacggacggtgcatgttgatgttgccgtccttgtcgcgcggatagtcgccgaagtcggccttgagctcttcgagcgaaccgtagacgtccacacgcgggtacttcggatcgtcgctcacccacaccgggatcggggaaccccagaagcggttgcgggagatggaccagtcgcgcgcgttggcgagccacttgccgaactgaccgtccttgacattgcccgggatccagttgatctgctggttcaattccagtagacgcggcttgatcttggtcacggacacgaaccaggaggagaccggcttgtagatcagcggggtggcgcagcgccagcagtgcgggtaggagtgcacgtagctcttctcctggaagaggatcgcgcggcgctcttccggaatctcggcgagcgggccgtcgccggcgcgcaggttgcgcaggatcggcaggttggcgtcgaacacgaaatcgccctcgtagtcagggcactgcgcggtgaagcggcagccatcgtcgagcacgtcggtgctcttgatgtcgtgcgcgttcagcgtattcatatcgtcctcaccgtagggagcctggtgaaccaggccggtaccttcgacggtgtcgacgtagtcggcggtgaagatcgtgtagccgttcgggccgggcacgtggccttcggattcggcctcgtcacccgcgaagtacgggaagaccgggtagtagcgtcggcctgccagctcgttgcccttgagttcgcgcacgacctcgtaattctcgccgagttccttctcatagtgcggcagcaaatccttgccgaggtagaacttcttgccagcgaacttgccttcggtcgggcggacctcgacgtagtcgatgtcggcgccgaccacgatggcgaagttggtgggcacggtccacggggtggtggtccagaagacggcgtaggcgtcgtcctcatcgcgcatcttgacggccacggatacggtggtgtcctggcggtcctggtacacgtcggcgtccatgcgcagctcgtgcgcactcaacggcgtgcggtccttcgggcagtacggcagcacgcggtagccctggtaggccaggcccttgtcgtagagctgcttgaaggcccacatcacggattccatgtacgggatgttcagggtcttgtagccgtgctcgaagtccacccaacgggcctgacgatgcacgtagttctgccattcgttggtgtacttcagcacagaagcgcggcaggcgtcgttgaacttgtcgatgcccatcttctcgatctggtcgaccgagtcgatgccgagctccttctgcgcctcaagctcggcgggcaggccgtgggtgtcccagccgaacacgcggttgaccttgcggcccttcatggtctggtagcgcgggatcacgtccttggcgtagccggtcagcaggtggccgtagtgcggcaggccattggcgaacggcgggccatcgaagaacacgaattcgttctggctgtggtcgccggaagggttgcgttcaacggactgctggaaggtgtcgtccttgtcccagtagtcgagaacggtctcctccatgtcggggaagctggggttcggcgcgacgtgcgcggtctcgccgccctcgctcgccttgggatatacgttttcgctcaccgtaaatctcctgttagtactgtgcactggtcctacaggagcgtcattgatggcgattgccgggcgccgacgtgtgccggctggtttcacgaatgtcacgtaccgaaccgtgggccgattagtcaatcgcctcgcagccggaaccgactgtgttccgcccggaacagccatgtctgccgttcctgcctacgaggacgatgacgagcgctggtatgcgctccgcaccgcggtaccacctcgcttatcgcaccggttgcgccgctccgaactgttgcactcggagccgcgagcctgcgcgaccgcttgtgttcggctgtctcgggccgatcccgtcggttctactgggcgattgccgccgttcttccgaagactccccgctgataacggatcactgcctcacaacggtgcatattctaacacgccacgcggtcaaatcgccgcccacggccacggcaccgtcaggagcccgatttagattgggaccggccaccacggaccgagaaaggattgtcggacaatgacgtatgatttcacgtccatcatgaacaggcatggcatggattcgatcgcggtcgacggactgggcaccgacccgggattcgcgccggacccgccacgcgagggtttcgacgtcatccccatgtgggtggcggacatgaacttcccgaccgtgcccacgattccgcaggccatcatcgaacgggcgaagcatcccgcctacgggtacttctcccccaccgacgactattacagctccatcatcgactggcagtccacgcgcaacggggtcaccggattgacccgggaggcgatcggctacgagaacggggtcctgggcggtgtgatcagtgcgctgaccgcgttcgccgcccccggcgacggcgtgctgctgcacagcccgacctacatcgggttcacccggagcatcgaaaacaacggctaccgcatcgtccacagtccgctcacgctggacgagcgcggcgtatggcgcatggattacgaggatatggacaggaagctcaaggagcatcacatccacgtggccgtgttctgcagccctcacaatccttgcgggcgcgtgtgggaacgttgggaaatcgagaaggccatggaagtgtacaaggccaacgattgcgtggtcatttccgacgagatttggtccgatttgactctggggaaccaccagcacatccccacccaatcggtcagcgaggacgcacgcaacaggaccgtggcgttctacgcgcccagcaagaccttcaatctcgccggactggtgggaagctaccacatcatctacaatcccacactccgggaccgcatcgtggccaaaagctcgaaatgccactacaacgacatgaacgtgctttccatgcacgcgctgatcggcgcctaccggcccgaaggccatgagtggctcgacgaactgaaggcggtgctcaccggcaacgtcgattacgcctacgactacatcaccaagcatttccaaggagtgagtttggccaaaccggaaggcacctacatgctgctgctcgactgcgagcagtggtgcgaacgccacggcctgagcctgcccgagttggagaaacgcggctgggatgtgggcgtcgcatggcaggacggcagcatgttccaggccccctacagcatccgcgtcaatctcgcattgcccttgagccgcgtcaaggaggccatgcgccgccttgaccaatacgtattcaacgcgtaaacggcatgcatccgcgattgcggtgtcctggaaagacgaatgccgtcaacgaggttggtgtccgttggcggcattcgtcatacgttggccgaaccgggcgaaacccaagttgccgtgcgctatgaggtggatgccgccagcggacgtgtacatctgaccgcccgatatgccggtgccaccgatgcgccgacgctgccggcattcggattggaatggacacttcccaagcagtacgagaacctgcgcttctacggccttggccccgaggaaacctatcacgaccgtctgcacggtggcaagctcggcattttcgagcgcaccgcggccgaagacaatgcaccgtatctggtgccgcaggagaccggcaaccatgaagactggcgttgggccgaagtgcttgacgcccaaggacacggcatgcgtatcagccaggccggcagcgaacatttcgcggcgagcctgttgccgtacagctcgctcatgctggaagaggcgacccaccagaacgagttgccgccggtccgtcacacgttcctgcgcctgttggccgcgcaaatgggcgtgggcggagacgattcatggggcgcgcccgtccatgagcagtaccagctgcccgccgatcgcgcctacacgctcgacgtgaatctggaactgttctaacagcgataaagaagctccctctgacgagggagcttctttatcgcacagagggagcttctttatcgtgctggtacgaaactgtcacgcaccactagggtggtggagatgaaggtatggtggtgcagcgtgcgccgactggagatggcctcggcaagcatcgtaatcgcagtatcggccagctcattctggtcgatatcgtaactggtcaatgtcggcgaagtgtactgggcgatggcctggttattgatactgatcacactggtatcgcgaggcaccagcactcccgcagcggtaaacgcctgcagtacgccgactgcaatcgagtccgcagccacgatgaacgcatccggcatgtcatctcgatgatcgttagccgctttctcccctagagtgcgcccggtgtccacagtgaacgcgccttgcgcgtaaatcaggccttccgcatccagccccaaacgctcggtccaattgcggaatgcggttaatcggccgtcttccggatattcgtgcaaacccatcgtgaagccagtaccgccgatatagccgatgcgtcgtttgcccgaggacaccaacatatccaatgcgtccaaaatggtttggcttaaatccggttgtaccgaatcgaacaggctgggcgcaggattggtgtcgatgaatacgccatagggcaataccagatggagcttcaacagtctatccgaagagagtacggacggtccgatggagatgaagccgtcgaaatcaccggcgtcggcaatcagatcgtcgatatgggaaaacgacgtgagttccatgtgctgggctctggcattgtcgccgagcacggaccgtagttcatcgaaataggcgtccgccagttcttcctcgcgggtggcgttgtcgagtacggccacacggcgtggcaatgcgatacggcgtgatccggtagcgtagccaagctgctcgctgacctcgatgatgcgacgtcgcgtctcctctttgacagacaatgtcgggtccccattgagcagccgggataccgtggcctgcgagaagcctgatttctgtgcgatttccttcatcgtgaccatagttgagccttccacgcctcagtacgtaacaatacgcagtatttcagtaaataactttactacatagtgtaacttacgtcatgcgggtatgacgccgtatggttgcagcatcgtcgatccgcagcgctgatgagaacgtgcatgtttcaggccctccgataattatcgggcaggcgggaatccccagaccgtggagtcaatgcgctggattttcccggacttgtcaaagacaacggtgatgtccggcgcagtaaaactgccggtcgaatccccgaatcggtacggattactccggtcgataacggcatgcatcgtcacggtccgagttttcgcgtcataggactcattcgagtactcgatactgttatgcgtggccgtagtcccgcccagaccgccgccattgccttgatgcatttgctgacaatacttcgtaaaatccgcgccgagaacattcgacactgcatagcgcctaaatgaacgtgttaggtctgcaccaattcacggccggcaatactccacacttctcagtaatcaattcgtaccaaaccgctcacgaatctgagcagcagtaccataagaggcttgcgcaccgaccccagtcgcggcgtacgcggaaacgtacgaggccaactgcgcactgtccgccaacgcatgacccgaggcaagtccggccagaaccgtgcccataaaggcatctccgcacccggtagtgtcgatggccgcaaccgcaactggcgcaatacgatagatatcatcaccatcgatgaccaccgacccatcccctccaagcgtagttaccgcctgattaaagccgaagtcatgcatctgccgcgtctacggtgatgaccgtggtcccgctggccccatccacgtgccgaatataactggtgtccacaccggtatcgttcaatgcttcaagcaaaaaatccgcattagcgtcggaaccgagcacaccaagcaatcggactttggctccaagacgagcggccgaaacagcctgattccccgacttgccaccaggaagcacccgcaacggccctcctagcactgtctcccccggtttgggcagacgctcggtggtgacggtataatcggcattcatcgagccaacgacggacacggccccatgaatgcaatcaagagaaacaagcgtttcatccatagccggcatgatattccctttctgaatgatagatgctgctggtgcggtagtctgttcgatcaacatgctccgcaccagcaggcgcaatcagacattgcgttttgccgtaaaacttttgcgaaatacgaacagtacaatcatcgacaacaccgaaaccgcacacataatccagaacatgttggaggtctgcgcttccacaccactgccaacaccgaacagaccacccttgcccatggtgtcactggccatgagactggagtatacgccgactccgatagaggccgaagtgttcatcatcagatcgagaattcctacgccacgaccattctcctcgaccggcaacgcatctgacgcagcgtcgtagattggcgtatatacagcggtaacaccagcaatgaacaagcaggcaagaaaagtcagcactccgaacccactcttaatgaatatggcagatcctgcgaagccgacaatcatgagcacgatagcgataaccagtgtgcgcatgcgtccgagtctgttgattactggaccagaaacgcatccaacaattgtggccacaatgtagaccaatgttagacacagcgaaaccgtggtcaacggcacgttgtagatctgctcaccaatcacgttgtaaatcggcacacaagcaaagttgaagaagtacagcacaaattgcagcagcagaatggacatatacgcaccattggtcacgaaagaacgacccaggaacggattcttgcctttccaaatccacagcacaaacagtacagcgaatacaatcgaggcaataatcatgccgactccggggaacgagaagcaaatggcaatgagcgcagcaaataccgccaatattcgcaatcctgcgccaacacacggctttcaacatagaaaaccgcgcccccaactaccggataagaattacttcaacccgataatcgaggtgcggtttttgcaggcgtaccgactactccagctccaccgcgccggtgtagagctgatagtactcgcccttttgcgcgatcagctcgtcatgcgagccacgctcgatgatgttgccgtggtcgagcaccatgatcacgtcggagttgcgtacggtggacagacgatgggcgatgacgaagaccgtacggcccttcatcaggttatccatgccggcctgcacgacttcctcggtacgggtatcgatggaagacgtggcctcatcgagaatcagcgcgggcggatcggccaccgcggcgcgggcgatggaaatcagctggcgctgaccttgggacaggccggagccgtcgccctcgagcactgtctggtagccttcgggcagcatacggatgaagctgtccgcgttgaccagcttggcggcttcgatgcattcctcatcagtggcgttcaggcggccgtaacggatgttgtccatcacggtgccggtgaacaggttcacgtcctgcagcacgatgcccaaagacctgcgcaggtcaggcttcttgatgccggccacggagatgccatcatacagaatctgaccgtgctgaatgtcgtagaaccggttgatgaggttggtcacggtggtcttgccggcaccggtggcgccgacgagcgcgatcttctggccgggcttggcgaaccaggtgatgtcgtgcagcaccggcttgtccgggttgtagccgaaggtcacgttggtgaagcgcacgtcgccgcgcagcagcgtataacgcccatcaggcgaggtgatcgcctgctccttggccttcatcgccacctcgcaggcggaaccgcgcagcttttcggcggccttcagagacctcgtaccatcgtcgccgatctcacgcttccacgcccagtggccggtctcatggtcgacttcggtcatggtgcggccgtccggcccaagttccacgttcacgagcgtcacggtgcccttgtcttcctcgatgggttcgtccatcaacttgaagatgcgggaggcgccggcgagcgccatcatcaccatggtcagctgctgggagacctggccgatcgggttgatgaacgagcgggacaaggtcagcagggagacgagcgtgccgagggtgagcggcttgacaccggtcagaccgatgtcattgacgccggccagcgaaacggcggcaccgacgatggcgagcaggatgtagagcagatagcccatattgccgacgaccggcatggtcacattgccccaagtgttcgcctcggcggacgcctcaaagagttcctcgttcttctcatcgaaggtcttctgagtggcatcctcatggttgaagaccttgatgaccttctgaccattgacggactcctccacgaaggcgttcacgtcgccgatccactgctgctgcttgacgaagtagcggccggaacggctcacgatcttgcgcacgatgaaatacagcagaacggtgaacacaatcacgaacgcagtgaacgggattgacagccacagcatggacagcaatgccgcaatcgcggagataatcgaggagaacatctgcgggaacgactgcgagatggcctggcgcagcgtatcggtgtcgttggtgtagtggctcatgatgtcgccgtgctcgtggctgtcgaagtagcggatcggcagcttctgttggtgggcgaacatatcgtcacgaatcttcttgagcgtgccctgttcaacggtgatgatcagccactgccaagcccaggatgccacgataccggccacatacaggcagcccatcagactgatggcgcgcagcaacggagcccagtcggggttcgattcccccaccatcggcaggatgtaggtgtcaatcagcgattggaggaacagcgcggatccggcctgcgcggcggcaccgatcaggatgcacaccacgatggcgataacgcgcaatttgtattggaagatgtagctgaagatgcgcttgatggttccggggtcggctttgcccatgtcaggctcgcgattcttgaaactctggtcgttactcatcgtgcttctccttccttggtatcggctgcattggtatcagctgcgctggtatcggccgtgggcatggtcactgtcaccgtcacggtttcggacggctcagcggtagatgactcagcagcctgtccggcagcggccagttctccggtcttagcctggttcttggtctgggattcgtaaatggaacggtattcgtcgcaagtggtgagcagttcctcgtgcgtgccggaggccatgatacggccggaatccatgacaagaatcatgtcggattcctgcacggaggccacgcgctgggc

SEQ ID NO: 242 - DNA, 3803 bp, Unknown
  R101_18m  MAG No. k141_43739
gcccgcggcgacgccggagacggtgcacaggatgaggtagatgaatcctgcctgttggctttgcgagagctcttccttgtccaccttcttgcgcagcgacttgagcgccagcacctgggtgacggacagcgcgtccacgtatggggagcggatgcggatggcctggccgagcacgtggcggtgctgcaacggccacttgtcgcccacgatggccagaacccacttgcgggtgagctccatctcgttgagcaccttctcattgaggtcctcgcggtcgccgagggcgaggtacatcctggcgatgcgctcatccgtcttggcgatggacatctcgatgttgtcgatgaaggtggagaacagcggccattcctcgtaagcctgacgcatggtctccagatcgccgaacttctcgcatgcagtgccgagaccgtaccaagcggccaggttgatgcgggcctgggcccaggagaagatccacggactcgtacgcaggtcgtcgagcgacttggcgccgaggccacgcttggccgggcgggagccgatcggcagcaggccgatttcggtcagcggcgtaacgatcgagaaccacggggcaaagccgtcggtgttcaacaggtcgaggaagcggttgtgcgcggcctcgtcgagctgagcggccatgtcggcatacttctcggtcatctcggtgttgcgcttctccacactcggcgcggactgcagcaaggtcgccgcagccacggattcgacgtggcggatggccagcaccgggttgccgtaacgggcgaagatgacctcgccctgctcggtgagcttgaagcggcacttgacggaaccgaccggctgggcgagcaccgcgcggttggcggggccgccaccacgaccgacggcaccgccgcggccatggaacagggtcaggtcgatgtcgtgcgactcagcccatttggcgatgcgctcctgagcggagtgcagggccagcgtggcggaggtcgggccggcgtccttcgaggagtcggagtaaccgagcatgacctcgagcttgttgccggtggccttcagacgagcctgaacctcggggatcttgatcatttcctcgagcacgtccaccgagttctgcagatcctcaagctgctcgaacagcgggatcacgtcgatggtgggcacgtcctccgggtgggagaaggccaagcggttgagctcgtagacatccttgatgttctgggcgctcttggtgaaggagatgatgtagcggcgggcggccttgaggccgttgcgcttctggatggcaccgagagcgcggaaggtgtcgagcacctcgtgcgtcatcggctgcagttcgccgcgctcgccgtgcagaccgtgctcgcggatatccgcaagggcgcgggcatgcaccacggagtgctgacggaactccatctccaccatgtggaagccgaaggtctcggtctgccagatcagatcctgcagcgggccgtaagcggaacgcttggcgccggcggcggccagcgaacgctggaccaccttgaggtcggcgaggaagtcgtcgcaggagtggtacatgaggtcggcatcgcgctcgatggtgtagtgcagacggtcggccatcaccagcatgaccgcgcggtgcatctccttggtggagatcagggcggccttgtcggtcagacgctcgctcatttccttctggtggctccagaggctcttgagctcggcgctcggcggcgtggtctcggcttccatcgtgaggttgcggcccacggtgcgggtggcttcctcaagggcggcgattacgtgatcggagaacttgcgggccacggcgcggctcaccttggcggtgacgttcgggttaccgtcgcggtcggagccgatccagctgcccgggtggaagaacgcggggcaagcgggctcgacgagaccggccttatcgcccaggacccagtcatcgaagcgacggtagaccttggggatggtgttgaacagcgtgttgtcgaagatgtcgagaatcgtgtccgcttcctcaaccggggtcggcttcttcagcgcgatcggagaggtgcggaacagggcgtcgatctcgttgtagagacggcgcaggcattccttcttatccgagccgccgaggcgcttgtactcctcaagcaattcggaaacgcggcggatcttgccttccacggccttacgacgggcctcagtggggtgcgccgtgaagacggggtggaattcgagctggttgagcagttccttggccttggccgggccagtctcattgatgagctggtggtaggcgacggtgagctcgttgatcggatcgaccgcctggtcaacgggcacgttgttctcgcgctcgtggagcacggaaacgcggtagttctcctcggacaggtttgccagatggaaatacgtggcgaatgcgcgggccagcagctgggcgtcgtgcaacgtcatgttgtcgatgacgttcacggcctccttcaggccatcctggtcggggttcggatccttcagctcggcgaaatgctcggcgctggcctccaccgcgtaatgacgcacggtgtcgaacgtagacagcagttcggggttgtattcgcccagtacgttacgcaggatctcaagacacagatccatgtcgtacttcaggctttcgggaagatcatgctcctccgggccctttcggccggtcccggtagtgacgatggcggcgtcagcgggagtgatctgttcttcaggtgttgccatataacctcctttgccgaataacaggttgctcggtctaccggtcgtctgcggctcctccgcagttgttgaggccagtcgttgcgagcccacagcccatattcaacgtggttgttgtgtgggcaatagtgtatccccgcgaaatcgctatttgcgttacggagtccatatagtgcgccaagttgtccacctatagagaccgaatatcggacagcatatgagacactgtccgattcgcggaagatttgagcgccttacgattgccggcgggggaggcagggagtagtaatgagggatgtgagcgaacagaagaaaaaaagtgcgcccgaagcgaaaggcgcaacggctgtacgtaaattccacacccactccattccgctggacatggaagatattgcacgcgattgggaaaaaccggtggtggacgccggtatcgccgccaaagccagcgtgattgtacgagtcggcatgttggacctgggagccggcaccggctccttccgcgtgcgtgaaatgatgcaccgcatcgcctacccgctgggcgtgcacgtacgcgccgacgtgaacctgacggatatcgaggccacctgcacggatggtcgtaaccgcatcaccgaagtcgtggatttgccgagtaccggcgtgaacaccgaacgtatctggctgctggaacatttcgccgactggttctccgtgaatctcggcaaggggtcgatgtatcacgtcgattcgcaactgtccgatggcgtggtcaagcatttggacgaacgtgacgcttcgcagtattcggccgatctggccaagcgcctgcgcgaacgtgccaaggtcgaggctgaggcggccaacggcagcgtggacgaggcgctggatcttgcgtcgaaaaccaaggtactcgtgacctccgtggccaagtccttggacgatgacaatgaagaagcccaccgacttttggcggacagcgcggaagtcactccggtcgaagacaaagcggccgaagagaaggcctacgacgatgccgaagtgtttaccggtgactccaatgagtcggttgaatcggcgaacgcggcgaa

SEQ ID NO: 243 - DNA, 31142 bp, Unknown
  R101_18m  MAG No. k141_43789
tcaactcccaccggctcctggtctccggccatcgtgtgagcatgcccattcccgcccccgatccgaccgatctgcatgacggccggaccgtcggcgcatgggtgtgcgggtcggtgctcctgtgcggttggggcggcattgcggcggtccgtcggcgcaagcgcgcgccggaagggccaccgcgccatgccgtgcgggtgtgattggatcaaggtccggcatggcgatgccagccgttgcggacggattcggggtgcgacgcaggaggttcgcctggtccggagaaaacagtctacgcggcgggaaccgttcacgtcgaaatcacctgcacggcctggagtacccgcaattcgggaaacctgtgcaaccgtagaacgtgcgtgccggtgccgaaacgttcctcggcgtcatcggacgcagcctcggcgtgtgacggcggcgacgcgtgccgccgacaccgattgcgggcggtgacgggtgcgtgacgtgtgtgacggatggtcggatggcggggtggacggaccgagcggaaccgggcggtccgtccggaaccggctagagaccgaggaaggcgcggatgtcgccgatctcctcgtcgacgatggctgacccatgccaggatactcgcggtattcgagccggccggtggcctcgagcacgcgacgcgcggtctgctggtccgcaggtggaatcgtgcggtcccgcgagccgtacaagagcaggaaacgggtgggggagtcgaaaccggtgaggtccgtcgactcctcgcccttgaacgacgggctcatcaggatcgccgcgtcgaacacgtgcggatgctcgagcaccatgcgatatgacatatagccgccctgggagaacccgacgaggatcttgcggcggcctgcgaacatgggggagtcgagcagggagacgacggcgtcgcccatgcgcgagcactcgcggcggcgaatccgaagcatcttcatatgccgctttcagcttctccatgatttctgtttcgttatacatgccgcgcacgtaatcgtgcaatagcggttgcaggaaatcacgccaaaggtcatcgaacgctttcgccgtggattcggatttggaaagattcaggaaatacgcagggccgacatggtaatccgaacccaaaccgatatcgggggaggatatggtctcattcagcttcgtcaagcggctctcggcttccttcgacaagcctccaagttcttcaagcatgtccaacccgtcttcggccttgacctcgatgaaacggaaccgtgggggcgtgcggcgacgttgcgatgggaatcggtcagcgcgggcggcctcatgctggtgagaaaggccgtgtgcgttccggcccgaacaaaggacgatgggatgggccgagaccgatgaaccgatacggaagggactacgacatggacaatacggcgcgcagggatgcgggattgccataccactacgacgacccggccatcatggacggacagctcgcatggcagaacaaactatgggaatacaaccagaccaaacccaccgaacgggagcggcgcgccgaactgctcaaagacatgtgcgccgaagtcggcgacggtgtgcacatcgaaacgccattgcatgcgagcaacggatgccgtcgcgtacacctcggcaaagtcatctacatcaacgcgttcatgagcatggtcgacgacgcggagatatggatcggcgactacacgatgttcggaccgtccgtcaccatcgccaccgccggctacccgatcttgcccatcctgcgcgaacaccacactcttgttcctatagcccagaaatcccgcgtctctttcgttgtgacgcgggatttctgccggttgggctatcggttggattgactggtatgtttcagcgaacggctttgaccagtgcctcggtgaggtacttgccggcggccatcaccagcggcgcatagcggcgtccgggggcggcacccatgcggccggtcgggccggaaatcgagatggcggcgatgacctggccggaggcgttgcggatcggggcggaaatcgagcacacgccctcttcgcgttcgttcacggactcggaccagccgcgcttgcgtacggcggccagcttggtggcggtgaacttggcgtggcgcaatccctggtgcagacggtcggaatcctcccaagccagaagaatctgggcggcggaaccggcttccatcgacagcatggcacccaccggaatggaatcacgtaggccggaggtgcgttccacagcggcgatgcacacgcgctgatcgccttggcggcggtaaatctgcgcagactcgccagtgcgatcgagcagggtctgcaggatcgggccggcggcggtcagcagacgatcctcgcctgctgcggcggcaagttcggcgaaacgggagccgagtacgaatcggccatgctggtcgcgcagtacgaaacggtggcgttccagtgcaatagccaaacgatgtgcggtcggtcgagcgagaccggtggcggccacaagctggcccagcgtagacgggccggattccagtgcgtcaagaatctttacggttttatcaaggacgccaacgccggaatggatttccccatcgtccttggcggtggtgtcttcaaccggctcggactcggtcaagctgttgttcaatggttcttcccgggaatcagtcataataagggcgattatgccatctcacatagtgaaatggcaaattggggaagtgtctcacagggtggccatgaagttgaaagggcgttcgtggatgccgaagagacatgtctggagcggaaccgagtcatgactaggtcatgttcgagtcgggtccgagtcatattgaggccatcatttgaccgtatctcaatatccggcatgctcatggccgggcccatcgcaagcacataggctaataccacgaacaaggcgcgaacacaatacctcgcgcggaattttttggaggaatcactatgggaacgacactggccgagaaggtctgggccgatcatctggtgcgcaagggcagcgacggagctcctgatttgctgtacatcgatctgatgctcatgcatgaggtcaccagcccgcaggcgtttgagggcctgcgcttggccggccgcaagccgcgtcacgtggatcagctcattgccaccgaggatcacaacacgccgaccgttgatatcgatcgcccgaacccggatgagacgagcgcgttgcagttgacgactttggagaagaactgcaaggagttcggcgtgcgcctgcacccgctgggcgatgccgatcagggcatcgtccacgcgttcgccccgattctgggcctgacccagccgggcatgaccatcgtgtgcggcgactcgcacacctcgacgcatggcgcgttcggcgcgttggcgttcggcatcggcacttccgaagtcgaacacgtgatggccacacagacgctgtctctgaagccgttcaagaccatggccgtcaacgtcaacggcaagctgcccgcggacgcgacggccaaggacatcattctggcgatcatcgccaagatcggcaccggcggcggccagggttacgtgatcgaataccgtggtgaggcgattcgcaacctcaccatggacgaacgcatgaccgtgtgcaacatgtccatcgaggccggtgcgcgtgccggcatgatcgcgccggacgagaccacgttcgagtacctgaagggccgtccgcacgcgccggaaggcgagctgtgggatcaggccgtggcgtactggaagacgctgaagaccgatgacgatgccgtattcgacaaggtggtggatattgacgccaccaagctcggtccatatgtgacgtggggcaccaaccccggccaaggtctgccgatcaccgcctccgtgccggagccgggcaagatcgccgacgccaccaagcgcgccgccgccgaacgtgcgattacatacatgggtttgaagccaggcatgccgatcaaggacatcgccgtggacaccgtgttcattggttcgtgcaccaacggtcgtatcgacgatttgcgccaggccgccgcgattatgaagggccaccgcaaggccgagaacatccaccgcgtgctggtggtgccggcctcctcccgcgtgcgtttgcaggcggagaaggaaggcctcgataaggtgttcaaggactttggcgccgaatggcgtaacgccggctgctcgatgtgcctgggcatgaacccggacaagctggtgccgaacgagcgctcgatttccacttcgaaccgtaacttcgagggccgccaaggcaagggctcgcgcacgcatctggcgtcgccggccgtagccgccgccaccgccatccgcggcacaatctcgtctcccgccgatctctgagtcaatacacgtgagccccctctgacgaggggctgtcagtcgaagactgactgggggagagatccccgaaaggaaaattgttatggaaaaactcaccacactgaccggcgtgggcgtgccgctgcgccgctccaacgtcgataccgaccagatcattcccgctgtgttcttgaagcgcgtgaccaagtccggcttcgatgacgccctgttctacgcatggcgccgagacccgaacttcgtgctcaacaagccggaatacgccggtaagggccagattctggtcgccggccccgaattcggcatcggctcctcccgcgagcacgccgtgtgggcgctgcacgattacggtttccgcgtggtcatcgcgccgagcttcgccgacatcttctacggcaacaccgccaagaacggcgtgctggccgcgattatgccgcaggagtccgtcgaactcctgtggaagctactggaggaagagcctggtcgtgagatgactgtctcgctggagacccgcaccgtcacctgcggtgatgtgaccctgccgttcgaggtcaacgattacgtgcgttggcgtttgatgaacggctacgacgatatcgatctgacgctgcagcacgaggacgacatcgccgcctacgaaaagatgcgcgccgaaaagttccccttcaagcccaagaccatccccgccaaacactgggccgaagaaagaatcgagtccgcccgcgagcctgaggacgaagactggacagggccgttggccgatcgcggcattatttagccgcgatcggcctgctgaaagcccggcgggctttcagcaggccctgtgccgagctgcgacagcagcgaggccagcattgagcctcgccgaaaggcgagtccataattgcaggcccagggccgttggctctgtgtctgattgagattattgggtcgctcgcatcgcatcaaacaaaggtctcactggtgcccgcgccccacatccattgcgcggcgggcaggagttgcggcaatattcccttcagtgccaacaacgccatacggtcgttatccaccgcagccaccaacaccggcgtggcggcgctttcctcaacactcatgaactccgtcctagcgttcgaaatactgtgcctgaattcgtacacatttgtggacataatcacgattcatccagtaatgacggttaggttgagcatcatgaccatgaatgacatgaatccgtcgaacgattccgatacggctccggcgcaatcgatgtcagcgcaaccgttgccgcctcgaccggcaccgcagtctgcggcacagtcacagacgccgatgccacagacgccacagtatgttcagcctgggccgagcatgcagccgcaatatgcgggtcagccggaggcatgggcacaaccgctacctccacaagatgtttcacggggtgttccacggattgtttcacaaggtgtttcacaacctgtgccgcaagccgcaatacctgctgtgcagcctgcacaatacgccgcgcagctcgtatacccgacatatcccgtccaacctacgtatcctgcccagccgatgtatcccacgcagccgacgtatccggcgcaatccgcctattccccatacccggcgcaacagtcggctccacagcccctcgctcatccgtactacgctcaaccagtgggctacgcgccacaaccctattccgctgcgccgcaaccattcgtgcaaacggctccggcaatgccagtcacaatgcccaacgcaatgcccaacgcaatgcctgccacgatgcccgcagcaatgcccgtggtcatgccgatcgatcctcgccgtgtatggcgcacgtggcgtcgcaaggtggtcaatcgtgtaatgggactgactctcgcctatgaaggcatgatgctcttgggcgcaatggtcgccaccattatcgtcggcgtaataaccgcgagcgatttgtccggcgtgcagtgggatggcatcatcagcctgatatcggtgttcgtcgcgttcggatttctgctgctcatgcgccaccgtgacatcttcacctgcgaattctggcttggtggccagcatcgcgactcgtacggggagcccaatcagcttggccacatcagccaatatggcggcgggcgcatgcagcctctctgggcgttgatgttcatcgtgctgggcatgggcgtgcaaggcatcgttatgttggtgcaggtcgctttttccatgctgggcaccgatcttgcctctcccacgtcagacagcatcgccgaatccagcgtcaccgtaagcatgtggctgtacgttgggctggtcgctccgatttgcgaggaagtactgttccgcggcgtactgatgaaggagctcaagccgttgggcaagaacttcgccatcgtcacctcggcaatggtgttcggcctgttccatgacgacgtagtgcaaggcacattcgcgttcctctttggcctgattctgggattcgtggccatggaatactcgttggtttggtcgattgcactgcacatcttcaacaatgcgattctttccggcgccatcgatacccttgccggcaactatcttgatgacaacgcatatttgatattctcattgtcgctatctgtgatcggcgtgatcggatcgattatcatattcgtgatatacggcaaagagatgcgccaatatcaccgtacgaatcgtagtattccagacacgtactttggctgggcagctccgacgttcatcatctttgtggtagccaatgccgctttcgccattatttcgtttgtcggcgcgatgatgggttgagtgtgcgtgtgcgcatgcaggttggcttatcgttgaagcatgagtgattttgagccgttttacgatgtcagccgcagttacgaagacaactatgagcaagggccgttcggcgcgttcgccgaggcgctgaaggatggcaacggtgccgatgccgccggaaccaccagcgagggtgcctccgagggtgccttggccacctttttgggccagccggtcaacctgcctttcggcattcccgcaggcccgctgctcaacagccgtttcaccacggccgctttccacatgggtttcgatctggcgacctacaaaaccgtgcgttcgcgcgcctggggctgcaacccgttcccgaacgtgctcgccgtacaccccaagtcggcggacggttcactgacgccgggcagcgccgaactggacgaaggcgtgctggccgacaccaactatgaacagccgatttccatctccaacagcttcggtgtgccctcgcagagccctgacgtctggcagccggacatgcgcgccgccatcgaggccgccggtcccggtcaagtgctggtcccgagcttccaaggctcgcgtgtggagggcatgagcgaggaggaatacatcgccgaccatgccactaccgcccgcctggtcaaggagaccggtgccaagctcatggtgatgaacaccagctgccccaacgagggccacaaccgcctgctatgccacaatccgctgctcgtgggccgcatcaccgaggccgtgaagcaggagatcggcgacatcccgctgatggtcaagctcgcctacatccccagcgacgacgctctggagcttatggtgcgttccaccgtgggccacggcaccgtgcagggcttcagcaccatcaatacgatttccgccaaactggtcgatgccaatggcaatcaggccctgcccggcgcgggccgcgatcgctcaggcgtgtgcggcaatgcgattcgtggcgccggcctcgacatggtcgcccgtctggccgcgatccgtgaaaagctcgggctcgatttcgcgatcaacggcgtcggcggcgtggtctcgcccgccgactaccaggcgtaccgtgacgccggcgcggactcggtgatgtccgccaccggcgcgatgtgggacgccgaactggcccacaagatcaaggccagccggtaaatcggctccaaaaacaagcaacagcctgtacgggccgtgattcccagacgattcccagacagtgcccatgttgcattgaaactgttgctgttatatgtaatcacggccgaacaagctgcataacttaacctctttcttcttctctcctttctctccccggcgcccatcacgccggggtttcttttttgcggtgggtacagccgtcttactcggccgccgccttcatggccacggcgccgacgtagtagaccggcttgtcgaagttcggctggaacaggaagtccacgttggcgagctggtcgatggtgaagccggcctgaatcgccatggaaatcacgtttgccgcgccggagatatcggccttggaacagaactggccgcccttgaccttgcgggtttccgggtcccaggtcagaatcgacgtgactggggtggtggtgagcatgaagtccgggcgataatcctcggtgagcgaggtctcgcggaccgtgagcccgcggcgttcggcaccggcgcgggtcaggccggaggcggcgagcgagagatcgtacagctgcacggcggacgtggcctgcgtgcccatgtacttcacggtcggcgtctcgatgttgcggcccaccagcaggccctggcgcaccgcgttggtggccagcggaatgtaatcgtgctggccggtggggttgtagaacacggtggcggagtcgccggcggcgtacacgcccggcgcggacgcctgcatgtagtcgtcgaccacgatcgcgccgttcggcagcatgtccaccttgcccttgagcaggtcggtgttcggcaggaagccgacggccagaatcgccatttcggccgtgtactcgcccttttcggtgaccacagtgacggtgtcgtcgtcattgtcgcggaactcgaccaccttctggccgagtgcgagcgtgacgccgtgctcctcgaacgcggccgccacctgatcggtgatggtcttatcgaaattattggccagcgggcgatcaaggccgtcgaccagcgtggtcttgacgccggtgacgctgaactgctcggcgatttccgcgccgatatagcccgacccgatcaccactgccgacttggcggttttcgccttttccttgatggcgatggcgtgatcccagttcttgcacagcagcacatgcgggctgtcgatgccggggatcggcgggatgaccgggcgcgagccggtggtcacgaccagtttgtcgaaagcgagggtctgttcggcggggtctccggcctcgtccagcgcgcggtaggtgagggttctggcgtcgaggtccacggacgtcacgtcggtgcgcatatgcatggtcgcgccggcttcggccagagcggcaggggaggagtagaacattttcttcgggtcggatacgtggtcgcccacccacagggcgatgccgcaggagaggaaggacagcgtaccgttgcgctcgaaaacatggacggtccaatcggggtgctcggcgagaatcgaggtggtggcgaacgtgccggcgtgcgtgcagccgatgacggcgactgtggtcatgaatgctcctttgcttgtggccatggcgtctgatgccattgccctgaatcgtagcgtagaagtatggagaacaccgtggcggcaaatgtgaggaagatcacgttatcggtttgattcgacggggggtatgggatccgttgtgcacggtgatcaaagttcggctggggtgcatttcacggagtcggcacatggcttatggcaaactggacggtagcattttttgaatcttgattgattgaggagagtggcgtggctgagaatccggatgacgtgttgcatgtcgagggcggcaagcctttgaatggcacgatcaaggtgcgtggcgcgaagaacttcgtgagcaaggcgatggtcgccgcgttgctggcaccgggcaagtcggtgctgaagaacgtgccggagattcgtgacgtgcatgtggtgtccgatttgctacgtctgcacggcgtggacgtggatgtggacggtgcgaacggcattgtgaccatcgatgcctcgcgtgtgcagctggccgatgtggccgacgtggatacactgtccggttcgtcgcgcatcccgatcctgttctccggcccgctcgtgcaccgtttgggtgaagcgttcattcccgcgttgggcggctgcgcgattggcggacgtccgattgacttccatctggagacgctgcgcaagctgggcgccacggtggacaaggaacacaaggacggcatccacatcaccgcgcccaacggcctgcacggcgcgaagatccacctgccctacccgtcggtgggcgccaccgagcagactttactggcggccgtgctggccgagggcaagaccgaactgtcgggcgcggccactgagccagagatcatggatctggtgtgcgtgctgcagaagatgggcgcaatcatttctgtggacgttgatcgcaccttccgcatcgagggtgtcaaggaactgcaggggtacacgcacacgtcgctgacggatcgcatcgaggcggcgtcctgggcgtccgccgcgctcgccacgcacggtgacattttcgtcaagggcgcgacccagccggagatgatcacgttcctgaacgtgttccgcaaggtgggcggcaagttcgaggtgacggacaagggcatccgcttctggcatccgggcggggacttgaagcccgtggcgatcgagacggacgtgcatcccgggttcatgaccgactggcagcagccgctcgtggtggccctgacgcaagccaatggcctgtcgattgtgcacgagaccgtgtacgagaaccgtttcggcttcaccaagccgctggtcgagatgggtgccaccatccagttgtaccgcgagtgcctgggctcgctgccgtgccgtttccggcagcgcaactacaagcattccgccgtgatcttcggaccgaccccgctgaccggacgcgacatcgacgtgccggacctgcgtggtgggttcagccatctgatcgcggccttggccgcgtccggcccctcggacgtgcacggcatcagcctgatcgaccgaggctacgccgacttccgcggcaaactcgaagcgttgggtgccgacttcgattaattcgggcgttccgcggctcccctctctgaggggagccgcgattttttacaacagcccgtccgcctcaagtgcggcggccatgcggtcgaagcattccttcagtagcgggtagggcatggcaaagttcatgcgtacgcatccatgccctacctcgccgcattcgcggccgtccgtcaacgccacattggctttcttgaagaaatagtcggccgggtcgtcaatgcccagtggcgagaaatccagccacgcgatatacgtgccctgcggctccacatagcgcaccttggcgaatctcgtgcgcatctgctcgttgaccagcgcgatattgcgctcgatgtacgccatcacgccctcgaaccatgccgcgccgccgtcataggccgcagtggtggctatggcaccgatggtggccgtctggtgctcggaccattccgcgttcctcatccatagttccagatcgtccggattggtgagaatcacctgcgcgcacttggtgccgggaatgttgaacgacttcgaggctgaagtggaggtgaaagcctgcatggccgtctgccggttgattgaggcgaatggcacatgcgtgtggccttggtagacgaacggcgcgtgaatctcatcggagaatatacgcacgtcgtacttggcggccaggtcggacaatcgcagcatttcctcgcgcgtcaataccttgccgatcgggttgtgcgggttgcacagcacgaaggcatggcagccgttcgcgaacgcctgctcaatggcgtcgaaatcgaacagccattcatcattgcgcccgctgctctcgccggcgccctcgcacagcatcggaatctcaagaacctccacgccatacaggcgcggcacgctcaggaacggcatataggccggagtcggcaccacgatggagttgccggcgcgcacgatctcgcgcaggaacacttcgaacgcctccagcacgtccggcaccgggcggatgcacgtcggatccacatcccagccgtatcgacgctgccatgcggcgcacgagcgggcgacctccttcttccacgggtcgggaatgtagccgagcgcgccacgttcggtggcctcttcgatggcttcggccacgcacggcgccagaccgtaatccatctcggcgatgaatgcgccgatgcagccggggtagcgggtccatttgtccgaaccgacctgcttcagatcttcgatggtcgtcacgtcgatgtgattggcatcaaagcaagaggcaccggcggttgcgctgctcaaagtcgttgactgggaaacgttgttcatgctcataacatgtcattgttcctggtacagaagggctgctcaacggtctggctccccgaaatcgtgatggcgttcgcaagcttgcttatcgctgtccgactacttggcactcaaatatttgagtgacgtgcgctcgagctcttcgagcaatgaaccgagcgcgggacgatggtcgccggcacgagtcacgatgccgacctcgcgcgccgcaaaatcgtcggcgatgggacaggccaccagatcgccttgcagattgatatgtgtatcgagcgccggcaccagcgagacgcccatgccaacctcgaccaggttctgcgtggcccagtaatcatccgtgcagtggcggatatccggcttgaatccggcacgggtggccagtttcaccaaatttgcgcggcaggtggggcagccggcgatccaatgctcgtctttggcggcggacagcggcacgggttcgccggtctcctcgaatcgtttggcgatgtcgctggagcggcggaccaacaatcgcatcggatcgtaacccagcgactggaaggtcagatcgtcgccgatgtgcaggaagttcgggatgctgctgtaccggaacacggcggcggcatcggccttgccttgggaaatcagaccgatcgcctccggcggctccatctgaatcaggctcagctcgatgtccgtgaacatactgagcttgaccacggtacgggccgcgatagtagagcagattgacggtggggccaccaaatgcaggtgagcaaaccgatgatgccgataatcctcgacctcacgggccgcccgctccagccgatcggcgatggcctcgccgtggcgggcgagcatcgaaccggtggcggtgagttccacaccatgcgaggtgcgttgcaccagagtcgaaccgcactgtgcctccagctttttgatctgctggctgatggccggctgcgaccaacccgtggccttggccgtggcggagaacgaaccatactgttcgatctgccacaacgtgaccaatgattgggggttgagcccggccatatgcacctctttcgcgcgtcgttccattatggccgccgacaatgaccggacgcggcatggtgtcgccatcgccggtatccttagaagaatgagccctgaagccttaagtgaactgatttccagcattgcccacaacctcgtcgccgccggccaggccggcgcgttgaccgacgagctgattccgcccgtcgacaagctcgccgtgatgcgcccgaaggaccgcgcgcatggcgactgggcctccaacatcgccatgcagctggccaagaaggccggcatgaagccgcgcgatctggccgagccgttcgccgccgcgctcgccgaagccgacggcatcgccaaggtcgaggtggcaggccccggcttcatcaacatcacgctcgactccgcctcggccgccgccgtggtggacaccgtactcgccgccggtgccgtgaccgacaccgacaagcatctcaacaaggtcaacgaatacggccgcaacgcccatctgggcggccagaccctgaatctcgagttcgtctccgccaaccccaccggtccgattcacatcggcggcactcgttgggctgccgtcggcgacgccatggcccgcgtgctcgaggccaacggcgccaaggtggtgcgcgaatactacttcaacgaccacggcgagcagatcaaccgcttcgccaagtcgctggttgccgcctgggccgaggccaataacttgggcgacgccggctaccagaccgaaaccccgtgcgacggctacaagggtgcctacatcaacgagatcgccgcccgtgttcaggccgaagccgagtccgacggcgtggacctgaccgcactggcccaccaggatcaaggcctgaacgacgacggcgaaccgctcggcgaagccgataccgaagtgcgcgaggaattccgcaagcgcgctgtgccgatgatgttcgatgagattcagaagtccatgaaggacttccgcgtgaacttcgacgtctggttccatgagaacagcctgtacgccgacggcaaggtcgacgccgccatcgaagagctcaagtcccgcggcgacatcttcgacaaggacggcgccacttggtttgaatccaccaagcacggcgacgacaaggaccgtgtgatcatcaagtccaatggtgagttcgcctacttcgccgccgacatcgcctactactgggacaagcgccatcgcgccgaaaacccggctgacgtggccatctacatgcttggcgccgaccaccacggctacatcggccgcatgatggccatgtgcgcggccttcggcgacgagcccggcaagaacatgcagattctcatcggccagctggtcaacgtgatgaaggacggcaagcccgtgcgcatgtccaagcgcgccggcaacgtcgtgaccatcgacgatctggtctccgtggtcggcgtggacgccgcccgctactcgctggcccgctccgactacaaccagaacttcgacatcgacctggccctgctcgcctcgcacaccaacgacaacccggtgtactacgtgcagtacgcgcacgcccgctccaagaacgtggaccgcaatgcagccgccgccggcatcagctacgagggtgccgacctggccctgctcgacaccgaggccgacggcgaggtacttgccgccctcgcccagttcccgagcgtgctcgccactgcggccgacgaccgccagccgcacaaggtggcccgttatctcgaagagctggccgccacctatcacaagtggtacaacgtagagcgcgtggtgccgatggccctgaccgatccggaaacccgtggcgacgacgaggctcgcaaggccttggagattgccaagaacccggagccggcccgtgccgccgcccgcctgaagctcaatgacgccgtccagcaggtcatcgccaacggcctcgacctcctcggcgtcaccgcccccgaaaagatgtgattatgcccatttctccaatttggccggccgctacggctgtgaatgccgacggtgccattacattccacggtcgtaccgccgaatcgctgcttgacgagttcggctcgccgctctatctcatcgacactgatgaagtagtcgcacgtgccaggcacttcgtgcgcgctgccgccgaagcattcaacacatccactacgcacgtgagctttgccggcaaggcgttcctgtccaaagaaatcgtgcgattggtcaccgaggccggcatgttcgtggacacctgcacgatgggcgagatgaaaatcgccctcgccgctggcgttcccggacgtcgtctggtactgcacggcaacaacaagtccgatgaggaaatcgcgctggccatcgaacagggcttcgccaaaatcgtgattgacgagcccgacgagccggagcgcgttgccgccatcgcccgcaagctcggcaaacgcgcccgtgtgatgctgcgcgtcaccgtcggtgtccacgccggcggccacgagtacatctccactgctcacgaggaccagaagttcggcgtcccgctgttggcggccggagccgacgccgcagtgctcgacgtgctgaacaacctgacggacgtgacacctgccgcgaccaacgcgcgtattgcggagtcggacgttaatgctggcaatgaccaccctcagtcgactgcgccgatagctcccgccagcgggagcggcaaaccggcacgcgaactgcgttatgacgtcaagtatccgtacgacctgagccatgaggaagtctccgatacggataaggtacttgccgccgcgatggaagccattgcggacggtccgtccatcgccgtgctcaagatcatcctcgccaaccaggacgtactcgaactggtcggagcccactcgcacatcggctccaacatccacgatgcggacgccttcattcacgcggccaagcgcatgatgctgctgcgcaagaccctgtgggccaccgacgcctacatcctgcccgaaatcgacctcggcggcggctactccgtggcctacaccgatggcgaagattcaatggacattgacgtggaactcactcgcttggcggatgcggtcaacagcaccaaccgtgcgctcggcatgcccgccccggccatcagcttcgagcccggccgctacatcgtggcgcccgccggcgtaaccctgtaccgcgtgggcgccatcaagcacgtgcacttgtccgatgtcaaagacagtgccggcaattcgattgccgagcgcgtgtacgtgtccgtggatggcggcatgtccgacaacattcgtccggcactctacggtgccgactacaccgcgcgtctggcgaatcgcactggttccgctgaaacgatgctcgcccgcgtgtgcggtatgcactgcgaatccggcgacattgtggttcacgaggtgcagttgcccgccgatttgaagcgcggcgacattctcgccgtgccggttaccggcgcatacggccgcaccatggccagcaactacaaccaggcgctgatcccggcggtggttgctgtcagcgaggccggcgcgcacgtcatgctccgccgccagaccgtagacgacctacttaacctcgacgtcagcgagtaatcagcgtgcagaggtgagcgcctgacagtctgtaatgtgcggccaaaaccgtcataatacgaaaagggccgtcagcttgatgagtactttcggtctgctgtcggaaataatccgtaaaataggcgtgggatatagaaaactttttggaaggaccctgaattggctcacaacagcgaaaccccgattcgcgtaggcctgcttggtgccggcaccgtcggctcccagaccgcccgcctgattgtcgagcagaaggacgaactgtccgctcgtatcggccgcccgatcgaactgaccggcgtcgcctgcctcgacccgaaggaaaccgagaagttcccgtggatcgaccagtccatcgtcaccaccgatactttgagcgtggccaccaactcggacatcgtcatcgagctcatcggcggcaccaccgtggcccgcaagttcgtgcttgccgccatcgaatccggtgcttccgtggtcaccgccaacaaggcgctgctggccaagtacggcccggagatctactccgccgccgaggccaagggcgtcgacatctacttcgaggccgctgtaggtggtgcgattccgttcctgcgcccgctgcgcgagtccctggtcggcgacaaggtgaccagcatgctcggcatcgtcaacggcaccaccaactacattctcgacgagatgaccaccaagggtctccagttcgacgacgtgctcaaggacgcccaggccaagggctacgccgaagccgacccgaccggcgacatcgaaggctacgatgctgccaacaaggccgccatcatggccaccctcggcttccacacctccgtgaccatcgacgacgtgtccgtcgaaggcatcaccaagatcaccgccgacgacatcgccgccgccgccgccgagcacaaggtcatcaagctgctcgccgtggtcgagaacggcgaggccggcgtctccgcccgcgtctacccggccctgatcgacgagaaccacccgctggcctccgtgcacggctccttcaacgccgtgttcgtcaaggccgaggccgccgacgacctcatgttctacggccgtggcgccggcggcgctccgaccgcctccgccgtcgtgggcgacgtggtgaccgaagcccgccacattgctgctggctgcaccggcccgtccatcccgctgtacaagaatctgccgaaggctccgattaccgcctccaaggctgcattcgccgtgcgcttcctgatccacgacaagccgggcgtgctggccgccatcgccgccgagttcgccaagaacggtgtctccatcaacggtgtgaaccaggatctgaagcccaccatgaccgaccccggctacgacggcgagattcagcagttgcgcatcgtgacccacctgaccgacgaggaaaccctgcgtaacaccgtcaaggccgtgcaggcgctcgacttcgtcaccggtgacccgtccatcctgcgcgtgctggactgacaccgtctaggctccctctgatgaggcggtcgaacggctgcccgtgagttgaaagctgaatacccaagctcccctgacaaggggagctcctttttaaggaacaaccatgaacccaatctgcaatagcgttcacgtgcgcgtgcccgccacgtccgccaacctcggctccggcttcgataccgtgggtctggcgctcgactaccatgacgagctcactttcacgctcaacgacgacccgaacgacggcattgcccacgtgatcatccacggcgagggtgccgacaccctcccacgcgacgaaacccacctcgtggtctccaccttccgccgtgcctgtgccacgttcggcctcggccgactcggcttcacgctggaagcgaccaacaacatccctcaggctcgtggcatgggctcttccgccgaggccatcgtggccggcatcgccgccgccgcggccttcgcccagaccggtgacctcaaccgtccggccatcttcgatatggccgcccagatcgaaggccacccggacaatgtggccccggctgtgttcggtggcctgaccgtctcttgggacttcgaaaccgcggaaggcgtcggctcggtcgccgttcctggtggtgaaccgctgcacggcggattccacgccgtcaactacccggtggacccgtccatcaccgccgccgtgttcgtgcccgactatgagctgtccactgagaaggcccgtcaggcgctgcctagggaactgccatacaaggacgccgtctacaacgtgtctcgcgtgggtctgctgcccgctgcgatgaatcccatggtgctggcccaggccgcccagcagggcaagtccggcgtcgccgctgccccggctcaggatgccgatacgtgcgcttgcgctggcagaacccgtgaatcgccgttcgctgacgagcttgcggccgctcaggcccagtccaacgcgctactgttcaccgccacgcaggacaagttgcaccagccgtatcgcggtaccctgatgccgccgtccaccgagctcattgcgctcttccgctccaagggctatgccgccgccgtctccggtgccggcccctgcgtgctcgtgctgcactacggcaacgcccgcgaagccatcgaccagatcgcatcggagcagcttgcttccggccactggcgtgtgcttcacctgcccatcaacaccgccggcgtcgaaatcgagcgtcgctaagtcgaggagaaggctcccgctggcgggagctggccgccgcaggcggtctgagagtggtccgccataccggcagagaccaccctcagtctcacttcgttcgacagctcccgccagcgggagcataaggacttaagtcatgtccattccgctaattcttgcttccaagtccaagcctcgccgtgacgtgctgtattcggcgggtatctgccccacaattcgcgtctcgcacgtggatgagcctgctgcgctggaagcggccgcccgtgaggaaggtgtcaccgtcgacgatttgagcatcaagcagcgtgtgatgattcttgccgcagccaaggccgaggccgttcaccgtgcgtatcgcgatgcggccaatactgccgccgccgcaaccggcgatcgcgtgattgcctacccgctcaaggccaaggaaatcaaggattcggaacgcgaagccgtcgtcgaagacctgcgcaaagccgccgctggccggcccatcgactattccaaggcggaagtcgccaccacgcgcgacttctccggcatcgatatgccgaccgtcaccgaacccatcgccaccgctattgccggacagccgggactgaccgaggcgacggtcggcccgctgattctaggctgtgattcgatgttcctcctggacggcgaatgctacggcaagccgcacagcgaagccgtggcccgcgaacgactgaagcgcatgagcggcgcgaccggcgaactgtggaccggccactgcctgatcgatttcgcgaccggacgtaccgtgcgcggcgcaagccatgccaaagtccatttcggcgaattcaccgatgacgacatcgaacggtacattgccaccggcgagccgctggaagtcgccggatcgttcacgctggaaggcttcggcggcgcgttcatcgacagcattgagggcgatccgcacggcatcatcggcctcagcctgccgttggcccggcatctggccggcgaactgggcatcacgtggaccgacctgtggaatgtcggccgtggcgaactggagccggaaagcaaggcctcgggcaaccagcacgctggcattctgccgccggtcgaaaacgtgcatcagcccggcgatggctgggtggactgcgcctgcggccgcaagcattggggcaccaacggtgcgtccggcattctgctggctcgccgcgacccggcgagcggcaaggtgactcacgtggtcatgcagcaccgtgccgcgtggagcgccgaaggtggcacgtggggtatccccggcggtgccactgcggacggcgaatcgtccatcgaaggcgcgctgcgcgaaagctacgaggaagccaacatcacccccgaagacatcgaggtggtcggctcctaccgcgaggaccatggcccgtgggcctacaccaccgtgtttgcctttgaaaagcccggccacaccgtcgagcccaaggcaaacgacgacgaaagcatggaaatctgctgggtcccgattgacgacgtgcccaaccgcaagctcctcaccgctatgaagaccgactggccccgcttcgccgcccgcctggacgagctggcctgtgctggacatcggtagtggtgttggctgggccaatgttttgccgatgagttcacttgggtaatgccgtgtggaccgcgtgtggaccgggacggattctgctgtcccggttcgtcatttcgtctcttttgggacaaccgggacagatttcgctgtcccggttcgtcattttgcctctttttggacaaccgggacagaatctcattcacctgacgccctatcgtgcgatggtcgccgtcggggaatggcggaattccggggttttggatttgcatatatcgggtgttcatggaagggcctgtcccggttcgccaaaagaggccgaaatcccgaaccgggacagccgaatctgtcccggttcgtatgtcgatcgattgaccccgccaccgggacatcaaccgcgcatagacaggacgcttcaatgcctggcgggcatgaccatatcggatgacacacgttccctcgtgcgtttcgccacgacctccgccccaagtcagtgcgaaaatggcatttttagcggtgtggtcagctgtcgcatgcggaaaatcctaaatcaaccgccgaagagacacatcgccgactcggcggaactcgctggtctgcgcgcaatgaggagtgttgtgtctgaatgcgattcagacaatggtcggcgtcaaatagcggtctccagccattaatcattggtgattgtggacattgagcggagtaaacattctagatgattcagggatatgccgaaaatcatatcgttcagagaatgaaataccgcatctcggagtaactgactgtcgacgtgcatggtttgaaatctgatatccacgcccatcatgcctagcaaaattacgggaatggggttcggactatttcgcctcagccaaccgggagcttccgaatgctcaatgctgtatgcacttagtgtgtggaaaccagccaatcattgaccaatggcaggccgcagtcgaaaccagaaatatcctcgctcgcagtcaggtgccgaggctcagtgaagttggtcacgtccatatgggatcacgctccaacaattcattcagacgtaggcccataggttcgtttaatgctgcggtgaaatcattccacgctttactgttgggccgaatgatatgagcttcatggatgtcccgatctgcggcggcgagcagattcgataatgcccattgcaacgaagtcatgcctttggactcggccgcttggtcgattctggaacgttgctcttaggtgagtctcatttcaaaacgactgttcttgttattctctgtagtcgtactcctgttgtacgacttttgtacggacacgattggtgtgtgcgggatgtcgattgcgatggccatgtgggctcctttgcttggtctgttgtggttccagcttccgaaccggtcttccactgttcctcgtcttctcgagcaatgaacatctgatatatggattgtcgcgtcgactgcgtatctctaatccttgcggatgaggagcgggccggtgatccagaaaggttcataccgcagcccgatggtcggctgggcgttcgctccgtacgctcgggagtatgaacacagcagcatcgcaattgcagcagcctcagccggcgtcgggaccggcggctcagcctcagcagtctcagcaaccccaacagttccagcagccggcatcgcacacccagcagtgggccccggtcatcgaggcgcacgacctggtcatggactacaccgccagcatggcccgcgcacaggcagggcacggcgtcaccggcgtgatgccagccggcacgggagccggttatgcgtcggcgaatcccgctgcggccggaccgggtgccattcaggccggccagccatcccagccagcccagcccggcttcgccatgccgaccatgcacacgctcgccctgaaccacgtgaacttcacgctccgggagggtgaaacagtagccgtgatgggcccgtccggctccggcaaatccactttgcttcacgcgttggccggcattatcaagccgactgccggcacggtcgtcttccgtggcactgacctgagccatatgagcgacgccgaccgcaccaaactgcgtcgtaatgtcttcggattcgtcttccaatccggccaactgctgcccgaacttccggccgtcgaaaacatcgccctgccaatgatgctcgacggcgtgccctaccgcaccgccacggacacggcgattctgtggctggaacgtatgggtttgcgcgcactcgtcatgcaccgaccgggggagatgagcggcggccagatgcagcgcatcgccatcgcccgtgcgctcgccgtcaaacctgccgtggtcttcgccgacgagccgaccggcgcgctcgaccaagccaccggccgcgaggtcatgggcattctcatggccgccgcgcgggacaacggttccgccgtggtcgtcgtcacccacgaccccaacgtcgcttcgttctgctcgcgcaccgtgaccatgcaggacggccagctgggaggcgtacgatgagcgctttcgcattgtggcgattgttccatcgccccggctcgcgtggcagtgcgggtcatacttcggtgttggccatcattgcttttgccgcagccaccactatctttctcaccgttttgggcggcgtgcatgggttcatgtggcgcgcctccgccgaccacaccattggatgcgcaatcaatctcgacgcttgcaaacccggaacagcggaaatctggaagcagcgtatcgccaatccccacagcctggatcaatacgccacggcatacgtcgtgctggcgttctttgcctgcctgctgctgattgtgccgttcgtggcgcttgccggttccgccgcgcgattggctgcgtcccgtcgtgacgctcggctcgcatccctgcgcttggcaggcgcgaccacggggcaagttattcgccttacggcgcttgatgcggctgggcaggccttggtgggggcgctgattggcatcgcggggtactgcgtgttgatccccctaatcatgttgctgcatttccagaatcagacgtttacgttcgagcaactgtgggtggggccgattgccttgatcattacgcttgttggcgtgaccgtgttggcgctgatctcttcgctggtcacgcttcggcgcgtggccatcacgccactcggcgtcacttcacgcgttgcgactacgctgccgtccggctggcgtgtggtggtgttcgccgtcatcatggtgattgccgttcttctgttcaagaatccgatggtgctggctcaggccggtgaagtagtgatgtacggcgtgatcatcggtttcatgctgctgtgcttcgcgctggtgaacctcgtgggctcctgggtggtcaccgcccgcgccaaagccaaggccaaacggcccaaggacgcggccacgatgattgccatgcgccgtattctcgacaatccgaagcgcgcctggcgcaatgtgtccggcattgcactggccgtgttcatcgccggcatcacctcgatctgcggattctttggctcggccgccgtggtcggtgacgccaacgacccgtccaccgtgttcattcgcgacatcggcaccggcggcatcctgacgctagtgttcgccgctgtgcttgccgcggtcagctccggtgtgatgcaggccggcagcgtgtacgatcaggccggcgaatatcgcatgctggtgttggagggcactgatgtcaagaccttgaaccgtgcgcgattcatcgaggtactcaccccgctcaacatcgtggtgatcgtggccggcggctgttccatgctgcttatggcccctctgttcgccgcttcgatgaccgaaccggccacgctggccagcttcttcggcgggcttgtgctgtgctatgcgctggtttcggtgggtgcgttcgcgtccaatcgggtggccgccagcttgaatctggccgattatcgggccgatgactgaggcggtacggtactttcccgggtgacgacactggtggggaggatgacgtgcatatcaccctgattgcccttgcggctgtcgatgatcatctgcacggcgcgttgggctatttcgctgaacggctgatgcacgctggtcagggagggcatgagttggccggcggggaaaatgtcgtcgaaccccatgacggacaattgctttggcaacgcgatcttatgctctcgtgcggcacgatacgtgcttactgcagataagtcgttgcagcaaaaaatcgcggtgggtcggtcggtgagttccagcagccggcaggctgcttcatagcttgtttcggcggggaagtagtcgccctgttcgatataggactccggcagatccaccccggcctgttgcagagcggcggtgaatccgctatagcgcgcgatgctggtctgtaggttcgccggcccccggataacggcgatgcgtcgatggccgagcgacagcaggtgtttgccggcctggtatcctgcggtccagttatcgatggacacgctcatcacatccgaatcgacggtatcgattgggtcgatgatgaccacgggaatactgcgcgatttcaacaaagacttcgcttgagtggtcagaccgcccatctgctgcataatcacaccttggggatttctatcgatgatgccgcggaaacagtcttccgtggcatcgccatggttggtctgggtgaccgtgatggcgaggcccgcctgctgcgcccagtatgaggcgtatttgatgagttccatcgtgccgttgtgctcaatgtattcgacgacgagctctatggtgggggagagtttggtgttgaccagaggccttgagtaaccgtgatctttgaggatttgctcgacttgtctccgcgtctcgtcggaaatgcctgacctgccattgatgactttggaaacagtggatgcggatacgccggcgatttttgcgagctcgccgaccttgagcttgtgggtggatgtatcgttaaccatcggtgtttccctcttggatattcgccgttcaattactgagacgatttcgtcgttgttcccaccattatgacgcattgtgccgtaacaattccgtgttttcttgccctttgtccggccttgaataaaaattttcgcaaataggcttgcaaatttctttattcggacgtacgatatagccgttggttcacaccaggcgaaggagcccgaacacatgagtaccatcaccaaagtcaagacgtatgacttccgattccccacttcaacgacgctttccggctcggatgcaatgaaccccgatccggattattcctctgcgtacgtggagatttccaccagcgccgacgacggcatcacgggtgtgggattcgtgttcaccatcggccgtggcaacgacgtggtttgcaaggccatcgaatcgatgtcgcaggtgctgattgggcgcaacaccgaggaactgctcgacaacatgcgcattgcatgggacctgttcgtgcatgattcccagctgcgttggcttggccctgaaaagggcgtggagcatatggccatcggcgcggtgctctccgcgttgtgggatatcaaggccaagcgtgcgggcaagccgttgtggctgctgctgggcgagatggagccggaggagctggtctccacgctcgatttccgctacatgaccgacgccctgcgccctgaggaagccgttgcgattctcaaagagggtcagaagggcaaggccgagcgtatcaagcatctgctggaggtcggttaccccggctattcaaccgctcccggttggctcggctactcggatgagaagatggtggccctcgccaaggaggagacccaggtcaagggattcaagcagatcaagctcaaggtcggccagaacatcgacgacgatctgcgtcgcctggccaaggcccgcgaagccatcggccccgacgtgcgtcttgccgtggacgccaaccaggtgtgggatgttcccaccgccatcgactggatcaacaagttccacgacttcgatctggcgtgggtcgaggagccgaccagcccggatgacgtgatcggccacgccacgattgcgcgcgccattaaccccatcaaggtggccaccggcgagcagatgcagagccgcatcctgtacaagcagtatctgcaggccaacgccttcggcatcatgcagattgacgccacccgcgtggccggtccgcaggagatcgtgctcgaatacctgctggcaaagaagttcaacaagcccgtctgcccgcacgccggcggcgtgggtctgtgcgaggccgtatgccacttcgcgatgttcgattatgtggcggtatccggcacgatggatggccgaatgatcgaatacgtcgataaccagcacgaacatttcgttcatccgaccgagatcaaggacggcaactacgtcgctccgaccgctccgggcaacggtaccgaaatgacgctggagacggccgagaagtacctgtatcgcggctgaccgcaactgaaaattcataactgaacaacacaactcaacacaacaacacacaaccactccggctggggtgccgaagccccggccgggcgtgacatggaacacccatgaaacgcagaataaggatggacgaaggagttcccatggatctgcatctcgaaggcaaagtcatcatcatcaccggcggtttcaaaggcatcggcaaaggcatcacgctgcaactggcccaggagggggccatcccggtggtgattaatcgacccgacagcgctctcgacgagttcaagaaggatatcgagcagtacaccaccacctatgatgtgcacttgcttgacctcaacgacaccgacaagatcgccggcgtcgtcgaagcaacatacaagaagtacggccatatcgatggcattgtgaataacgccggaaagaacgacaacaaggatctcgagaccactacttggcgtgagttcgaggaatcgcttcacggcaacctgactcactattacgagctggtccacgcggccgtgccgtatctcaaggaaagccgcggatccatcgtgaacatctcgtccaagaccgcgcttaccggccaaggcaagaccagcgcctatgcggccgccaagggcgcgatcctgggcctgacccgtgaatgggccgccgcattggtgcacgatagcgtgcgtgtcaacgccatagtcgtctccgagtgctggaccccgctctatgccgattggatcaagacctttggcgatgaagcggcccagcaggcgcgcctgtcggtgatcaccgacaagattccgctggaacatcgtatgaccaccaccgaagagatcggtaatgaagcggcattcctgctctccgaccgctccagccacaccaccggtcagtgggtgtacgtcgatggcggctatgtccaccttgaccgtgcgctgagctgacaagcagccctttcccgaatattcgcgcggcaattccggagctttgatcattgctccatccgtacgccgtatccgcgtatgccgcccgtatcacccgcgccctgggtcatccgtttaccaacatggcccagggtggtccacttctcgctaggcaatatcggggaaactcgtatcactaaggagtcaatgatgacatccaaaaacacaaccggttccaaggcgaccatcgccattgtactggtgacctcactgttctttatctggggcctgaccatgaacctcgtgaacgcgttgaactcgccgttcgcaaactacatagaactcagcagcgccgaagcgtcattactgcaggtggcctattacggcgcatacttcgtcatggccattccggccggcttgatcgccaagcgtttcggttataagggcggcgtcatctccggtctgttcctgttcgctctgggcgcgttcatggtgatccctgccaccagcatggccagctacggcctgttcctgttcgccatgttcgttatcgcgctcggcgcggcatcgctggagaccaactgcaatccgtatatcaccaagctgggtgatgaaaagggcgaatcgttccgtatcaacatggcgcagagtttcaacggcgtcggcaacatcgttggcccgctgattcttggccagattctcggcaccaccgtcgcatcaggcgagtccggcttcgacgccgctaaggcgcagttcctgaatgatacccgcacgatatacattgtgatcggcgttgtgctggtcgtggtgctcgccgtgttcgcgctgttcaagctgcccacgcctccgggagacgaagaggaggccgcgggcggcgcctcctccgagaacagctccttcttcggcctgctcaagcgcccgcacttcgcattgggcgtgcttgccgagttcattttcatcggcctgcaagtggccggcatggcggtcttctccgcctacgcgctcaagcactggggcgcgggcatcacagccggcaccgcggcgatgatgctttccgtgctttccctgctgttcaccatcggacgcttcgccaccaccccattgatggccaaattcgatcccgcgaagattcttggcgtatacatgaccatttcagccgtgctgatgttcgtggtattccttggcctgggcaaggtctccgtcatcgcgttcatggtggcgtatctgttcatttccatcggatacccgaccatattctccctgacgctgaaaggtatcaagggttccgcggcgaagaccggttcctcggctttggtgatgagcattgtgggcgccgcgttgattccgctgctgctcggtgtgattcaggatgcggcaggcatcgagatcgccatcctggtgatggtcccgggcttcctgttcgtggcatggtacgcattctggggttccaagatcggtctgaaggaggcctgacatgacactcaacgtaatcgattcccacttccatatctgggatccggatgcgcaggatctgccatggctggcaggattgccctcgctgcaacacaagtacacgattgaagacctagccgcacagtacgccaagtttggcgtgaatttcctcggcggcgtatacgtggaggtcgacgcggccgaccatgagctcgaggaccggctgctgtacgagaatgcaagtcctctgatcttgaagcgcatgttgcaaggacgggtaagcccttggatgcgtgtcccgatcaacgccgatggcatcagggaaccgctgcatgtggattccgagccgcggggccgtgcgctcgaacccgaattcatcgccggtctacgcgcgatggccgccaagggattgccattcgagctgtgcaaccgtggcccggaactgggcgacatggccaaggcgttctcgcaggttcccgaagtgacggtcatcatcgatcatctcggcaacgtgcccgggcttgatgaggaatcgtgcgccgcactcgcagcgttggccgaactgccgaattcgtatatcaaggtttccggcgacaacccggtggacccggacatcgtgaaatacgtgcgggacacattcggcccgaagaaggtgctgtacagctccaactggccggtcgtggaa

SEQ ID NO: 244 - DNA, 3646 bp, Unknown
  R101_18m  MAG No. k141_44678
agagtaggaacgggcgatcttggtcagcggattatccggctggaactcatcgccatcgaatgtggtgaacggcacggagaagcccatatcctgagagaggatcttcttggcctcgtcatcggtgaccatccacttgatgaaatcgagcgtggcctgcttgtctttgtcggaagcgttcttgttcaccgcccagctggcgtcatacacgcccgcaggaccggtctcttcctcacccttgatgcccatgtaatacggcagcatgccaagatcgtcatccgccacctcgttacccttgatctgcgtgtaagcccagacgccgttcgggtagaacgccacctggccaagcgcgaattcggaagtgacgtcgtcgtacgtcttcgagctgaccagactcggatcggtcgggctggtctccagctcgagatcgaacagatccttgtagttatccaagtaggtgcccttgatggtcttggagaacgtggtgttcatatccttgtattcgtagtacagcgggatgcgccccatatgcgcggcgaaacggtatgtgtcggaggcatccagacctggcgtcgcgaacgcgccgtcaacgccgagatcgtccttgtgctcgttgatggactcggccacggccttgagcgtcttgtaatccttgatgtcgtcggcgctcttgattaccgcgtaattcttgctggcgtaatcgttgatgatcttcttgttgtagatgatgccgtaccattcagctgcgtatggcagcgtgaacgaatcgccatcaatggtgtaggagtaggccttgccgtcatcggtgagcagtttgtacacttcggtgtcctgcaatggctcgcaatacttctgatattttgcgaactggtcgaaaccggagatgttgaacatggtcggcgcgttggatttggccagttccgagctcatggtcgcatcgtatgtgccggacgcaccggtctgcacgtccacctgcacaccggttttttcggtatacatttcggcgagctgcttgtattggtccacgacttccgacttgttgttcatgaaatacacatggcccttgtcggaatcggcgctgctgccgccgccgcaagccgccaacgatacacccatggccaacgccgcggcgaccgcgcacgttttggtgatgattccctgcctcattgcttatctccttcgttggatttgttgttattcctatgtgtgctggtattggtagcgcctctggtcgccgcgttatagctggagccaagcggtggtgtcctgcggcaaacgcccgtccgcagtgagttcgcccgatacgaggatgacttcgccttgcggcagttcggctggacgttcgctgaaattggtgatgttcgcccaaccattggaacgacggtaggcaatgactccaccacgctgcccatccgcaccgtcacgcatatcggaggggcggtcctcgtccagccactgcagcacggtgtcctgcggcatcaggttatgcctcaacgacagcgccttgcgatacaggttcagcatggaattcgggtcggcgtcctccacgtcgacggcgaaatccttgtaccacttcggctgtggaaggtgcggatcatgctcggcgcccgcaggagagaaaccgaaggagccaccatggccgaattcgtcatcgggattatcgagcttcggcgcatcggcagcaacccaaggcagcggcacacggcagccgtcacggcctttttcgatttgcccgcgcacgctgttgaacgcggtgggatcctccagctcatcccagggaatatccgcgacttccggcaatcccagttcttctccctggtagatgtaggtggatccaggcaaggcaagttccataagaatcgcggcacgagcgcgcttggcgcccagttcgcggttctcctcataggtggtgccgtcgcgcagcagccaatccttggccaactgatggtgcgacaaggctggaacctgcggcaatccataacggctggcgtggcggggcacgtcgtggttgctcatcacccaggttgccgaggaaccggaacgttccgcgctttccaaaccttcctcgatggccagatgcatgtcatcgcggatccaatcctttttggcgaactcgaagttgaacacctgcccgagctcttcggtcgatgcgtacagatgctggcgatccggattgacccacgcttcggccacagcgaatgccggcggattgtactcgttgaacaccttgcgccactcgcggtagatgtcgtgcacctcatcacggtcatacaacgggtgtgacccatccgagggaagcagatgctcgcagaccttgtagctttcaagattgtcgcggtcgaggtccttggcgaggccgtgcgccacgtccacgcggaagccgtccgcaccatggtcgagccagaaacgcagcgtcttgatgaagtcggcacgcacctcggggttcttccagttccagtcgggctgctccttggtgaacatgtgcaggtaccactggccgtcgggcacgcgcgtccacgcaggaccaccgaagcttgcgatccagtcagtcggcggctggtcgccgttcggccccttgccgtcgcggaagatgtagcggtcgcgctccggggagcctggggcggcggcaagggcggccttgaaccattcgtgcaggttggagctgtggttcggcacaatgtcgaccacgaccttgatgtttcgctcgtgggcggccttggcgagctcgtcgaagtcgtccatggtgccgagcttcgggtcgacattgcggtagtcgtccacgtcgtagccgccgtcagcgagctgggacgggtagaacgggctcagccagatggcgtccacaccgagttcggcaaggtagtcgatcttctcggtgacgcctgcaatgctgcccaagcccgaacctcgggaatccttgaaggaacgcggatacacttggtacaccacggcctgcttccaccacaacgccggatcggtagtatcaatttcttgttgcatcattgtttttcactttcgttcgcatcgtcgcaaaatgatagcggttacatttctttaaactacagataaaaacaatcctatattgatttcttctctgtttgtaattaaaatgatagcgctttcattaatgcaatgcaatcctccaacacacggcgtgtcctacagccatacatcgccgcgcacaaaaaaggagctgcaatcaggagaggaaagaagactcctgattgcagctcgtcgtttattcaattattcagttatgaagttattcgattgatcgcgcgctgatggcatttccagcggtctgcgctacgcgatgcgcggaccgattcgtcatgcgcgattttgattggtttttcgatgcgatcagtgagccgcgtcgtattcagtcttccaaccgtccacgaatgcggtcttgacggcattccagtcgccggtgccctgagcgtactcaaggagggcggaaccaagcttgttcttccactcttcggatggcatcatggtgaagttccaggagactgcggtcttgccggagttctgatcttcaacagcggcctgcaccagcggattgtcggacttgacatcgctgaaggacttgaacggagtggtgaagcccatggcgctggacagggcctcgatgccggtcttgctggtg

SEQ ID NO: 245 - DNA, 23271 bp, Unknown
  R101_18m  MAG No. k141_44876
ccccgccccgcagaccatcgaactcatccgccgcctcctggaagcagcccaccgacccgaaccggccaacgatccgaccatctgcgcgatctgcggcgcaccgctcaccgacaccacgtcatccatctgccccgactgccaggaactcgaaaaggactggtaagcatgcacaccacatgggccaacgaccccgtcaactcaccaaaccactacacacgctcgcacccgggcatggagtgcatcgaactgaccgccgacaccagcttctgcctcggcaacgccatcaaatacctctggcgctaccacggcaagggccggcccgtcgaggacctcgaaaaagcccgatggtacctctgccgcgtcatcgaccacgacgagaagatcgcatggacacgccaacaacacgtcatcctcgacaccctcgccaacgatcccatcatccccgacgccgaagcgcacacatgggcgaaactccggcaaggcttccccgattcggctctcacctgcctcgaccgcctcatcgaacacgaaaggaaccaacaatgaccaaccccaacacctacaacacggcctgcgtcaccggcgtcatcgacaacgtggacttcacgctacgcgacgactccaccagcgtgaccatgctcatcccacccgacacacccgtaggcaccagaaccatcatcatcccccaaggcttcaccctcgccgaacaccggatcatccgcgaagccatcgccgacgcgctcgccgaccacggggaggaactatgagccccgaaaaaccagacgctttgctgtggatggacgtggaaaccaccggattagatgcgaacaagtgttcgatactggagattgggttgcgctgcaccacattggacgcgatgcgagagcacgcgctcctcgaagcggtcgtccacatcagccgggagaccatgctctccgcgcaactgcccgccctggacctgcatctgaacaacggtctgctcgcccaatgcgagaccagcgaccccgtccactgctcgcccgaggcaatcgcacggaagaccgtgagattcatcaaggacatgagcggcatgtacacgctgcaccccgcaggcacgaacatccaacgcttcgacctgcccatgatcctcagattctgcgaacccgtggaacgcgtcaacgacctgctctcctaccgggccttggacgtgaccacgctgaggctcgcggccaaggcgcttggccgagacccctacacgcacagggccaagcccacgcaccgggtccacgactgcctggacagggacatcgcggaataccggcactacctcaccctcatgaaccccaaggagaccgtatgagccagagatgtactccacgcgggcccggctgctactaccgttgcccgatttgcggtcaatggtggcggtacgacccgccaaccgaattctgggatccgataaacacgctcggaatgttcttctcgcaccactcagtgtggaggcaggaacgccaacacagaaaggcaaatcatggccgaaccgattgacctcacccaacaggcattgacggcgctcgccgacgcgggactgggcaacgagtcggcggccgaatcgttcgtcatcggatatcaggcgggctatgacgcagcgctcactctggccatcagcatagaaacccatctcaactcgaatgagccgacagacgaagaaatcgagacctgcgcccgaggattcttcgagggaacacccggcatcaccaactgggacgcagtcagcgagcactcaaaacaagcatggctgcacgcggccaagaaagcgctcgccgccgtcaacacgatgaaaaccgaggaggaatcatgagcatcatcagcaaggaagcgtgcttccgctaccccaactgcacggtggacgacgtgcacgacgcgttggcccaggtctacaccagtgacgacttgcaggaggcgtacatgaccggtgcggaacgggagcccaccggcttggaggtggaagccgccgccgaacagctctactactcggactgcaacagttccggcctgctcctcgactcagactggaacagactaccggacggcaacaaagccatctaccgcaaccgggtgcgcacaatcatcacaacaatccagaaaaaaggaacagcagaatgaacgagaacacgaacctcaccgacatcatcagcgcggcgctcgccgccggatgccagatcagcgtgaccatcactcccaaagacttctacaacgaatcacaggagccggaggaatgaacgtgagcgaaagcatcgactggcggcattccacgccgggagagcttgacctgcaccggttcatcggactcacgaggagaggccaaacactggacggctatctctcctgcttcatgcagaacggctggtggacactcaccgacgccgacaatctcgccaccgtcatcaaaccggacgccaacggaaaccccacactcaacaccgaactcttccgctccatcaacgtactcaaggaaataagaccatgcaaaaaactacattagtccaccacagaactacattaaccaccaccggtttttatagcgcgctcgccggaggcacccgatgaggcgcgaaagctggtcggtggaatccaccatcggactcctgttcaccatcatcatcgcgatactggcactcgccatcgtatccgccatcggcctggccgcgtacgccgcgatggacaccggccccagccagcgcatcgtgcagcaggtggagaccacgggcgacgttcgccgcctatgcatcgaggctcgaaccggcgagcgcgtcgatgccatgtcatgcgacttgattgatccgcatacgggaggtgttgcgaagtgacgagtcaggcgatacgcgacaaggtgctcgcatggcacgggcgcggctacggcgcgacggatacggcccgtcaattgggtctgccgttggaggaggtgcgcgcgatcatccgcgagggcgacggtcggccgaaaccgccatgcaaggtcgagttcatcgaaccgccgctgttcgaggaatgaactgaaataccagataaaaacgaaaccctccacacgaggcggagggcatgtcagcaagcaaccagtttagccgatgtggaggggtttcgtgaactgccagaactgcaacaccataatcgaaaacgggtacgcgctgtgcacggcgtgcgagctgcgcttcgccggcacgctcctgcgactcgcgcgcgacgtcacgccgttgcacgactcgctggacgcgaccctgcatccgggcgggcatgcgcccgtcaggatccagacggccactcccccgactcctatcaggcttgacgtgctcgacctgctggacatgctcgatgcgacggcgcgtgagctgtggcgttgtttggatgtcatcgatgccttggattggcacaaggatccacgcatggaggacctcgaggccacgcttatcgactgtgcgggccatcccaggctcgccacgttcgcggatgccggcttctacatggcgaccatcaacggcatcgcccggaaaatcgacctcacgttggatccgccagagcagcgacgcgagatcggcacgtgcgagctgtgcgccacgatgctcaccgcaggcgcggcagaccagtgggttacctgtcccgtgtgcggacgggaacagcgagcgcagacggtcaaactgcgtaggctcaagacgttgtgttgggatgattccaggcgagggtcggcggctgagatagccaaggcgttcacggatgcagggataccggtgcgtaggggtacgctcaacgtgtgggtcaaccgaggcaagctgccctccagccctcagggcctcgcctattgcgacgtgtaccgactcgtgatcggcggagcggcttgacaaaattgtcactgtaaccgatgattgcagtggcagaagtgtcgaaaaacccagctcacgtggctgggttttcgcgtatctgaccgcattgcatggggcgagagcactccgccggcacgtccaaagcgccggtgatgttcgccccgccactcttttcatttgattgtgaggcgatgacgccatgacaatgccaggcatgccgaccatcagcctgcagatcacatgcaaggggaacaccctcggcgacatcgacgccctgcctgtgcccgtgaacatcaccccggccgggcatattgtggtcgaccccctcgaacccatcgtgcgccgggccacgcaggcgtttatagacacctggcagcagctgtgcgcagagaccgagccatgagcgggcgcggtgtcaacccgcgttggagcaacggataccggcgccggaaggaacaagccaggtaccgggccatgggagcaaactgctatatctgccttcaacccatcgactactccctgcgctcgccggatccttggagcttcgtgatagacgagaccgtacccatcgccagaggcggcagggtgtgccattccaacagcgggcccgcgcaccgctggtgcaacggcatcaagggcactcacacgctcgaatgggcgcgcgagcgagtccgtcagctgctcgacgaaaacgatggcatggccccggtcaaacccacctcgatgggcttcacgtccagcgactggtgacacgagggtggcgggtataccctgcccggccctcccgaggcgtcctcgggtgcagcgcctttttttacacggttgtttttccacatgggaacggagcgtaatcgatgacgaagcctgccgagcggaagacctcgaccgtctataacgcggcccgttccaacgacaggcgcagactactggtcgcgttgcgcaacaagatcgccgccgcgttggacgaaggggttcccgcacgcgatctggcgtcattgtcaaagcggttgtcggacatcaccgcggagatcgcggccatcgattcacgcgagcatgcgaaggagaatccagttgtgcaggcgttcggaatcggagaccagcccatcgatgctggttccgggggcgagtgagctcatcatccccgaggggatgaccgccaccagcgagccctcgctgaacgcgttcgtggaggcgttgggtttcacgctcgacccctggcagcgggccatcaaccggatcgccttggccaaacgttcggacggcctgtgggcggctcgcaacgttgacatgagcattccccgccagacgggcaagacgttcgacgtcggcttcgtgcccttccaccgttgcatccgcaacccacggttcacggccatatggaccactcaccacttcagcgtcactcaggacacgttccaaagcatgcgcgatatcgcgctcatggaggagatggagccgttcatcgaccccgaccacggcatacattccgcagcgggcaaggaggccatctacttccgcaatggttcgcgcatagcgttcaaagcacgtgagaacggagccatccgcggcttcaagaaggtgggtctgctcatcctggatgaggcgcagcacctgtccgatgcggctctggcctcagtgctgcctacccagaaccgtgccgacaatccgcagacctggtatatgggcactccaccggggcccacgcagcagggcgacgtgttcgcacgccaccgcgccaacgcgttggccagacggtcgaaacgcaccctgtacgtcgaattctccgccgaccgtggcaccgacccgctcgaccgcagccaatggatgaaggccaatccctcatatccgctgcatacgagcgatgaaagcatattgaacctgtacgaggagctcgcggaggatgacttccgccgtgaatgcctcggcatctgggatgaatccacgttccgttccgcgatagacgcggacgcatggcgagcgggaatagtggaggaacgcaagcccggcggttggaacgcgataggcgtggacatgccgcccgaccgcacgagcctcgccatcggcgcatgccgcgcatgggaggacggcaacgcgcacatcgaactcgccatgttccgcgatacgaagcaatacggggtcgcgtgggccgttgattggatcgcgcaacgctggccgcgcatggccgcggtggtcatcgacgcgcaatccccggccaccgtattggtgcccgatctgaagcgtcgcggcgtgaacgtgacgctcaccggcccgaccgacatggggcaggccgtgggccgtttccaggacatgatcagagaccgcagactcgctcatctcgaacaggccccgttggatgtggccgtaggcgggtgcgcgttgcgcaacatcggccaatccggagcgatgggctggaacaagctcggctcggatgttgacatcagcccgctggtcgccgtcaccttggccctgcatggggcgatgacctcgaaacgcaggcccggacagaagcaaaggatgattcgactgtcatgatcagtttcccaaacaccatcagcggcctgaccaacagcgagcaggagctttaccgcaagctgctgcgacgcttgctgaagaagcgcaggcgcaaccggctgcgttccaagtactataacgggcgcaacgagttgcatgatattggttattcgctgcctcccatcgccaaggacatcgatatcgtggtcggctggccggccaaggccatcgaaggcctcgccaaccgtgtgaggctcgacggcctcctgccggctgatggcggcgagctgccgtcttcggtttccgatctgatggatgagagcgatctcgtgcagctcgcgcagagcgtgcacacggacgcgttcgtccactcctgcagtttcgtggccgtgctctccggcgacacgtcgaagggcgagccggaggtgatcatccaggagttcaccgccgacgtggccaccggagaatgggacaagcgacgcaaccgtttgaaaagcgcgctcctgttcgacaccgacgatgaatgcgatgaaatcaccggcatctacctgatgcactacgggcagaccatcaccatcgacccggttggagcgggctggaaggtcgggcatcgcgaaccgaacgaccagcagcgcatcccctgcgaactgttcgcctaccggcccgacagcaagcgcccgttcggtcgttcgcgcatcgaccgcacggtgatgagcttgacggattcggcggtgcgcacgttcctgcgctccgagatccaggctgaactgtattccgtcccggcacgctatttcctcggggttaccgaggacatgttcaccgatgacgacggcaatctggtgccgaaatggcagatcatgctcgaccaggtgctttccctgccatccaatccgcagaccggccagaacccggtcgtgggccagttccagcaggcaagcttcgaaccgcatctcgcccaattgcgccagacggccaccatgttcgcctcggccacgagccttccaccggatgcgatgggcgtgctcaccgacaacccctccagcgcggaggccatcgacaaggcaagcaaggaattatgcctgctggcggagagctgccacacatggttcgggcacccgtggcgtcgaattatcgaacgcgcgcagatcctcgccggtaatggcgacgtgaaaaccgtgcaacccatgtggcgcaatccaagcacgccatccaaggccgccgcagcggatctcgcattgaaactcgtgcaaggcaacatcctgcccgcggacagcgaggtcacctacgacatgctcgacctgaccgaccagcagcgcagcatcctacgcggtgaagcccgccgagctcaggcacgcaaatacatcgattcattgacgaatggaggtacagatgtttctggacaatctgaatctgcctccggaaacagccaaagcactcgaactcggactcaatgacctccgcgacgattatctcgacaacctgttcgacctacgcaaacaagcggagacggccgcggaggaaatcatcgaggaatacggcaatgatttgacgctccttcgcaacagttacgcggattacgcgcagagaaccaccgaacttgccaatcgttactatgcgaatgtccgcgacctatgggacgcgctcgccgacgttgacatgccggcgttctccggcgtatccgtggattccgacgaagcggcatggaaacagttcggcggagtcaacaataccgatcatccgggctacacctatgactctatacgttccggccacaacaaggcgggcctgaatatcgatgacatgtggaatctgggagttcgtcatctcgactcgaaaggactgaagaccctcgcaggtcagatcgtgcgcaataccgcacgattgaccattgagaactccgccgtggccgaccccactcgaccccgttacgcacgggtgccttccggcgcaaagacgtgcgcgttctgcgtcatgctcgcttcccgcggattcgcctactccacggagaagtcagcaggcggggaagacgaaaaataccacaatgattgtgactgcatgattatccccagttggggaagaaccaacatcaagaggtacgaccctgccaggtatctgcaaatgtacgagacggcggtgaaacgtaccggaaccaccgattcgcgcatagtcacccaatggatgcgccacatgtattcgagagagctcacagacggggcggaaccaaagaaaaagcgcgccgcattctctatcgaaaaagcatttaccggcatgcgcggcgagaaatcggtcagcaagaaagcgtgggacaagcggcaaaagacattgggaatcccccttgattgggacgttctcgaaatgcatgagatcacgttcatggaacgattcgcctcattcggacagcgtttcgaatggataccaaaggatgacagcgcgtcccatatgcccaccaacgatttccactggactgaaatggggttggacgtcgagctcaaggcaacgaaaaaacagcatccgaagtgcgacacattcgctaaagccatcagccgagcagtgaataaagccataggtaaaggagtcgtcaaagattccttcatcctggacgcttcaggcgccgtcatctcaggtaaagagctggctcgccttgcggaatacaatgtccttcaccccgattcgagaatcagtcatctgttctatctggacgagaaatctgatgggattaaagaaattgttctgaaatagcaagtccgtggcactcctccacaaaaaaagtcattattccagactcgcagaggaccacggacatatttgattttatcatctccggcggattgccagagcggtcgattggagccggctgtaaaccggtcgcccttgttgcctcgcaggttcgaatcctgcatccgccacttctcgcggaccccgcatgccgcgtcgttaaccatgcgaatcaaccaaccataaggagtaacccatgttccgcaacaggttcatgctctaccgtcaccgccacctcatgttcatcgactccggcgaacagtccggaggctccggagaaccatcagccgagcctgaaaagccgactggcgagaccgatggtgaagaccgttccaaggatttcagccgtgcgctcgccaagcgggtcgccgagatcgaggccaagtattcggattacgaggagctgaaggccaaggccgcgaaatacgacgagcgtgagagcgagtccaaatccgatatggacaagctcaacgagcgtctcgcggccatcgagaaggaacgcgacgagctgaaggcctccgaggagcatcgcaccctggtggacaaggtcgccaaggagaccggtctgccggccgaagtggtggcaatgctctccggagacgacgaatccgcgttgaaggagcatgccggcaagctcggcgagctcatgtcctccaagcagccgaagccgcgtcacggcagcccacgtaccgcccaggcggacggcaggcgcgccgatgacaatcccacggctatggatctgctgcgagacgcctactccgactgatttatttttttgaaaggagccaatcatggcaatcacactggccgaagcggccaaactctccactgattccctgcagcgcggcgtattggagacgttcgtgcaggaaagcccgatcctcgaccgcatcccgttcctgagcatcgaaggcaacagctacgcgtacaacgaggaggccacgctgccgggcgtcgaattccgcaacgtgaacgaggcgtactccgaatccaccggcaccgtgaaccagaagagcgagaagctggtcatcctcggcggcgacgccgacgtggatcgcttcatccagcagacccgctccaacctgaacgaccagcgcgccacgcagaccgcgatgaaggtcaaggcgatctcctacaagttccaggacacgttcttcaacggcgacaccgccaccgacccgaagagcttcgacggattgaagaagcgtctgaccggctcccaagtcatcagccccgccgccaccggtctgaaggtgctcggaaacggcggcgccgacgtacacgcgttcctcgacaagcttgacgagctgctggcagcggtgcgcggcatcaacgccacgaacggcgcgatctacatgaacagcgccatcatgggcaagttccgctccgccctgcgtcacatcagctatgacaccactctccagcaggacatcgccggcaagcgggccctcatgtggaacggcatcccggtgcttgacgccggtaccgagaccgatggcagcatggtcctctcccaggatgagaccttcggcgatggagagacggcgctggcgaacacgtccagcatctacgccgtcaagttcggttccagcgaaggcgatcaggccgtcaccggcctgaccaacggcggcgtcatggtcgaggacctcggccagctgcaggagaagcccgcctatcgcacgcgagtcgagttctactgtggtgtgggcgtgttcggcggacatgcggccgcacgcctgaacggagtgctcaatgcctagcaggaccgaggaagtcgccaccgacatcctcgacgaacccaccccggtcgccaagaaaacggaaccggctgccgtgaaacccgtgacggctccggctcctgtgaagaccaggcgcgtcaagaccgtgccgcatcgcgtcgaatcgttcgaaacggtgcggccggacggcgtgagggtgagggttcgacgggatattgacaacggcatgcagaccatcgagatcgtgtaggagacccatcatggccgacaccatagccggagacgcattcgccgatgtgaatcagttggaggccggatggcatccgctgctcggcgacgaacgcgcacgcgccaccgaactcctggcccgcgccaccagaatcatcaaaggagactgcccgaaatggaggctctacgagcttcgcaatccgggcacctgcggtgacatctgctgcgaaatggtacgccgcgccatgatccccgacagcaacggccttgctccggccggcgtgacgcagatgaacaccaccacgggctcgttctcggacggctacacgttcgcgaacccgatgggcaatctgtacatgctcgacacggagaagcgcaggctcggcgtgggagtcgagaaggcgttccagatccggatggtcggaggaaggcatcgtcatggaacgtgttgacgtgtatcgtggcgcggccgaaatggatgccgacgggaacccggtgcagggtgagatgcggcatgtggccacgctcatgggtttcgtcgcgccggtggaggcctcgcagtctcctggcgcggattcgcagggcgtggcccgtcgtttcaccctgtatttccgcggggagcccacgggaatcctggacacggattgccttgtggtgcgcggcaaaccgttgatggtggatggtccgccgctcgaatggtggcgctgcgggcgtcatatcggcgacgtggtcaacgcgttcgtcagggagggatgaaaccgatgggcaagaaggtcaaagtggtgctcaaccgcaatgcgttcagctccgaggtactgcacaaggccgtgaaaccggtcatggacagtgtgcaggagcagatggagggcatggccgaagtgcatccgtccatcaaggtgtatcggaacgaggacaccgaccgctcgaacgtggtcgccaccgctccggccgcggtggagggcgctcatggcgtgctcacgcagatgatcggcaaggtggtcgcatgagcgtgttccaacctcccaccagaacaccccgtttggaacgaatcctgctgaacctgctgcgcgaacgcttcccggatgtcgtgttcggcacgctgcacagcaggaacaatcaggaatccgaatgcgtgatcgtggcggaaccgcagcagaaggcaacacccatcagccagtacgtgcgcgtccgctgttccatctgggtgcgcagggacgacggcaccggtgacctcgacgcctcgcacgagcttgccagcagcatcgaactgtatctgaccggcttgtggcctccgactccgatcatcagcatcgagcatgattccgggccggttcgcatgaccgacgagaacggctgcatctactcgtatctgattctcctgcttcagacgaacaccgtttgaggcagtccataattccaacgattcgttttgaaaggcgatcatcatggctgacaacagttacatcagctcaggcaacaacgccgaactcgtgcgcgccgtcaaggactacgcattgttcctgttcggcgaaggcgagacatacacgaaaccgacgggcgccgattggacgccgccggcgaacaagctgcccatcggctacaacagcgaggacggcaccaccatccacccggagccgggcgacgagaccgagatcaagggccacaacggcgacgtggtgtattcggagaccgatccgggctactggacgttccagttctccgcgctcgaaggcaagaagagcgtcgtggaactctacacaaactccaccgtggacaaggatggaggcatccacgtcaaggatgcgtccacctccaagaccatgtcgatggtcatcgccggcatcgaccagaaggaacgtcccatcgtcatccacgcggagaagatcaaggtctccgaccgtgacgacatccccctcaaatccaccgacctgctccagtacaacatgacactcaagacgttcaagggcagcgacggctaccagtggcatgcgtggggaatggtcgtggaaccgtccgcatccaccgcagcccataacgccacggcggaagccgcagcccataacgccacggcggaagcctgaccagcttcctcccccgcgggactccgctcttcacccgcggggcttttgattcttccccgcatccaggatggcggtcccgatgcggggaacctcatatccgaccgccaaaccagcaaaaaagaaaaaccgtatcaaggagaccgccatgaccaaccaatacgcgaaggtcgaacccatcatcaacgacgacgaccagctggaggacgtgcacctcgacgttctcggcgtcaaactcgacctgcccaacctcaacagcgccgacctgcccatcgacctcgtcaacgtgatcctgctgatcaaaagccagccggtgctctccgacgaacagaccgcgctcgccatgagcgcgttcctcgcctacttccaacagttgcgtccggactattggaacgcgttgcgcaagaccggccacgccatggcatggctcaccgccaccgtgcgcacctgggccgaacaatccggcctcgacccaaaagcgtttacctcagtgccctccacgccaaccacagggaagcgttagacgccgactggctcgccacataccacaccacatggaagcccgtcacgctcgccgaatggctcaacgcgcccgcagacaggaaacccaaagccaactacggcatcggccaggcatggcggctcacgagacagatcctcaggaaccataccagccattgtttcgcggcgctcgccggctggacgtacacgcccaccggggccgaaatcgccatgtgggacatgttcgaactcgaaggcaggctgcaacgcaaaggctggcgaccctggacggacaggcacgcggacccgttcgcgccgacgcgattggaaaccagccaagcgcgtaaggaacgactcgaacgccgcgaacgcctcaagcaacgcttccacatcaccgactagccccgaccgccatcggggagccaacaccactatcaggatggaggaccccgatggcacaggacatcggcaccgtatacgtgcaggtggcaccctccggcaaggacttcggcaaaaccctcgaaggcgacatcaccggcagtgtggacaccgcagccaggaaaagcggaggcagcctcaccggcaccctcggcaaggcattcggcaaaatcggcaaactcggactcggcgccatcggcaccatcaccggaggcgtcaccgcgctcgccgcaaaaggcggcttcacccgcgccctgaacatcgaaaacgcgcaagccaagctcaaaggcctcggccacgacgccaacagcgtcagcgagatcatgaacaacgcgctcgccagtgtgaagggcaccgcgttcggattgggtgatgccgccaccgtggccgccagcctatcggcggccggcatcgcatccggcgagcagatgaccaaggtcctcaagaccgtggccgacaccgcgcaaatctcgggccgatcactcaccgacatcggcaccatcttcggatccgtcgccgcacgaggcaaactccaaggcgacgacatgctccaactgatgagctccggcgtgcccgtcctccaaatgctcgccaaacacctcaacaccacctccgaagacgtgtccgacatggtctcgaaaggcaaaatcgacttccagaccttcgccgacgccatgcaggaagggttgggtggagccgcattggctgccggcgacacgttcagcggcgctttggcgaacgtgaaggccgctctcagccgattgggcgaaggccccggcaagctggcgctcgaatcgttgcgcaagacgttcaacgcggccattccggccgtggacgcgctctcaagccagctcacaccgttcgtggagcagttgaacggcaagctcaccccgtatgtggacagggccgtcaagctcatcgagcaattcagccaggggttgcaggacggcagcatcaccgttcaagacatcgtcggcagtctcggccaattggccggagcgttcgcattgttcgccggggtcggcggcaacgtggacaagatcaccaacgtgttcgacacgctcggcaaactcggtgacggcgggatcggccagctcaccggaaagctcaagcagatgcccggccagctccagtcgagcctgacgggcctgcagcagttcaaatcgtatttcaacaaggatatccgcgacgctctcgccgtggacggcgacccgttcgcgtcggccgtcaaccgcatccggcagggcgcggacaagctcacgggcccgttcagactgctcggcgcgaagatcgcgggctccgatgtgggccagtcggtcgccggagtggcggacaggctgggtgtcggattcggaaagctcaccagcgcattcgattcgaacatcaaggtgctgggctccaaagtcggcaacggcttcggcggcatattctccaagatctcggacagcaagctcgtatccggactgtcatcggtggccggcaaggcgaaatccgccatgagtccggtcgtatccggattgggtgacgtgttcggtggcatcggcgacatcgtgggtccgaaactgcaggccggattgggcaagatcggctccctgttcggctcgttcttcagccccggcaatttcatgaagtacatgggcatagccggcatcattgccgcgttggtcgcgggtctcggcatgctggaccagagcatgcaggggcagttgttcgcgatgataggccagctgtccgcgcaactgccgacactgctgcagcagctgaacatgcagatcaccgccagcctgccggccatgctcgcgcagggcgcggccatcctcaccgcgctgatgaacgcgatcagcacgaacgcaccccagctgatgaccaccgccgtgctcatcgtcaccacgttggtcaacgggctggcctcgcaactgcctacgctgctgccggccgcgctcaacatgatcatggcgctcgtctccggattggcatccaacgtcggacagctgctcaacagcggcatgcagctcctcctcggcctcgtgcagggcctcatgaacgcgctgccgcagctcatcgcgcaggcacccaccatcatcggcaacctcgtgcagtcgatagccgcgaacctgccacagatcctgcagacgggcgtgaagatcctcgtgaccctcgccaacggtctggccagcgccataccgcagctgatcggtaagatcccggccatcgtgaaaagcatctgggacgctttcacgtcggtgaactggggcagcgtcggcatgaacatcatcaagggtatcgccagcggcgtcgcctcggcggccggcaccctcgtcaacgcggccgtcaacgccgccaaggacgcgctcaactgggtcaaggacaagctcggcatccattcgccgtcacgcgtgttccgtgacgaggtcggcgtgatgatcggccggggcatggccgaaggcatcgaccgcagccaggaagtcgtcaaccggagcctcggcgaactcgccgatgggctcacgttggacggctacacgttcggcatgcccacccccgtgatgagcctgccggccaacgcctgccagatggtcaacggcacgcagtcgaaccagcagggcatgcaatcccagttggacgagctgctggccgaggtgaaggcgttccacgaggatatgccgttcattctgcaacagttgggcatcaacatcgacgggcgggaattcggaagggcggtgcgacgctatgcaaaggcttgagtacgtgtgttccaccggcggctcgatctcgttcgaaggccccatctacggggagacgatgccatcgttgagaggacgcgcgtggacgtacacgctcggcgcgcgcacccttaccggggtggcatggcaggcccgtgaactcacgcttacggtgaaggccgtggacggcgaaacccaattggaccggctgcgcatgctcaccgaccatgacgtgctcgcgcactccagggactccacgatatcgggcctgctgcgcgtggacgacgtgtgggagtgcagggcgctcatcaccaaaagcgaaccgcaatccatcacgccgcgcatcatcgaaacccaattgaccgtgacccaattgggcatgtggcgacgcagcctgccgaccgtcacctatgcgcccagcgaccccgacgcctaccagtatctcgatcacccgtatgacatggactacgattacgggccgccatccgccccaccggtgatagccgtggacgggttggacccgatgccgttccgcatgaccatatacgggccctgctcgaatccgaccgtcacgatcggcggcaaccagtaccggatcaccggtgacatccccggcggcgctcgcgtcgaggtggatgcggtggagggcgagcgttcggtggcgttcgtcaacgcggccggcgaccgggtcaactggttcgcgaacgcggaacgcggtgccggccttgattccggcagctacatcttccagccgttgccggcgggccgcgccgaagtgagctggccgggaggctacacgttcgagctcacgccagtcgaggagaggagcgaaccaccgtggtcagtctcatagtcaccgacgcgaagcacaagccgttgcgcgcggtggacgactacatgctcgatctcgcctacggcagcgatgagaattcgttcaaactcacctgcctgccgcagccggaggccggcgcgctgatcataatcgacggcaccgaatacggcgggttggtgaccgtgcgcaacacggacggcagtgtggagggccccacctggcatggcctgctctcacgccgcatcctccaacccgatacgggtcgggattacctcaccgtttccggcgctgccaacgatgtgctcaacatgttgttcaaacgcatcggattggatgcgctgttcactgcgtcagcacggcacgcggtcaccatcaacccgtattcgttcgaccggtatacggacgcgtacagcggcatccggaagatgctcgccgccaacaatgcgaaactccgtctcatctgggcagacgggcgtgtgaacgcgtatgcactgcccgccgaacactacggcgacagcatcgacagtgatctgctcgaattcaaggcctcgctcgatagccagccggtgaaccatctcatcggattgggcaccggggaactcaaagaccgtgcggtcgtccactggtacgcggatgtcaacggcaacgtgagccaaacccaatcattgaccggattggcggaacgtcaggccgtctacgactattccaacgcgaaacccgacgagctgaacaccgaaaccaggaagaagctcatcgaactgcaatcacagggcggcgtcgaggtcaccataacggacaacacgttgagcatggacgttggcgacacggtcaccggccgtgacaaccggctcggcatcacgctcaccgtgcccgtggccaagaagatcgtgaaatcatccggcggcatcctgtccgtggactacgagtgcggcaccgcgtcaggcgatacgacgagtctcagcggctcggcggaatccaacggctccaccggttcgggcggctccggcgcgtactacgcggacggggtcaccatcaccatgcgcaacaacacgttcagcgcggtcgtcaccccttcgcgcgtggacgacgtggagaaaacagccaaggacgcatacacgctcgcctcgaactattcggccgaaatcggcaaggcacagcaggattccgtcgccgccatcgccgcggcagccatgaacgtggcttcgataaccacggccacgccattgtccgcgagcaggaacggccaggccgtgcacatcacggcaacggaggccacggccgaaggatccggactcatgagcgccgcggacaagcggaaactcgacggattggagaactacgcgcttccggccgccaccattgccacgttgggtggagtcagacctgacggcagcaccatcaccgtcaatgaggatggcgtcatcaccgcgcacgccacatcgaccggcaacggaatcgtgttcccggtcggctacgtggtcatgaacaccaccggcaacaatcccgctgacgacttcggcggcacctgggagcggcgcccctcattgggcgcgcatatgtgggaaaggatcaagtaatgacacgcaacacattggggcgtagctgcctgctcgaagcgaacctcatcctcgtggccggcgtcaccaacacataccggttgcgatggctgcgcagggtcaccgaccggcagggggccacggtcgcaaggccgatggacctgaccggatggactccgatcatgcagatacgccgcgacaggctcatcgtgttcgacctgacgccatacgtgcgattggacgaacacggctgcatcacgatcacggtgcccgccgacacgacccgagacctgcccgaaggcagtgccgcatgggatctgctattggccgcgccgaacggggatacgacccgtctggcggcaggcagcgcgctcatcgaatccaccgtcagcatgaccacaggaaggagccaatcatgatccgcacgctgaacggctgcaactgcgacgacctggtcaccatcatcgacgacgcgatcgtcatggaaggacagaaaggcgaaagcgcctatgagaccgccgtcagactcggctaccagggcaccgaggccgaatgggtcgactcattgcacggcaaaggcatcacgctcggccacggcgaccccaccagccagctcacggcccgtgagggggacggctatctgaacgccgacaacggcgatctgtgggaatacacgtcggaaccggacggctccgaggaaaccaatgataaggagaacaatcatggctaacgcatggaagaaaatgggttcgctgcgcggccccgctggagcgggagccgacgtggccaccagcaagaaggcgggcgtggtcaaaccgtcaggcgatttcgacatcacggcggacggcaccctgagcctgtacacgccgatgagcgtcatgagtttcaccggcggcagcgaccatgagatcggtgagaccgtggacaccgtgaacctcgcatggaagctcaacaagaccccggccacgctcacattggacggtcaggaaatcgtgaagggcgaggacggccaattccccaccagccaaccactcaccaaacaggcactcaaggccaacaagacctacacgctcgccgtcaccgacgcgcgaggctccaaggcatcgaaaaccaccagcgtcctcttccactacaagcgctactggggtgtgggcggaaacccggcagatagcgtcgacagcacgttcctgctcgcattggccggctcggagctgggtgattcgaaggcgaagacgttcaccgtgaacgcggccgcaggccagtacatctggtatgcgatcccacattcgttcggcacgccgacgttcaaggtcggcggcttcgaaggcggtttcaatctcgtgaagacgttcgaccacacgaacgcgtccggagccaccgtctcgtatgacgtgtggcagtcaaccaacgcgggcctcggcaacaccaccgtgaacgcggcctgagaggaggagaatcatcatgtccatccagctcatcgacaagatcaagcagaagaacgacggcaacttctatctcgttgacgccgtggacgtcgaatacaacaagaaaagcctcatcgacgccttgaaggccggcgacatcattcccgcaggaggcggcaccagtgcgggcacgttccacgtggccaacatcaacatcggctcaaacaccgcgttcgattcctcgaaactcaccccgagcacggtctctgccggcgatctgatcgtggacgccaacggcgccttctacaccgtggcgaaggtggacggcaccaccgtcaccccttccgccgcattgaccgcggatggcggcggcacgctcggcttcaagggagccaaaggcgacaagggtgaacccggtgcgcagggtcccgcaggcccgcaaggcccgaagggcgacgcgttcaccatcgccaaaacctacgccagcgtcgccgaaatgaatgccgactacaggaacgcggacattccgatcggctcgttcgtcgtcatcagcaccaccaacgtgaacgatgcggacaacgcgaaaatgttcgtcaagaacgacacccaatacgcgttcgtcaccgacctctccggcgcgcaaggcatccaaggcccggcaggcccgcaaggcatccaaggcccgaagggtgaacccggtgagcaaggcgagaagggtgccaacggcactccaggagccaaaggcgaaaccggccaacgcggcaaccgcatcaccgtaggcgacggagaccccggagaaccaccggccgacgcgctcgccggcgacgtgtacatcaaccaggcgaacggtgatttctaccaggtgcaggaccagtaaaccccgcatccctcaaaacccagtcagtcaatgccataaccaaccagcagtaaggagcatcatcatggcatatgtgaagaaactcaacctcaccggcccgcagggacctcagggtccgaagggtgccaccggtccgcagggccctcagggacctcagggtccgcagggcgcgaagggtgacgcgttcgccatcgcgaaaacctacaagtccgtggccgaaatgaacgccggctacgccaccgacggagtgctcaacggccagttcgtcatgatcgacaccggcaacgtgaacgacgcggacaatgcgaagctctacgtcaagggagccaagggatacacgtacatcaccgatctgtccggcgccaccggcatgacgggtccgcagggaccacagggtccgaagggtgaaaccggcgcacaaggcgagaagggtgccaccggcgcgaaaggcgacaccggcccacagggtccacagggcgtgaaaggcgccaccggagcggctggcgcgaagggtgaaaccggccctgccggacctgcaggccccaccggcgccaccggcccggcagggccgcaaggcgagaagggtgccaccggcgcgaagggcgcggacggcaacaccatcacctacggtaccagcgcaccggcagccggcgccaccggcaaggccggagacatgtacatccaatccaacggtgacctctacatcttcgaataaaggccgcctgtgatggcatacgtcaagaaaaccaacctgcgaggcccgcaagggcccgcaggcccacaagcctcaaccgaacagatcttcgacaaagcctggcccatcggcacggtcctcgaaaccaacagcgacagcacgccacccacctacaacaccggctggaagaaactccccaacatcatgggccgtggattcctctggcaacgcatcggataaggaaacgatcatgacagtcgaactcatcaccggcttcgccggcacaccacacatcggcagcgacgacgtaggcgcattcaacgccggactcgtaggccccggcgactacgcgctcacgaccggtaatcagctcaaggccaccatgagcaacgcgaacaccatcgccgtccaatcaggcgacgccgtattgaacggccgccatgtgcacctgaccggcaccaccaccgccaccgtgcaatccggcacccaaggccagaaacgcaacgacatcgccgtgctccgctactcgaagaacaccaccagcggagtggaaacctgccagctcgtcgtcatcaaaggcacgccaaccaccggcacgccagccgatccagcccacaatacgggctcgatcctcgacggcgtcgcaacccacgacatgcccctctaccgggtctcgctcaacggcatcaccgtcggcaccctcgtcccgctcttcaacgtgctgaaaccaatgaaggacatgtgggattcgctagccccgctgcatctctacactggcagtggcgtctataaggatgccggtagcggcggctacgcgaccctgtggacgttcggccagttcaaaacccagttcggccgcgactggaacaatgacgtggtcgttgccgccatcaacggtgactgggacgcgaacggccgtcaggtcacctctgtgcgtgtcagcccgtccggaaaccgcatcgatgtcatgttcgacggtaaaaacacggcacctatccgcgtcaactgggccgtcatgtggcgcggatagggattcgctaaccc

SEQ ID NO: 246 - DNA, 7284 bp, Unknown
  R101_18m  MAG No. k141_45944
ctttcttgcagcctcttcttcagccgccaagaaggcagctgaagaagaggctgcaagaaaggccgctgaagaggcagccgccaagaaggcagctgaagaagaggctgcaagaaaggccgctgaagaacaggctgccgcgcaggccgaggcccagcggcaagctgaggaggccgctcgacaggcacaacagcaacagcaagcgcagcaaaatgtgcattatgcgaattgctctgaagttcgtgcggctggtgctgctccgttgtatcaagggcagcctggatacaacggcaagttggaccgcgatcacgatggcgtggcctgcgagtaacggattcgatatttcggcgactcagcgcttgttcgggccgccgtccgggaacatcaagtaggtgatgatgccggcggcggttccactggccaatgcgccggtgatgacggcaagagcctgcatcgccgtgctgagcgtgggcttgcccgttgcggcagtctttgaagccttcaatgtggcggcactgggcttgcgtttctcggtggcggcgttgtcggcaacgttgccacagcctgtattgactggggcattgtcggcaacggcctcgccgtcttgctcttgggcgcgccgttcgcgaatgcgttgctcaatgggatcgtcgaccaaagtcttgatgatgcgtgccagatcgcggtcttcacgacgtgcgatctcggcgctgaacaccgtacgtaaagcgagatactgcagcttggtcatcgggcttttgccggtctccaagttagacaccgtctgtcgcgcgactcccagctcgtcggccagttgctgagtcgtccatccggctaccttgcgaatcggacccaggttctcctgaaacttatcaatccaccattgttcgatttcagacgtcgccattacgcacctccttccacgctgtcaccagtgtacgttacctgtaccgaaatcaatccaaaaaacagtgttcatgtgaaattcactgcgtatttgcgctttcgccggcttaccgagattagccttagacaaggaataacagagtagaagcagaaggtatgcgcgtattcgatttcgacggaaccatctatgatggcgaaagcctgttcgacttgtacctgtattccgcccgccacgacccgaaagtgttccgctatatcgcccccgtgctgcggtacgcggtcaaatacaagcttggccgggccacgcttgaacaaatggaatacggcgtgggcaagatgaccgaaggctatctcacggaactgagccgatccaaacgggtggcgagcgtcgaacagctcgtggacgatttctgggaccgatattacgcacgtatcaagccttggtaccagcctgagtcggacgatgtgatcctcaccgcatccttcggtctgacggtgggggaggcctgccgcagactcggcgtgaggaatctcgtggccagcgaggtggatgtggagacgatgaaggtcacgtacctcaacttcaacaccaacaagaccaaacggttccgcgaactgtacggtccggacgccgtcatcgacgagttctacaccgactccaagttcgatcagccgatgatcgacatggcccggcatgcgttcatggtcaaggggaacaccattacgcaggtcaagtaggaaacagcagaaaacaacacaacgtaaccaataacgaaagaggaatccatatgagcatgccgctcgatctatacgtaatccggcatggcgaatccgaagcgaacgtcatcgtccaggcgggcgaacagggcgacaactccctgtatacgcaggacaacgtcaccgtacccgaccgctcctggagactcaccgccaccggacgcaagcaggccgactgcatcggtcgttggctggtcagccagcagcagctgttcgaccgttacatggtctcgccatacgtgcgcacccgcgaaaccgcagccaccatggccctgcccaaggccaaatgggaggagaaccgtgtgctgcgcgaacgttcttggggtgaaatcaacaccatcaccaaggacgaattcaaaaacaactacgcacgcaactggaacttcaagaataccgatccgctgtactggcgtccgccggcaggcgagtcgattgccgatgtggccgaggaccgtgtgcacaacatcctgacctcgctgagccgcaaatccgattcggaatccgtggtcatggtcacccacggcgacttcatgctcgccctgatgctcaccatcgaggatctggccgacgaggaattcctgcatcgcgccgactcggacgactggaagatcaccaactgcacctgcctgcactacacgcgccgcgacccggaaaccggccgcacctccaagcgtgtgcgctgggagcagaccgcccggcccgtgctcgacgagacgaccggccgctgggaggtcaaggtggagccgtggcgcgaattcaagcgcccgtacctgtccaatggcgatttggtggatgtggtgcaggccgtcgatccgcacctgctggagtattacggcaaatagcctttcccggaagagagacttcacaaaatcttcgtgagctagaatggcgcgtagtgcggctggttgtgaatgccgtgccccaagcgagagcgaggagagtagtaatgtccaatatcttccaatggcaattgcatggcgacggcaagacgctggcgcccggcgaggtcgtcgagcccgatgaacgtctgacttgggtgcgcaccgccggtatcggcgcacagcacgtcatcgccatgttcggtgccaccttcctggtgccgattctgacgggcttcgacccgtccaccaccctgttcttcacggctatgtccaccgcactgttcctgcttatcaacaggaacgtgctgccgagctatttgggctcgtccttcggcttcatcgcaccgatcaccgcggtcaccaccgccaacaaaggcattgcggtcgccagcttcggcatcatggtcaccggtattctgctggccctggttggcgtgctcgtgcattacgccggctccaaatggatcgacatcatcatgccgcccgtggtcaacggcgcgattgtggccatcatcggtttcaatctggcaccttccgtgtggaccaacttccaagccgcgccggacaccgcactggttaccctgctggccgtgctgctcgtggccgtgctgttcaagggcttgctgggtcgcctcaacattttggtcggcgtaatcatcggctatgtatatgcctgcatccgcggccaggtcgacttctccgccatcggtgacgccgcatggatcggcttcccgaagttccacctgccgcaggccgatttttccatccttcccatgttcgtccctgttgtgctcgtgcttgtggctgagaacgtcggccatgtcaagtccgtggcccagatgaccggccgcgactacgacaaccagatcggcaccgccctcatggccgacggcctgggcaccacgctcgccggcttcggcggcggctccggcaccaccacctacggcgagaacatcggcgtgatggccgccaccaaggtgtactccaccgccgcctactggtgtgcagccgccttcgccctgatcctgagcctgtgcccgaagttcggcgccgtgatcaacacgatccccgccggagtgctcggcggcgtgaccacgctgctgtacggcatgatcggcatgatcggcatccgcatctgggttgagaacaaggtcaacttcgacaagccgctgaacatcatggtggcagccatcaccatgatcattgccatcggccaattcgcgttcactgttggtggcatttccttcaacggcattgccattggcacgatcgtgattcttgtggcctaccacggcctgaaggccattggcaaggcaaccggcactatcgccaaagacgatccggatattttgtagtgtgttttagggctactgggccgtattgtggctcagcccttttgcacaatggcttctaccttcacgggtaggggccatttgcgtgttccatggggcggtgctcgccttacgtggtggtagaacccatggggcggtaattggcccatggggcggcaaacatcccatggggcggtaaaaccctcatggggcggtaggtgaaaatggctttattctgcggtttcacaatttcttcaaaccgcctcatgggcaagttaccgccccatgggcaagttgccgcctcatgggcgagttaccgccccatggggtcataagtaaagagtgggatgacagtgtggcgagcaccaagcaaagtagggggcttacgctaagctcggaaagcttgcgtaatttgcgtaacctttgacatgaaaggccactgtgccccgtaataatttcgatgatcgtgacgattccgctgatttccagatgaacgacagcgcggaatcccgcccccttacctttggcgaacttggcgtacccggaccgctggtgcgcgtacttgcggcagatgacaagaagaccgcattccccattcaggccgacaccctgcccgattcactggccggccgcgacattctcggccgagggcgcaccggctccggcaaaaccctcgccttctccattccgctggtcacccggcttggctcctatgattcgcttggcgaaatcgcgatggaggagttccgcaaggaaatcaagcgccgcaagaaggccagcttggaagagcgccgcgctgacgatttcctgccgcacccgcgcggcctggtgctggcccccacccgcgagctcgcgaaccagatcaacgacgtgctgatgccgctggcccacacgttcggcatgaacaccaccacggtgtacggcggcgtcaagtacatccaccagatccgcgatctgaaggccggcgccgatatcgtggtcgcctgcccgggccgccttgaggacctgctgcgccagcaggcgctcacgctctcgtccgtcgaagtcgtggtcatcgatgaggccgatgaaatggccgatatgggcttcctgccgccggtcaagcgactgcttgagcagatttcgcccgacgcccagcacatgctgttctccgccacgctcgatcacggcgtggatgaagtggtgaacaccttcctgcatgatcccaaggtgcacgaggtcgattcggccaccaccgaacctgacctgatgacccaccacgtgttcgagaccacgcgcggcgacaagcacgaactcgtgcgcgtgctcgcctcgggcgaaggtcgccgcatcctgttcacccgcaccaagttccaggccaagaagctcgccaagaacctgacgcagaacggcattccggccgccgagctgcacggcaacctgaaccagaaccagcgtgatcgcaacctcgccgcattcgattccggcgacgtgcgcgtcatggtggccactgacgtggccgcccgtggcatagacgtcggcggcgtggagctcgtggtgcaggtcgagccgccggccgacccgaagtcctttgtgcaccgctccggtcgtaccgcccgcgccggcaaggcgggcgacgtggtcaccctcgtgctacccgaacagcgccgcgaggcgcgccgcttgctgaaccaggccggcatcaagaccaagatgatcgaagtgacccacgattcgcccgaagtgcttgagcttgtgggcgaccgcgccgagcgcgtggatggttggagcctcgacaagtcgcagcccgtgggcaacccgcgcaagggcaagaacaggggcgccaagaacgcggcgggcgatgagtccggccgcagcggcaggcgcaagcacaatcgcaatcgcgaccgcgccgagcagaacgttgccgagaccggattccagcacgagaacgcaggcggcgagtttgttgccgaaggcgagccgcagcgcaagcacggcgacaaggccagcaagaaggccgtgaagaagaaccgcaaccgtgcggaacgccgcgccggcatgagcaaccccgaggccgagcgccgcgactatctgttcgagcatggcgatgagcgtcgtggcaatcgacgcgaggatcgtgccgacactcgatatgaggatcgccgtcgcggtaagaaatctgatgaccgttatgatgaccgtcgcggcgataagtactccaagaacggcaagtccgatcggcgagacagattcgattacgatcgaagcgatgagttcggctcgcgtaagcatgaaggcagcaagcgtatccaccgcaagaacgagaaccgcatcgtgcgtgatgagcgttccgagggggccaagcgtcacgagcgccgtatgatcgccaaatacggcaatacacaaggcccgaagcgtcaccattccaagaagaacagctcgccattccgctcgtccggtacccgcaacggacgtcgatgacgttccttggctcccctcagggagggggccaagcgctggttaatattggtacgctacggagccgtcggcgttgtggatggtgaaggtgggggattgctcgatgttgaggtccacggttagggagtgttgggcgtcggcgctcactgagcgatagacgaaatgcttgttttccagttcgagtgcctcggtacgcgcgtcaatcagccatgggttgcggcggcgcagcgcgatcagcgcctgatgcaaccggtatattggctcacccaatgtggagagattggagggggagtcggggaacttcgggcgaatatcatcgtcgccaccgaaacgctcctgcttgacgcccacatagccttgttcgtcgccataatagatgctcggcacgccgccaaccgtcagcaacaccgccaccgccaacgccgccttggccgggcctatctgcgaggcgatacgcgtcacatcatgattgccgatgaacgtctgtggcacgaaggaatccaggaacgcattatgccgcttgagattccaatccaactcaaagaagttctccgtctccagcgcatgctggatcgacttccacagctcatactgcgtgactgaatccatcgtggattcctcgatgatgcgcgggtaatcgccatggatcgcctcaccgaaaatccacgaatacgggtgtgcggctttgacctgcggcaacacgcgcgcccagaacgggctcggcaccgcatacgcggcgtcgaggcgccagccggcggctccgcgatccagccaatggctcatcacatgggccacatagtcaacggtctcgtcagccgaatggtccagcgccaccagatccccgtgcccctcgaacacatccaaagcgggttcgtcattatcaccgacatgcgcgcggaccagaccatgccacgggttgtcggccggattca

SEQ ID NO: 247 - DNA, 5263 bp, Unknown
  R101_18m  MAG No. k141_46240
gatcattcggcgtcatggaacccgtcaacgccatgccgcgcccatacggtcgcgccgcttatgacggaacccattttggccggtaacgctatcgcttgaccaaacggtccaaaagaaaaaatttcaaggacgacattcaaggagacacgtcatgcagaacgtcatctggagcaacgacaccgacaggatcgactcgatcgtcgactactggaaggaggaggccgcgcgtctctctgaagacatggccaaggatccgaaaggcaccatcgacgacgcgttctggccggtcacggacatcctcgaccgcgcatggaggcaggccgtctccgactacgagctgcccaccgcggcccgactcatcgagatcatcgacgacctcgacccgtacgccaccggcatcgcggcccacgccgtggatgagaacaacgcggaccgcagggacgaatgcggaaacctcgaacgcctcggactcggccagccggtggtgttcgtcggcacggccggactgtgggacggccggcgcaccatcgccagcatcgtggccatggacaacatcggcgacatcatcgccgacagcccatggcagcacatggaatacgagacatggagcatcgacgggcacgacgacctgcgctacacgggagtccaccacgacggcaccaacacctgcagcgtgcgcgaactcaaggaaggcagggacatcgaacccgacgactccctgcgcgacatcctgcgcaagaccgtgccgctcggcccgaggatccgcgccgtgtacggcatgcccgcaccggaaaacccgacgaaaaaacgttgaaaaaccaacgaaaacaacttgataatatcacacaaatgagatataatgagggtatcaggaagacaaaaggtcaggcctgaaccccctcactgaaagggatcgaaaatgttcgaatcgtacatcaactcgctcaccgacacggaatggctggaattcgtctttgaatctgcggcgatcgtctcgctgccatcggcggtgtgcatcgactgggccgtgacgtccatccgcgacaaccgccagcgcatcggattggcatggaaaagcgcgatgcacgtcctgaagaccggaagcattgcccctcgcgtgatcagaagcaccccgcaccaggcatgaaaccaagggatccggtcatcatcaccggccggatcccgtgcacctgcgagtcgaatatcagccgcagtcgcagaacatggcaagcaaaaggagaacatgatgtgcaagtacaggatcaccgtgacgatcagcaacaactccacctgcgtggacgggggaggctggctggtcggcatgacatggcgcaaaagcgtcatccttgacgcggaggaacgtgcgcaggccatcgcgttgcgcgacctgctcaaccacgacaagccggtggcggacggactcggctacccgctgtgggaccgctgctacggcatgtgcaacaaggcatgctggcagtgggagctcgtcaccgcgcacagcaccgccgtgaacgccatcatgcgcaaggccgacatcgaatggcccgaggacggactgcccgacatcgacaaggcagtcatcagcatcaacctcgcccttgtctgaaaaccggcatcaaggaaacgaaggaaaccatcatgacactacgttgggccgacgagggcatcgactgacaaaaggacttcgatcatggaaggaaaagaaatggtggattcgatggatgaggaacggatcatggaacgggtgcgtaggctactcgcgttagccaacgatccagcggcaagcgacaacgagcagcgcatcgccctcgaacaggcgcaacggctcatggacaaacacgccatcgaggaatggcagctcgaagagaaccacgacgatgtcgagatcatcaaacggaggatacgattggaaaccaatccatgcaaccgatacatggcgcaactcgcgaacatcgtggcccgcggaaaccggtgcagagcttcctacggatgccgcagggcaggaaacggacgcgacgtgatcagcgccatcacaatctacggaacccgcggagacgtcgacaagaccgaagccatctggaccgccatggaaaccagccgcgccgccatgtggcgagaaagagcgcgcaccacaccccgcgcgaaagccaacgcggcctggaggaacggctactaccgcggattccaggaagagatcgcccgcagataccaggtcctccgattcgagatggaatcggacggcaccggcaaggaactcgtcaccgtgcgcagcggccaggtcgaccaatggattgaaacccacgtcacattcatcgccgacaagccgaaactccccaagaccacaagacccagccaggccgcctaccggcacggaagacaggacggggcacgccaggcgatcggactcaaggaaaccggcgccgcaggcaactggaccctggaaaagtaggaaacaagcagaaaggaaaaccatgtactgggatcgttacatccaccgcgacaatccacgccgcatcgaaccactcgacaagccgctcgacatgtacgttatgctcgacacggaaaccacgggcctccatcccgaggaaggtgccacgctcatcgagatcggcgcgttcctcgtccagccaggcaacgagaacagccggccgaaattcgaacagctcatcgacccgcgccaaccattgtcggaattcatcaccgggctcaccggcatcaccgaccagatgctccagggaatgccgaccgccggcgccgctatgctccgtttccaccaatggctcgaccaggtctggccggcaggggagccgttgtccatcttcgcccacaacgccgaattcgacgtcagcttcctcgacgccgccgagcgcgtctacgatccgacagcaagcggattcgactgccggtggctatgcacgaaggaaatgagctgggaactcaacccgcagaaacggcaccatcgcgtgaccgatctcatcgccgactaccacatcggcgacaccgaagagcaccgcgccctcgccgacgcaatccaggagcagatgatctacggggcgctctgccatgaagccaccatgcgaggaaagtggatcggacaatgagcatcatgctggacgaggcacaggcatacgagaacagccgcgactatgactgctgccagattgtcgaaggagcctacaccgtcggcgacgcgatctacgaagcctactgcgccggacgcgaagcgccacccaccgacaccgaaatcacggcggccgcaaagtatctgaaagccaaccctggactgttcggcccctccgcatgcttcatcgaccagaaccgtttcggagagatcgcgcgaggcgtgctccaagcagccagaactgccatgcaggttcattaaatgagcttatcgcattaccttgttatgaacatcgattcctcgcgtcgaaagctcccggcgagcgagatgctctgggtcatgaacggaaggaggattttctaatagcgttctgatatccgcaggcgccgcactgttggacgcgctgcaagaacaaaaaccgtacgaggcgaggcatgtggaacgtctgatatcaagaccataaacagaaaagaccataaggtcatgccgatcgaacaacggcaaccaatatgaaaggaaacaatcatgaccgccatcaaaatcaccgcgctcatcgaaggcaatctcgccgacgatccaaaatgtttcgcaaggaccgacacgatgcccgcacgagtgggtttcaccatcctgcacaccgaacgatacgtggacagagacacacgtcagtggaaggacgggcgaaccacgtcggtacgcgtcgatttccgtgggccggccgcggaacgatacatcgacctgatcagccgcatgccgggattgttcgtcaaaggcaccgccgtcatcgcttggggtgaaatcgcggacgtgccgaacgcgtatgtcgaccgtgatggcaagccacgttccaatccgacgctcatcggcacgaagatcgtgcccgaccaggtcatgaaccagcgtcgaagcgaacgccgcagccagcaggatatgcaatcccagtcgcagacgccggcaccttcgtccgccgccacgtccgacgatccttggggcaacgtccctggacaggacatgttcggagatccgatgatctgatctcactggagttcgtggagtcccgcatcccgtaatcggatgcgggactctttttgtaatatgaccggttcagcgactggattcatgtcatagcgatgccaaaaaaacgcacgaaaggagcatcgcatggttacggaaaccagtccggcatggaagtccatgtccaccgcacgaagaatcatcatcgaccacgatgaaatggacgacgtgggcgatcagatttatcaggccaccacattcgatcttgatgaaaccgataacggttatgtcgtttccctcaaggacggtgacgacgtcatagccacaccgatccggtttgagaacatcgatgatgacgacgcgctccagaccgcagtcaatcaggcgttgggcgtgttcggctacgagatcgtcgatccgtacgcggagcatgtgcagctgagtcatatcgatgagtgggacttcgataccgtagcgaaaaagataggagagctgcccgtcgccgtgaacgacgccgctgctgtcgaggatgcgaaatggtccatggatctcatggcccgtgacgcgtatgcgatgccgaccgtagtggcgagcatgaggagcgatgaacgtattgacgcgattgccgtcgaacccggccatcgtggtgtgacggtcactacgtacaggcatgacatgtccctgccgcgcctgctggcggatggcaccgtcatcgggttcgaacagccctggaatgaattcagaagcatcgaggattccgagcttgccgaacgaatcagcgatggtgacatccaagccgccgcacgaatcttggctgaagccggagccaagggcgagttcactgattaccacaggtcgcttgtcgaggaagagggaaccggcatggatccatggccaaccgaaccagccgtggtcgatgccgacgtatgggcgaacatcccatcagtcgacacagcatcgatgagcggtccaagcctatcgtaggcagacaagacaacacccagacccacagggagatgacccagtcatctcccttcttcatttgtagacaaataaatctgcatcagccccagcagatgattcattcacaaggcagacgaaaacagcagaaacaaccaacacaaaacc

SEQ ID NO: 248 - DNA, 22938 bp, Unknown
  R101_18m  MAG No. k141_46382
gtcttcctctcgacctcggtgtgcgggttgcatccggcgccgatcacgccgtcggcctcccaatggccgaaaccgctgcggtctccggcctccggcggacgctcggagatgggaacccgtccgggaatcgggaaacgcgacgtcctcctgccgccacgcctgcgacgcctcccgtggccacgtggaagacgacgcgcccagcgttcacggcgatggcggtcggcgtggatccaacggtagacggtctccgggcacacgcgcatggcggagtcgtcggggaacaggacgcgcggcccgccgctgacgggcagcggcgaccagccgcgacccagccattcggccacccgcgcccacaggcgttcgcatgacaggcggtagcgcttgcgcggttcggcgcgcctgcggtcggccttgcgccgcggcggggccggcgatgtagtatccgcccgtccatgggcccgtcttcagccgtttcggccggtacggccgtcaggactcgttctcgttggacgggaaccacgtgtcgcgttcgatctccctgccgaccgtcgaggcgttgcggccgagcatcagaccgatcctgcggatgctggtgccgttgccgatctcgatccggatgacctggcgttcctcttccgacaggtgcgaatatacttctcccataggtgcaacatcccttcggactggttatccggacaatctccaatctaacgggtgttgcactttcaattagacaacggggcgcctgacatttcaccaagggcggcttataatggtggaatcagcatatagagattggggttacaggagggtgattgtggaaaacaaaggttggagaattttccaaatcattcaattcatattgttcttatgcattagtgtattcctttttataagaacagtggacgggcatggaactgtacagacactaggagtaaagctgattagtttttccgtatgggcgcttttctaccttggtatcttagccatagagtggttgatttactgtattgtccgacatgctaaaaaataaattgatgtacgaatttgctgaactaatagaattcctttagtctctaaggggataacgaccgaattcttgcgcatttttggattccggccttgatggaaaaggacatgggccgtgccgggtacgattttcagtcgccagacaatgaaaaaccgcgattggaaagaggcatggagccatgtccaaggaaatcatacagttcgaccaggccatgttcgagagcaagctcgacgccatggtgcgcgagaaggtcgagcggatcgtcaacgcgatgcccgacgcttcaggcgaacgagatcgccaacgccgcgagatacgagcgttccggctgatggtggccgaccggtgggtgggaatcagtcgagattattcttgggtgcctgtgggtgcctcgtggagaaacgagggtaatcggtaggtttcccaaaaatcgaaagccttggaacaaagccaaaaacagttggctaggattatcatgcgaggtgcgcatgatgatggtagccatggttccaagtgtctcatgggcttgagaccggcgatggtgcgattgcgggaatggcgcggagagccgtggactggccgcggccgatagccgggaagccgagccgcagcgtgaagcgtcatacgagttgtctcgcgatggccaacgcgccggcaacgaccatgagcgccgagaagacacgcagaagagtccttttgcgttctcttcccggtttttggatccgatcacgacggatatcaggaccaatccgacggccagcggcaccaaggccagcggaaacagcggtttttccatggcatctcatctcgaacgctgtggttcagatttttcgatgttcggtttttctgcgcttgctgacaagagccatggagcagcatgtcgatacgcacagattcactatgcaggtcgctgctggcagtagccgtatgaacggctgactgtagaaatcgaggacatctggatccatagatcctgagtatatttcaaaaaccggatatgatgcgagagccggcgccgaactcacgaggaacagtatccaaatgacgggcaatctcaggatggatactgttcggcctttccgatggacttctttcgagaacatgaaaagagcccaagaggtcactgcgattaatgcacccgcgcaatacaacagaccagggaagtcgctacgcatgattccgtcctcacttcagtcgcaggtaatttggcttatcgatcttctggctggttcgagattaccatacctgacatggcagtcgaattgcccgttgtctattggcagagcatccgactgttaatcggacggtcgctggttcaagcccagccgcaggagccagacaaaaacccggaacttcggttccgggtttttgttacccgccccccccccgaaactcctttatcaaggaatcatccataagggatgccgcagcagacggtctccaaggcactacaccgtgctcatccccatggacgacggcaactggcacgtcaccgtgtactgtcccgcctcgctggacggcccactgctcgacaaggattccaacgaattcgacacggacgacgtgaaacccggcgacaagtcgtacacagttgccaatccattccacctggatcacgcacccggaacagacggtttcatcttcggccctgacaccctccgacaatagcgatggactaaccattcaaccgcacgcgtaggaggagcgcattccaaccatgaatgaatgacatatagacgtcaagggcttgcggacatcgtgtccgcaagcccttgacgtctcaatccaacgaaatatcgacttttacccgtttgtcggattcaggctttcgcgcaagtccggcgatgaggagggccaccagcagggggatcgttgtcagtgtaccccaggaaatcgagaacgtgtcggcgatgtagccgcacagcggggtgacgaccgcggtgaaggccatcaatacgagcgatcccacggagaacgcggtcgcgcggatcgaatcgtcaatgctctcgtgcaagctgctggagatcatgttcgccacgtacatctgcgcgcaggagaacacgaagaacgccaggatcctcaccgccggcatcggcgtggccgcaagcaccaccgccgacacgatgagcacgaggatcgcaatgtcgccggaacgtggatgcagccgtagcatacccagacgactgccgacgatctgcgcgatattagtgaacactaggccggcgaactgccaccagaccccggtctggtggcccatcagcagcagctgccagaacgtcagcaccgacaacgtacccagattgaacaccaccatattccatatctccggcttccgcagcagcacggccgcggccgccacggtctgcctgacatgatccaacaccgtcagcgaggtcccggactcgcccggctcggcggatccatcggattcgacggacgcctcggcctgccgttccgtcgtcccgctcccatccgtcgctgcggccttggtgcgcgacccggccctcatcagaccgagaagcgggatgatcgccaatacgtagaacaccgtcgcgcccagccagatcagctgggagtcaagcaggaacagcacggcaccgaccgcaccgccgcatatcgtgcacgcaccgatcatcgccgacagtcttgacaccaaggtcttcatacccagcgagggatcgtgcttgcgggcgtattcgatgtacagcgaggacgccgcgccgctttcgaccgcggccccgatgccggccagcacgttggccaggcacagcacggcgaagttcgcggaccagaacagcatcaatatgaatcccgcgacgcggcacaacacgccgatgatcagcgtccgttcccgggaccaccggtcgaacagcacggacgtgggcagctcgctggccgattcgctgacgtcgaacaccacattgacgatggagatcagcagcaccgacaggcccacatcatgataggccaccatatagtagaccgaaaaacatccggcaccaagataaataagcgcattatacaaacaggcaaaccgaaccatcaatcattcccttacataaacaaagaaccggtatacgtgggactgtctctcgaagtgtgtaactggccttaactggccggtcgtgtggccggtcggaaaggctggtggacgatgtgtgctgggacaatgggaaacatgacaccgacgaagaagccggacgcggaaaaacgcaacgccgagcgggaggcggcgctcacattcgtgcgcatggccaaggaaaaaggactggacctgacagggcccgacggactgctcaaacagttcaccaaaagcgtgctggagacggccctggacgaggagatgaccgagcacctgggccgcgccaagcacaagaaatccaaggacggcagggccgcgaacacgcgcaacggcaccaccgccaagaccgtggtcaccgattcggtaggtccggtcgggatcgaggtgccgcgagaccgcgatggctcgttcgagccggtcgtcgtcaggaaacggcagcggcggctgcccggggtgggcgaggtggtgctgtccctgtatgccaggggcctgaccaccggcgagatcagcgcccacttccaggagatctacggggcggacgtgtccagggagaccgtcagtcgcatcaccgagcgggtcgtagccgagaaggacgaatggtgctcgcgtcccctggatcgtgtgtacgcggccgtgttcatcgacgcgaccgtcgtcaaggtgcgcgacgggcaggtcgccaaccgcgcgttctacgtggccgttggcgtggatctggagggcgaccgcgacgtgctgggcatctgggcgtcgcccgccgcggagggcgcgcgctattggctgtcggtgctcaccgagctgaagaaccggggcgtggacgatgtgttcttcctgatctgcgacgggctcaaaggcctgcccgccgcggtgggcgcggtatggcctctggccatcgtgcagacctgcgtggtgcatctgctgcgcaacacgttccgccacgcgtcgaagaaggactgggacgccatcaaacgcgatgtcaaacccatctacaccgcggcggcggcccgcgacgcgatgctggacaagtgggaggcgagatatcccgcgatccgcaggctgtggatggacgcgtgggaacggttcataccgttcctggactatgacgtggagatccggcgcgtgatctgcacgaccaacgccatcgaatcgctcaacgcgagattcaagcgctccattcgcgcccgcggccacttccccgacgagcaggccgcgctcaagtgcatgtacctgaccgtccgctcgctggaccccaccggcaagggacggatacgatggagcgcgcgccggaagcccgcgctcaacgcctttgccatcaccttcgccgaccgccggccaagcgagggaacacaacaatgaaaacgccagttacacacttaacgagacaggcccgcgtctgggccggtggccggcgatccgctggtgccgctggtgccggtactggttgaagtcgatcccgatggatctttttgcgtcgagccggtgccggtgccgttcgaaccggtctggctgccgccgacgccttggctggtcgggtcttcggtggtcggattctttgaggtgccggtgccgttcgaaccgttggcggtgccgtcggttttcgaatccgaggcgccggcgccggtcgaacccgaggtgccgttggcgtcgaggtcggtggagggggcgtcggttttcgaatccttgctggttcccttcgaatcatcgccggtgcccgtctggggcagagcgttgttctgatcgggggtgcccgttcgcgtgccggtgtcgttgcgcgcgggcgtggtcgtggtgggggatacgagattgtccgtgccgcgtccctgcgtggccagcatcacgacgccggccgtcaccgccacggcgagcaggccggacaccaaggtgacgatcatggcggtgtgcttcgaagcgcggaagcgggacttgcgcagctcatcgaccgagtacgtcctgccgttcgctcggctgaacacgatttcacgcggtctgcgtgtggaggaagcatcatcggcggtcacgcccgtcgccgtatcgggctcgtcccgaacgtcggtccggctgccggccgttcggggggtgccgccatcggcatcgccgttctcggcgtccttcgtgatcccgttgccggaggacgaggccgattggagtttttcgccggaggcggtgagcacgttctggtagatcttggtggccacggcggagacgacgtaactggccgccgctccgatcaccgaaccgccgatgccgatcttcgatgcgagcaggaacgaggtgacggcggcaagggtgcccgccacgatggatgagagggagattccttcaaaaaacttcttcacaatgcacgaccgtagggtgtcgggctgacaggttgcctgagactcgatggaagcggggcgaggcctacacgagaccttcaaaatcggccttcgtgcaggtcggacacgccctgcggcgcacacacgtgcgtttcgcgtcgccgcaggccgcgggacatcgtcaattacgatgcagcgactgcccggtcggtctgattaccgacatcagcacggcgacgaagatcagcgcaaagcccaccagcgaagtccacatgattgtctcgccccagaacaacgcggagaacgtgacggcgaacagactttccgtacacatgatgattgacgcctgcgaggcaggcacgtgagccagaccgatgttctgcatgatctgggcactcatcgtggcgccgaggaacagatagagcacgctggccacgactgagggtgccagccagctggcgttcggcatgggttcggtgaacaacgcgccgatgatgaacaatacgccggcaacgccgaactgcacaaaagtgacggcgatagggtcgaagcgtttggtgtagacaccaaggcaggtcagattgaacgagaagatgacggcggttgcgatggtcagccagtcgccggcgcccagcgacaacgaaccgcccggcttcaacgagacgaagccgacgccgatcagacagatcacgccggcgaccagattgatggccttcgggcgggttttcgaaatgatccacgtggcgaacggggtgagtacgcagtaggcggccgtcaggaacgcgctgcggcccggttcaatggtctgcaacccgacggtctgggtgaccatcgtgccccagtaggtcagacccaccacgagcgccggcacaatgatcttcggcgtcagatacggcacgatgtgcttatggaacaaggccagcatgcacaggcaggcgcctatcatgcgcagacccatcagccattggggcggaatcgcctccatggcgaatttggcgagcagataactgccaccccataatgcggcgcagcccagcaacatgagtcgggcgagattcgggggaaagctgcgggaccagcggctgcgcagcttgctgaaacgttcgaccaaacccatggtgcacctcaggacagttaggaaaacttgtggctctctcggctcacagattacgggaactaccggccaaaatcgaccggtcgatgggcgtcgggtgtgtgacaggtgtgtggctggtgcgcggccggggcgcggcatcgccaaacaggtaagaaccggatgaaagctgtgcgaaggtgaggttactcacagcgaacatccgggctagtcgcgttcgaaaccggtactctggaaagagtaaggatacgttatccgtagcaatcatgaaaggattcgacatggcagtcattactccggaaatcaaggaattcatcaagaacaacctcggttggatcaccaccgtctccaaggacggcgaactggacctcggcccgaagatgtccctgttcgtgctggacgacacgcacatcgcctaccacgagcgcaccgccggccagcactacgagaacctcaagaacggctctccgctggtcatcgccttcgccaacctcgagaagaagcagggctaccgcttccgcggcaacgtggtgctgcacgttgacgacgacatctacaacgagcaggtcaagatcgccgaggaaaagggcaccaagaagccggccgtgattccggttctcgaagtcaccgagatccagaaccttgcctccggtccgaccgccggcaagaccatcgccaaggactgattagctgacgtattggtggcttcctcgtcagagggagccactttttcgcttttcagtgcgcagtactaggtgatggcctttgaggtcggtggtggcgaagaggtaggtgttgccgccgtccttgagtttgagttttttgcgcagctgggccacggatagggggaaattgcgtacggcgatgttggcgtgcgtgagaccggccaatagctgcttcagttctttcttgttcatggtgacgatggattcgatgacgaatgatctgcctgggaaatcggcaataggttcggccgccacgaacaggtggctattcgggctgatgtgatgcacgacgaagcgctgttcgagaacatcaaagcacccggccttcatgattgaggcgttgggttcgtaaaggtacttccaatgcgaggaatcgaagccgttcgcgctttcctcagccgggaaatcctcggtattacaggtattgcgtgcaaccaaggcagaatcgctgataggggtgtgattgtcgctgttatcgccggccttgtacgacagcacctgcccgtcattgacgcataccacgagcggtgaggcgcaacggccgcgccccaacaccaacaacaattccttgcattcattcccggtggagacgatatgcacctcatgcaccgcgccggcgaaatcggcgacggtcttatgccagtcgagcatgggggagagcttgaccatgaccgtcggtgccttggccagcagcgtatccttcagggtcagcacatccggcgtgcaatcggcaatcgcgtaggtacgcgagccatgatcgtcacggcgggccggatcgaggaagatcatggagactcggccaagcgtatcaagcactgctgttgaatcatcattgatgacttcggcgtggccaaggccgagtatcgggaaattatggcgagcgataccacataaaatggattgttgttccacatatatggcatggtcaaacactcgggacatgtaagaaaagtcgacgccgaaaccgccggtcagatcgactagggatgtcggggaatcgtcggcgtcgtcgactgcttccccgtccaacaatcgctgtgctaaccgggctttgtattgagccgtgaactggctggaacattgttccattgggacttgcggcgggaaaatcagcccatcatgggacgcccagtcaggtagcttgagcgaagcgcgctgccagccggcaatttgctccagcgcgaacggcacatccacgtcgccatcatgtttggcgtgcaaggccacatcacgcacatcttcacggcggtgtttggcgatgaacgcccaggtcgactcagaaatctccatgccgccattctaggggttgtgctgagatgagtatggcaaaccgcaagagaacgaggtggcgaaaaccgatgatcgatgaagtgatgatgctgcgtcatggccgtacgcaatacaatctcgaacatcgcttgcaaggccagatcgatgtgccgctcgacatcgtaggccaatggcaggtcgaccagaccggattcgcgctcgcttcacggtactactgggccaaggtgaaccggcttgccgagcatcccgaagccatcgcccagcccggtcctgacgccgccgaacgcactgatacgcgacagttcgaggaggctcctgccgccggccggcgcatggtggtgatgacctccgacctgttccgtgcccaacagaccgcacacgccttcgccgatattttgggattgccggtcacctgtgaccaacgactgcgtgaacgcagcttcggcgagtgggaaggcatgacccgcgccgaaatcaaagccgtggcagccgacgactacgcctcttggaaacagcacactgggggcgaaaccaagcatggtgtggaaagccgtgccgccgtgggccagcgaggtgccgatgccgtgcgcgcactggtcatcgactccgcctattcagacagcacgcccaccacgctgatgctcgtcacccatggctcatggattaccgccaccatctccaacctgctcgaactcgacccggacggcatgaacgcactcggcggcatgcgcaacgcctgctggtgccggctcaaagtgcgccacagcgtcaacggcatccccgccgaacagcccctgtgggagttggaggaatacaacaaggctcccgccatcgccgacagcgccgactgggagaacgggccgaccgatctgcgaggaccgcacatgccgagttggcagccaatcgtctggtgacggtcgctatgcgaaaccccgctcgcaaattcgaacggtgggtctaaactaatctcggtttggaaccgtacagcgatagaacagtaggaaagcgcggaaggcgggtgaggcgacatgctgagaatcttcagctcaatcaatggccaagtggagcagatcgagaaaccggaaaacggctcctggttatgtttgagcgaacccactgatgtggagctcgccaccgtcgcatcacagaccggcattgacctggccgacctgcgcgcccctttggatgacgaggaacgttcacgtgtggacgtcgaagacgattacacgatgatcatcgtcgacatccccaccgtggaagagcgtggcggacgcgactggtacgagaccatcccgctgtcgatcatcgtcaccgaaaacctcatcatcaccgtctgcatgcaggacacgcccgtgctccacccattcatggaaggcacgatccgaggcttcaacaccttcatgcgttcgcgcttcatcctgcagatcctgtaccgcaacgccacgatgtacctgcgttacctgcgcatcatcgaccgcgaaagcgacaagcttgaactgaagctgcgccactccatgcagaaccgcgagatcgtgatgctcatggaactgagcaagaccttggtgtacttcaccacatcgctgaaatcgaacgagatcgtgatggagaaactcaccaccctgcagcgcatcaagcagtatccggacgatgaggatctgctcgacgacgtcatcaccgaaaacaagcaggccatcgagatggccaacatctacagcggcgttcttgcgaacatgaccgacgccttcgcctcgatcgtgtccaacaacctgaacaacgtgatgcgcatcttcaccatcatctccatcaccctgtccatcccgacgctgattttctcgatgtacggcatgaacttcgacggcggcatgatgggcatgccgttcaccgacaagccttggggcttcctgctcatcatcgtgatctccatggtgctttccggtgtggttgcctggttcctcacacgttcgcgcatgttcaagtaaggcgtttgacggttatgcaccattggtcatcgttcgtcagccgtagcatgctccgcgcccgccgcccgatgcggcgcggatttcgctcccgactgatggcaggattcgccgcggcctttggcatgatattgccattgtccggtctggccggttgcggccaaattcaagtcaccaccgtctccggagcgccggaggggcccaccatcgccattggggtcgcagccgacgaaccatcggtgggagcatggcatgacggcacataccagggcttcgacatcaccatcgccaaatacgtggccgccaaactcggctatgcgaacaagcagatcgtcttcaagcaggttcgccccgaaaaccggcgctccatgctggacaatggacaggtcgacatggtcgtcgcctcttggcctatcaccgatgggtccagcgcgatcgttgattttgccggaccatacctcacgaccagcgtcggtttgctggtcaggtcggatgagcgtggccgattcaccaatgacgcaggttcggtgggcgacgtaggcgacggcacggtgtgcgcagtgaaaggtgacgagacagtcggcatcttccgcggcaaccacccgcaggctcggattcaggagcgtagcagttatgcgcagtgcgtcacggctgtgcaagtagggtcggcggatgccatagcctccgatatggcggtgctttccggtcttcaagcggccaacgggccccagtatatggacgtgattgcggacaagggcgaggtcagttatggcatcgccgtgagtcaaggcaccagccaattggcgcagaaaatcgcggaagcattggaagacatggttgaggatggcagctggacggccgccaaggatacattcacaagccaaacaaagctcacggtttcgctgaacggtgaccccaaagccatcgtctcggatgctgaataacgattgacgacgtgtccagttgcgaggctaccttgctgatttatgagtgacaacgagaagagcacgcaaaccgaagagcccaacttccgctacaacgccgtactggcgcaggacatcgaaaacaagtggcagaagatctgggacgagcaaggcaccttctgggccgccaacgtcaacggcgatttgaaggacggcaagggccgtaacgccgaaggccgcgccgcctacttcgccatggacatgttcccctacccgtccggcaagggtctgcatgtgggccacccgctgggttatctggcctccgatgtgacgagccgctaccaccgcatgaagggcgagaacgtcctgcacgccatgggctatgacgccttcggcctgcccgcggaacagtacgcagtccagaccggccagcatcctcgcgtgaccaccgaggcgaacatcgccaacatgagccgccagctgcaccgtatgggcctgagcttcgacaaccgtcgtacgttcgccaccatcgaccccggctacgtgcgctggacccaatggatcttctcgcgcatctacgattcctggtacgacgaggacgccaccaacccgtccggctccaagggatccgcgcgccccatcgccgagctcgtcgccaaattcgagtccggcgaaaaggccattccgggccacgagtccgatggcaagcagtggtccgacctcactgccgccgagcagcaggatatcttgaacgacttccgcctggcgtacatctccaagtccccggtcaattggtgcccgggcctgggcaccgtgctggccaacgaagaggtcaccgccgaaggcaagtccgaacgcggcaacttcccggtcttccagcgcgagctccgtcagtggtccatgcgcatcaccaagtacggccaccgtctgatcgccgacctcgacggcatcgattggcctgagaaggtcaagctcatgcagcgcaactggatcggtgaatcccatggtgcctccgtgcacttcaccgtggccactgccgacggtgacaaggacatggaaatctacaccacccgtcccgacacgctgttcggcaccacgttcgccgttgtttccccggaacatcacctgctggagaacgtgcccgccgaatggccggccgatgtacccgaagactggaagggcggctatgtcaacccggtcgaggcggtgaaggcctacaggctcgccgccgaagccaagaccgccaaggaccgcgtggacgaaggcggtgagaagacaggtctgttcaccggcctgtacgccaccaacccgatcaccggcgcgaagctcccgctgttcactgccgactacgtgctgatggactacggcaccggtgccattatggccgtgcctggtggcgaccagcgcgattacgactttgccgtgaagttcggtctgccggtcatctacaccgttgaaccgctgccggaatccggcgatgacctcgccgactacgaaggcaaggcgccgttcgtctcccatgacggcatcgtgatcaactcccacgtcgaatccacgtacgccaagggcgacgcgctgtcgctcgacggcttgcgcgtggacgacgccatcgccaaggtcaacgcctggctcgaatccgccggcgtgggcaagggcaccgtaagctaccgtctgcgcgactggctgttctcccgccagcgctactggggcgagcccttcccgatcgtttacggcgaagacggcaccccgcacctgctgccggattccgcattgccaatcaacctgcccgacgtgcccgactacgagccgcgcaccttcgatccgatggacgccgagtccaatcccgaggcaccgttgagccgcaacgaggactgggtcaaggtcgagctcgacttgggcgacggcaagaagacctactaccgcgacaccaacaccatgccgaactgggccggctcctgctggtactacatgcgttacatcgacccgaccgacaccaagcacatggtggagaaggacgagttcgactactggatgggcccgaaccacaacaagtactcgggtgatgaaggcggtgtggacctgtacatcggcggcgtcgaacacgccgtgctccacctgctctactcccgtttctggcacaaggtgctcttcgatctgggctatgtggattcggccgagccgttccacaagctgttcaaccagggcatgatccaggcttacgcctataccgacgaccgcggccagtacgtgccggcggacgaggtcgtggaagggccggccgacgcctccggcgagccgacgttcacctggaacggcgaacatgccaatcgcgagttcggcaagatgggcaagtccctcaagaacatcgtgaccccggactacatgtacgaaaactatggcgccgacaccttccgcctgtacgagatgagcatggggccgctggacgaatcccgcccgtggaacacccgcaacgtggtcggcggcatgcgcttcctgcagcgcctgtggcgcaacgtggtggacgagaccaccggcgaggcccacgtgaccgaggacgcgcccgatgagaagacactgaaactgctcaacaacacgatcgccgaagtgaccgcggagatggagggcatgcgtccgaacaccgccatcgccaagctcatcgtgctcaacaaccatctgaccggtctgaaggccgtgccgcgtgccgcagtggagccgttggtcctgatgctcgccccgatcgccccgcacatctgcgaggagatgtggagcaagctgggccaccccgagtccctgtccgccgagccgtggccggtggccgacgaacgctacgtgggccacgacaccgtgaccgccgtggtgcagatcaagggcaaggtgcgcgccaagctcgaagtgccggtcgacatcgatccggcagacctcgagaagcaggcgctggccgccgtcgccgaccgtcttggcggcaaggagccgcgcaaggtgatcgtcaaggcccccaagatcgtctccatcgtccctgcggagtgacttgttgcgggttaggctcccctctttgaggggagccgctcgcgtagcgagactgaggggagcgtcaaccgccccacctcaattgtggataacttcataagctagaaccacataccccgtttcagctggacaaacgcccatgaatccatcagcgtggatgcatgggcgtttctcataaccatcgcgcagaccatgccgccaaccgtttgcgcgcattcagcaggcagagcgaagccatgccccaaccgcgagtggaacggcccacgacgcctccgccgcctcccggccatgcacggattcgtccggccggccacccgtcccaaagggcgcagagcggcctgcggcaggcgacccgtgacaaacgtgcgttatcggatctgattggcgtacgttccgccgatgccgtcggagaatcagccagactcacccgggatcagccgcgattgtcgttcaccattgggcatgccttggccgtgatattgctgctgatcgtcgcccttggcatcagcttggcattgctggtccagcagtcgatgaatatggccatgctgtctcaaccgaccgccatgcagaccacgggcggctccgctggagatcagacgatgccatcgcagaacaccacggacgagaaacgcacggatccgcagcagtcggagcattccgatgccacagcgaaccccgaatcggataccacgcaatctccgcacatgcagacggacggcagcgatgccggcgcttccacgcatggtctcatcaacctcaacacggccaccgctgaggaattgcaatccatcaaaggtattgggccggttaccgctcagcggatcattgatcatcgcacggcgattggcgggtatgcatcagtcgatcagctgctggatgtcaaaggcatcggctccaagacgttggagaccatgcgagggcaggtgacggtcggatgagcagggatcggatactgcgcgagcaggggagccgcgattggaggatgctgccgatcgccatagtgatgtgggcggcgagtctgggagcgcacgcattattcgcatggaggatgtctgatggactcggcaccggtcaggcaaaggccgatgccggagctggcattgacgccaccataatcggcatggaatggcctgtcacacgaatattacctataacagtggcgtcatgtgctgccgtggcggcgatgatcgtggtgtctttccgcctgcggatcaggtggacgggaacattgaccgtatgcgttgcggtggcgtgcatcggcagtatggcggcaatcgcgtcggacaccattgcctggcatgatcctgcctccgcacaagctcgccaatccagttcataccacgaagtcatggccacggtgacgacgcccgtgatcgcttcggaccaacgcacatacgattgtcagacggacatacggctgagcggcatcactgtggatggcgcggacgtacgttccacggtcgccgtgcgcgtatacgccgatgaatcgtattgtgggcagttgcgtcgaggcgcggtctatctgttgacgggcgtattgcagcaagcgcgatatggacgcataccgctatggctgctcttggaaggaaaacagccggtagcgcaggtgcgggctccgccgtggcatctcgccgcgatcgcacatatgcaggagtcgtttttcaccgtgaccgaacaattgtccgatcaggggcgtgtgttggtgccgggattgacgatgggtgtgcttggccaggattatatcggcggcgatgccggtccgatgccggtcaacagcacgtatgcgcaaacgttggaaaatcagttccgccggtccggcatcatgcacctcatggccgtatccggcggccacttcgtactggtggcgggactggtgcgtcggttatgcatgtggatgctgcttgatcggcggctgacggcgttgctggtctctggagtatatgcgctgctggcattggcgatgttccccagtgattcggtcacccgcgcgttcatcatgggattgataggtgcgttggcgtatgcgatgggacggcgtacgcaagcgttgagcgccctatgctggacgataatcggtgtattggcggtgaacccggatatgtcggccagctacggattcgccttgtcttcggccgccgtactgggtatcgtgctgtttgcggggcggctggccggtgtctttgagcgagcgatgccgcacagcatcgccgagatgatggcgatgaccgtggccgcgcaattgttcaccctgccgattcaggtgttgatggaaccggaattgccgttgctgtccgtgccggcgaacctgctggtgtcaccgttcgtgggattggccacgatggcgggattgatggcactgacgtgcgcatggtgcacgccatggctggccggcgtattcgcgtggatatcgtcatggggcacgctggtgatggaacgggtggcgttgtggctgggcggcagcacgatggccgtcatcccatggaaagacggcgttacgggcgccgtgctgattgtggcggcggaaatcggtatcggcatgctactggtgttcgtcagccgttgcctccagcatgtccgtcgttatgaggccggaatgtctggcgtgcgcttcggttccgcttggcgcgtccgcctcagtctctggtgtgaggagacgagacgcctctttacgcggcggcaagccgaatagccaatgcggtattcggtgcagcaaccatcgcaatcccagccgaataccactatcttgacggcaccggcaaaatcgtgatgccggcaggtcattgtccaacctgtgtggcgagatggtggcatggcgaaaacagcagcgaatgcaccggtaaccgtggtgcccggaggcgactcgtatttgaacgacgcgcgcaccaaggcactgtgcgcgcaggcgttgaaggcgcggcccgacgccgacctcatcgaactcgacgccacatcggccgaccagtatgccttcgatgaagccgtcagcccatcgttgctttccgacgttgccgtggtcaaactcgtcaacctgcagaatgccgacgacaagctcgccgaagctctggtggcgtacaccaagcaggccgccaaggatccgaacggctccagcgtggtgatctgccagcacgagggcggcgtcaaagggcgcaaaatcatcgaccaactggtgaaagccggcgctcgcaaagaggacgtgccggatttgaagaaaccggatgcacagctcaatttcgtgctcggagaattcgagaaacgtggtcgtagagtcgaaccgatggccgcacagcagctggtatccgtactcggcggcaaaaccggcgaacttgccgccatgtgcgagcaactgtgtttcgactttgacgataatccgatgggcctcgaccgtgtcaaccagtatttgaccgccaatccgcaggtcaccggttttgccgtggcagacaaggccgtggaaggcaaaaccgcagaagccatcgtcatgatgcgtgcagctgtggaacaagggaccgatcccatcgcgctgatcggcgcgttggccatgaagctccgtaccattgccaaagcctcggcggtacgggccggcacgatttcccaggccgaagcgaaaaccaatccttgggtgctgaagaatgcgatgcgccaacttggcggctggacttcggcaggactcgcgcattgcatccgtatgctcgcctgggcggatgagcaaagcaaaacaaacggtggcgacccggtatatgcgctggaacgctgcattgaagacatcagtcataaaggtcggtaaaagtcgataaaggggtatttatgagcgaacacactattgcggctcccaccagcgaggccatgcaggagctcggccgtcgtgtggccggaatggtacacggcggcgatgtattgctgctctcaggccctcttggtgccggtaaaaccacattcgcccagggcttcggggcggggctgggcattaccgaacccatcgtgtctcctacattcaccattgcccgcgaactcgacgggcatttcgccgacggcactccgtctcatctggtgcatgtggatgcctaccgtctgggcggctcagcctatgcgccggggcaggacgccatcgggcgtttgttggacgagctggaatcgctgggattggacgaagaacttgaagaccccggcgagaacacggtggtgcttatggagtggggcgaacaaatggccaccgccttggcgccagaacgacttgaaatccatatcgatcgacctctcgattcctccgatgccgcatccgctggatcagacggcgaactcaccagcaacggcactcgtaccgtcgcattcgtcccagtcggcaagcgatgggccgcgttcgatctgcagtaagccatgcgcctatagactcctcgatgtacactctctagaggctttacgactaggaggattcatgggttgcacgttggtgattgacacctcattcggctcgacggtcggcattgtggggcgcgatcccattgtagagaccgattcgcgcacccatgtggagaaactgcaggtcaatatcgcgcgcgcggtcgaggaggccgggttcccagcatctgacattgcaacagtcattgtgggtaccggtccagccccctttactggtctgcgtgccggtatcgttacggccaaggcactggctttcgcaacgggagcgacgcttatcggccataatgttcttgagcctcaggtgcaatggaatctcattcgccgtggcaaagccggcactctcggcgatactcataaatgccatgtgctcactcttgccgtaaacgacgcacgccgcaagcaactctattttgcgttgtactcggacccgctcgttggcgatcccgatggcgaaaccgtggcgacggctctgattgacatggatatcgattaccctgcatccatcgcgcagcgcgtgaatgatgccgttcatacgtaccgcgacggacttagaccagaagacagcaatgtggatgtggtcgtggatgttgtgggtcatggggcccgcaaatatgcggatgcgctgggtgcaatcgagcagcttggcgacatcaccgatgaatccgtattggaccaaggggagcaaggtctcgctatctttgccactgatgcggaactggttgccaaccgtaatcacgatacgccggtcgaaccgttgtacctgcgccggccggacgccgaagtgccgaacccgctgaagcacgtgctcggccatgccggtgccgataaggcgtgagacgggttgattcgatgattgttgacatcactgccgtaagtcgtgatcttgcggtttgctccatcgcacagttggaaggcgaactgttcggcctcggcgcatggaatgcgaacatggtgcgagaggaactggacgcaccggcccgcacgtatctgctggatgtgctgggagaggtggaacaggcggttgtccgcggctacgccggcttctggtatgacggcgaggacgccgagctcatgaccatcggcgtgggcaaggcataccagcggcaaggcatcgccgctgcgttgcttcaggcactggtcgacgaggcgaagcgtcagggcgcctcgcgcatgctgctcgaagtgcgtgtggataacgaccctgcgctggccctgtatcaccggttcggattcgaacgcattggattgcgcaaacgctactaccagcctgaaggcatcgacgcatacaccatgagcttggacctgaaacctagggtcgtgggctttgccgccccgcagacggcatcggcggacactgaagacatcactggcaagcaaacggagaagaacggagaagcacgatgagcgaaccggttgtactgggcattgaatccacctgcgacgaaaccgcgactgccatcgtacgcggccgcgaactgctctccaacgtcgtggcctcatccatggaggaacacgcgcgatacggcggcgtgatccccgaaatcgcctcccgtgcgcacgctgaggccttcgtgccatgcgtgtccaaggcgctcgccgacgcgaacatgacgttggcggacgtggacgccatcgccgtgtccgccggtcctggactggccggttgcctggccgtgggcgtgtccggcgccaaggcgctggcctgggctgcgaacaagccgatttacggcatcaaccatgtgatcgggcacatcgccgtcactcagctgcagttcggcccgttccccaaggacacgctggctctgattgtctccggcggccacacctcgctgctgcatgtggaggacatgccgcgcaagatcgatgtggtgggcaccacgctggatgacgcggcgggggagtgcttcgacaaagtcgcccgtctgctcggcttcccgtatccgggcggcccgcacatcgaccgccacggacagaacggcgacccgcacgccatcaaggtgccgatgggtctgacccaaggcaaggccggtgccgcgcacccgtatgatttcagtttctccggtgtcaagaccgccgtggcccgttgggtggaaagcgagcaggccgccggccatgagattccggtggacgacgtgtgcgcatccctggccgactccgtggccaccgtgctagcccgtaagtccatgcgcggctgccggcagtacgattccaacacgctgatcgtgggcggcggcttctccgccaactcgcagctgcgcgccaaactgctcgaattcggcgagaactacggcgtcgacgtccgtatcccgcaaatcaagctctgcaccgacaacggtgccatggtcgccatgctcggcgtgaacctggtcgaagccggcgtggcccccagcgcccccgacttcccgatcgactccgccatgcccctgaccaaggtctcgatgtaatatttgcacggtattcccaaactgatactgggaataccgtgcctctcatcggtgaattgacagtgacctgtctgcctgatgtgagtagtggtgaggtcttcgccatggatttcccggttgatgatggggtgtcgtgtctggtcaccaatgcgatgaaaataaaaaagcctcggagaaccgaggctttcgatggctcctgcgactgggcttgaaccagtgaccgtccgattaacagtcggatgctctgccaactgagctacgcaggaatattcaattttcatcccgtccggagttacccgttcaggtgagctcctgcgactgtgcttgaaccagtgaccgtccgatatacggttctggcttgcagccgtagggcttcttgcaacaggagtagagagtacacctgctttgcttgtccttcaaatcggcgtgtctcgacaattcctctcgatgcacccggttttccgaagagcttcagccgtcggcgagaacattggctaggctccatgcaatcgcaaatagcattttctgggaagtgacgaagacgtcacttcctttttctatgcgaaggagctgccatgaagtactggaactcgaac

SEQ ID NO: 249 - DNA, 11000 bp, Unknown
  R101_18m  MAG No. k141_46383
ccccccccccccccactgctatatgcccacaatcagggctattgcgatggcttaacgcttggccatcgcgcgtagcacaatcttgcgcagttcggaggcaatcagcacgattgcggccaggcagatgcattccacccaagccatcgggctcaatgccacggtgccgaacggaccgttgaggaacggcacgtaaatcaccacgagctgcagcgccacggacaaaccaatcgcaccccatagccacttgttggagaacagacccacgaatgcggactgcagatgcgaacgggaggacagcgcgttgaacagctgggcaaacaccagaatcgtgaagcccatcgtacgggcctcggtcatctgcgcttcatggccgatggcatccaccgagcggtcggtgaacaagccgccggacaggtgcatgtccataccaatcagcgtgacgatggccatgatgacgccgatgtagatgatgtcgccccacatggaggcgtcaatcacgcggtccgtcaccttacgcggtttacgacccatcacatcgtcggtctgcgggtccacgcccatagccaacgccggcgcggcatcggtcagcaggttaatccacagcaactgtgtggcgagcagcggcacggtgacgcccacggtttccggctggcggatgccgaggaagccggcaaacaccacaccgaggaacacggtgaacacctcacccacattggaactcagcaggtagcgcaggaacttgcggatgttgtcgaagatcacgcgaccctcgcgtacggcggccacgatggtggagaagttgtcgtccgccagaatcatcttggcgctctgcttggtcacttcggtgccggtgatgcccatggccacgccgatgtccgcggacttgactgccggggcatcgttcacaccgtcgccggtcatggccacgatgttgccttggcgctgcaaggattcgacgatcttgagcttgtgctcgggggccacgcgcgcgtacacggacacttcggacgtggccttgtcgagcgcggcctcatcgggcagctggtcgagctggtcgccggtcagggccttgccatccttggcgatgatgccaaggtcggaggcgatgcgggcggcggtcagcgggtggtcgccggtgatcatcaccgtgcggatgccggcacgatgggcctcggtcacggagtcgcgcacctcggtacgcggcggatcgataatgccgaccatgccattccagatgagatcggtttcaatggcttcggcctgatcggcgatgtcggacacctggcctgcagcattgacgcttacaccgggcacatcagccaaagaactggtttccagcggacggcaggcctcgccaagcgtacggtaggcctcggaggagagacgttcgacggtggcgagaatcgactggcgatcgccttcggtgagcttacggacctgaccacccacgcggatgcgcgtgcagtagctcaacagcacgtcgggcgcgcccttggcgaacacggtgagcttgtctgaatcggtgctgtccttggcgatgatggacatgcgcttgcgttcggaggtgaacggaatctcgccaacgcgcgtgtagcgcttgatcttgcgatcggccttgaccttgcgtgcggccacgatcagcgagacttcggtggggtcgcccacaatctcccaacggccgttctcctcgcgtagttcgccgtcgttcgcgagcgtgccggccacgagcgtggcgacgacttcatcggccacaatctgggcctgctcggattcaggactgacgccgccggtcataaccatgcggccttccggcgcgtaaccggtgccagtgatctgcacttcgccggacggggtgaccacacgttccacggtcatctcgttgcgggtcagcgtaccggtcttatccgagcagatcacggaagcggagcccaaggtctccaccgaatgcagtttcttgacgatggcgttgtgcgcggccatacgctgcacaccaagcgccagcaccacggtcaggatggcggccaagccttccggcacggcggccacagccagcgagacagccaacagcaaggaatcaatcacgtcatggacgtcgttgaagccttccagcacggcgagcgccaccagcaccacgacagcgatgacgcacaccgcaatgccgaggatcttggagacgtaatccatctccttctgcagcggagttttctcatcttcggtggcggagagcatgtcggcgatcttgccgacctgcgtattcataccggtgccggtcacgattgcgcggccggtgccttgcgtcacggaagtgccgttgaagatcatgttggcgcggtcgcccagcgccttggcttcggtgagtgtgtccggcttcttgccaaccggcacggattcgccggtcagtgaagcctcggcaatgcgcaggctggccgcgttgaccagtcggccatcagcggagaccgaatcgccttccgcaaggacgatgatgtcgccggggaccacgtcggcggtgttgatgcgcatgaccttgccatcgcgcagcaccgaggtctgcggggccgtcatttgtgcgagcgcttcgacggccgcctcggccttggcttcttgcatatagccgagcacagcattgacaatcaggatcaagatgatcacgatggcgtcgaacggcagcacttcgccgccttcagcgccgggctgcgcattggctttttcgatgaaccaagcgatcaccgagataatagtggccgcgatcagcaggtagaccagcggatcttggaattgggctaggaatttcttccatttcggtacgggcggggcgctggcgagctcgttcgggccgaatttggccagtcggcgcttggcttcttcctcgctcaggccgtgggatgggtcgacgttcagggctttggccacgtcgtcggcgctggtcagacttggatcagtatcccccaatagcgcttcctgtgcgcgcacctcttccgattccacgaccccgttcgttgcggtcgtggacactgcggattgatctttgagatcatccataatgttctccttggtattgccgcggagtagtcagccttgcggccgctgccgggttttctctcccggctggacgcacaggactgcgcggttatggacaccggcgcaactgctgccgatgcatacgattgccattattccataaccgcgtggcgcacttggcgcacagcgtaatagcgttttgcctagaacaggcgacgcaaccaggcctcagccaaatcaggccaacactgcacgcattcgacgatgtgcgcatagaagccgttaccggcagtttccgcattggccaaggacaggccgtggctgccttcagggaacaggtgcgcctcaatgctcacgccggcggcccggcaggcctggatgagcattagcgtgttctccacgggcacggcgtcgtcggtcatggtatgccagacgaagacgggtggcgttttggcatcgatgtgcttttcgatggagaacttgtccagcaaagcctgattgtgagcttggtcccctagcaggcattggaagctgccgcgatgggcgtacttgccggcggtgattactgggtacgagagcatcagcgcgttcgggcgcacggcgtccgggtctatgccgccctgttcgcggatgtcttcgtcgccgaccgaggtggcgaggttggcggccagatgcccgcctgcggaaaagccgagtacggccacttgcgcggggtttacatgccactgatccgcattggcgcgaatcaggcgcattgcctcggcagcctccagcaaagccaccggatagcggctgggctgcaccgaatagcgcagcacgaatacggcgaagcctttggccaggaattgcagggccactggctcggcttcgcggtcagaagtcatggcgtagccgccgccaggcaaaatcaggatggccgggcgtatacggtccggttccatctcctcgctgttgtcggccacatagccaaagaatcgcgcctcgctgccatcaatgccaacgatggtttgttgaatgtattgcatgccatacatcatacgcgcagagaatagttctcgataagaaccactcgccatatgcggtcttgcccgtatctccaaaccgaataacacttacagcgaatcgtgaagactgcgggccatggcgcggtcgcgcgagcctttggtgagcttgagaccgagggtcacggcaatcaacacaacagtgcaggcgatccacagcgttcgaccgccgaagttgctgatagtccagccaccaatcagcggcgccagcgcaaccgacaccgaccacactacgttgtagacgccctgatacgtgccacgcgccgacgcgggtgccatggcggcaaccgtagtggtggcgatagggaatgtgcccagctcacccagcgtccacagcactacggcaagcgcgaatccgccccaagaatgggccgcggcctgcaccgcatagccgatgacggttacggcgaggcccatcaccagcacgcgtgaattgcccatgcgcgcgaacagtttcatcgcgggaatctgtagcaggcacaacataccgccattgatggtgagcagcaccgaatactcgcccagccctagaccaaggtccgtcatggcaatgggcaggccggaggtgctttggaagtacacaaggaagtagccgaacatcagcagggagaagccgaggaatggagtatcggtgagcacgcgccgccaattgcgagacatggcgcccttgacactggcagccggtgcggcatccgagtgattcggcctctcaatgccggcgaattccgcatgggtaacactgcattcgtcttcatggcgcaccgcacttggcaccgatacagtaatccccaaatgccgcacctcgcggaagaacgcaatcagcaatatcgtgacggctatcatcaccgccgcttcaacgtagaacatcagcgaatacgagatcttgaccagctggttggccacaatcggtccaatcgcgtacccaaaattaatcgcccacgattgcagtacgtatgcacgttgctgacgttcggcaggcaccacatccgcgatatacgcggcgatggccgggctgggcagcgaggcgaacgcaccatagacgaacagagccgcgcctaaagacacaggatcagtgagtacggaaacgaccagtagggcagccgctgcgccgatttcgccgatgataatcatggattggcggccgaatctgtcggacaaggtaccgccgaacaggcagccgatgattgcgccgaagccgtacatggccacgactgtgcccaccacaccctcatcgaggcgcagcgcggaaaccaaatatatcgacaagaatgaggtcacgaagcgacccatccacagaatcagaatcgccaaccataatccccaatacagcagggacagtccgaatatcatacgctgcttcttcactctcaataccttaccggctaccgacggcggaatagccgcgttttggcgcggggtgctgggacaatagcacctatggctatcaaaaaaggaccgaccaaggggtcgggtggcaagcatcgcaacaaactgaagggctacggccccactcccaaggccgaggaccgcgtctatcacaaagcgtacaaggccaagaaagcggccgaacgtcggcagatggccgacccgcgtctggcagcccgccgtcgagtggacaagttcgcttcggcggatacttcggatctggtgtacggccgtaattccgtgctggaagcactgcgcgtaggcgtaccttcttccacgctgtacatcatgtctcgtattgaacatgacgatcgtactcgcgaaatcgtgaaaatcgctggtatgaacggcctgcacatgctggaggccgatcgtctggagatggatcgtatcgcccgctctggcaaccatcagggcgtgattctgaaggtcgatccgttccagtactcctcgctgaacgagctggccgatcgtgctgagaagaaggccaaggcaatggaggccgcgaattcggcggccgcccgtattgctgcgcgaccgctgtttatcgcattggacggcgtgaccgatccgcagaacctgggtgccgtgattcgttcggcggccgcattcggtgccaatggtgtgattctgccggaacgccgttccgcttcagtgaacgccgccgcttggaaggtgtctgccggtgcggccgcgcatatgccggtggcgcgcgtggtgaacctgactaaggcacttgagggcttgaaggagcgtggatactacgttgtcggccttgacggtggcggcgataagctcgtcggcgagactggctttgaatccgatccgctcgttgtagtgctcggttcggaaggcagcggtttgggccgactggtgcgcgaaacctgcgacgcgattgccggcatcccgatcagctcgtctgttgagtcgctgaacgcttcagtggcggcgggtatcagcctgtacgcggtgtccaacgcacggcgcaaggctgcggcggagtgattgtcgcttgaggccgtaataggttgtacatacacggaagcccctctatttgaggggcttctttgtgtgatgggctcacctacagacagtccaccggattgtccgcttaatgactccacactgccgcatccggatcgtcatcggggttgtagccgtcgtcgtccgggtcgctgtaggtggattcgtcgtcaatgacgccggaatcggcctcttcgttaagttcggcgagtgccttggagtcaaggctgtagctcggcagagcgttgtcgatgtagctggtcacggcctcgcccatcggcacgtcgtggccggccttctccgccaggaaccagcgatggtcaagcacctcatggaagaactgagcaggctcgatctgggagcgatattcgcgcggaatcatacgcacggtcggctcgaacacctcacgcatccagtcggtggccacgatttccagatcctcgccctcacgccacgtggaggcacggtaggcgtcaaggtcgttgagcagacgacgggcctggttctcctgcacgtcaaggccggtgaggcgcagcagcttgcggttggcgtagccggcgtccaccacgcgcgggcggaccagcacacgcttgccgtcctcggcggtcttcatttccagctcgtccacgtcgaagcccagctcgttgagcttgttgacgcgctgctcgatcttccacatttcgtccgggttgaacttgtcggtgtcggtcagggcgctccacagcgagtggtagcggtcgactaggcggttgcccacctcgatctcatccacgtcgccgggcagtagcttgccggacgccaaatccataagttcgccgatgatgttggtgcgggccaagtcgatatcgtattcgcgctggccgtcggtgagctgggcttgcaggtcaccggtctcggcgtccaccaggaaggcggagaaagcgtcggcgtcgcgcaggaacaggacgttcgacagggacacatcgccccagtagaagccggccaggtgcaggcgcaccagcagcacggcgagggcgtcaatcagtcgttcggcggtgtccgggcgcaggttgcgggcgaacaacgcacggtacggcagcgagaacttcaagtgccgggtgaccagaatcgcctccagcggctccccttcacgggtatgacggccgatgaccacggcgatcggggtcacagttggcagttcgagcttctgcagtcgacgcaggatctcgtactctcgctcggccacctggcgcgtgatctccttcatggcgtacacctcgtcgcccacgtgcacgaatcgcacgacgtggcgggagatgcctcgcggcaggttggccagcaggtccttaggccaggtggccaagggcttgtgccagggcagcgtgaacatctttgggttcgagctggcggcggtgattttcagtgcttgcggttcggctgaattggcgtgttcgtcttcggctttgacagacgtggccttcagcgcacgcggatccatctggggcaattcgttcaactccatgtgttcgattttacgtgtcgttcgcgatgtgtgctcctttgccacgacttcggcgcgttatgtttacgggaaaacaccgtttggtctctccctcagaccgtctagaaggcaaaaagaaaagccccgcagctatgcagggcctttccaacgaggccataagagaggaagagaataacctcgtttaatggttgacgaagcgattagacctcgccaagtatctattagttcagacgcagctcagtcgacggagcgaacaggtgcatcttggccgggtcgatcttgatcttgacggtcgcgccaaccttcggcagcgcacgcggattcacacgaatcgtggtgagcttgttctggtcggacatgacctgggaagcctcagcggcggagccatcggtgacgatgttgccgtagatgtagccatcggagcccagatcctcgacgttcacaaccttcagggagaaggcgttcgggtcgtcagccggggccaggccagcgtcctcaggacggaagccgaccacgatctggccgttgtcttcggcggtgagcttgttgacggcctcagccggcaggtccacggtgtcctcaccgatcttcgccttgccgttgaccaccgggtgggtgttcaggttcatcgacggggagccgatgaagccggcgacgaagacgttggccgggcgatcatacagctcggtcggggcgccgacctgctgcaggataccgagcttgatgacggcgatgcgatcgcccatcgtcagggcctcggtctgatcgtgggtcacgtacagggtggtgacacccagctggcgctgcagggcagcgatctgggtacgggtctggacacggagcttggcgtcgaggttggacagcggctcatccatgaggaagaccttcggctcacggacgattgcacgacccatggccacacgctgacgctgaccaccggacagagccttcggcttgcggtcgaggtactcggtcaggtcgaggatctcagcggccttctcgacgcgcttgcggatctcttccttcggagtgccggcgatcttcagagcgaagcccatattgtcggccacggtcatgtgcgggtacagggcgtagttctggaacaccattgcgatgtcgcggtccttcggctgcatcgtggtgacatccttgccaccgatgaggatgcggcccttgttgacctcttccaggccggcgagcatacgaagggtcgtagacttaccacagccagaagggccaacgaggacgaggaactcgccatccttgatatcaagattcagatcatccacggagggcttatcgttgcccgggtagatacgagtgacgtggtcgaaaacgacttctgccataattactaatcctttcagaggcaggtacgtgcctcacgatccgttgtaaagggatttgttctttactgcgcttccgccctcgccaccgacgtacaactttgctttcggaaactgcaagcttcagcgtttacttttttccggttcagtgaaggttctcttcgttgagccgagaactactatacacggaccgtggaccaaggcaagtggcgtgtctgaaaatgtagttaactttatgggcgtttctgggggtgttgtgtggttcggcccatgacacgcctgtttctcgaacgtgcgaaccggcacgcccggcgtagagcaggcctgctcttcccgaactgacggattccatcagtcgccgactaatgcgacacagactcgaaggtgacgccgttgcgggcggctttgcgctcggccttgcgctcctcggcgttttcgatgcgctggatgcgcagctgacgccagtcctcgcgcatgtcgcggaaacggtcggccagcgttacgtcatcgttctcggcatcgccatcagtaccgctgccatcggccttaccgaacgtgccatcggccaccttggtgatacccagcttgagcagtccgagcaactcacgcaacgtttccggtacgggctcatcgccctcatcggcggactgggtcaggccctcgatgcgacgacgaagcgcgtcggcgtcctcgggatcgatcttgagcccggcgatcagcgactggcgcatggtctcgtaatcgaggttggcaaagaaattcagctgttgcagcgtcatgaagcccttgagctcggggaatcggtggacgatgtattcctcgcggtcgtcggcggcgcgggtccagtcgcgggtgagctgcggatcccagttggcggtaatcgatccctcgcgcatgcggtagtggtacagcgccttgggcagacggaccacgcgcgtggcctcgccgatcacgttgcagatacgggagagatcctcgattttgcgccccaccgggaaggagaatccggtgccctgataggtggaggcgggtgccaggaaggcccagaaatagccgtcgatctcagccttgacctgctttttgatggcctcgaccggggtcaggatctgcacctcggtgaagtcgttgtggcgatagttggacagcagcggcttgttgttctcggagatggtgtcgaactggaacatcacgaggtcggcgtcatactcgcgcatggcgttcaggcagtcctccaccaacgtgggggccacggtgtcgtcggaatcggcgaagtatatgtacgcaccggtggccccggcgatgccggtgttgcgggcgtcggacaggccgccgttgggcttgtgaatcacgcgtatgcgcgggtcgcgggcggcccaggcgtcgcacatggccgggcagtcgtcaggcgagccgtcgtcgaccagcagaatctccagattggcgtacgtctgcgcggcaacggacgccacgcattcgtcgaggaacttctcgaccttatataccgggatgatgatgctgaccaacggctcctgttccatgcctccagcgtagcgccgtcgtgcgaacgcggcggcgctgcgggttcgcggaccgcgaaacccttagaaatcccagtcgtcgtcatcg

SEQ ID NO: 250 - DNA, 18488 bp, Unknown
  R101_18m  MAG No. k141_46945
ccagtgaaatcatcgcggtgattgccagcgagaagccggccagtttggcgttgccgagtactttgtcggtgaacagcgtggagaaaatggcgattggagccaacgcgcagatcaccatcacggcgcgaatcgaagccgagaacggcagcaggaaccacgagatcaacgcgaaggcgacactgaacggtatacgccaagcgatgacggccatgacttccttcacatcatgcttggactggggcaaatccatgagcatgcccaccatcagcatcgacaccagcgcgttggcaccgctcaacggctgggttatagaggcgatccaatcgggaatcttcacgttggcgacggtcaacgcgatcatgagcagatacgtgtcgaacggcaccgagccgaagaagctcttgccgatggtgcgcagcaatgcgcggcgggcaagccgtttggcgtcgcgatccttgggcttttcgtacggcaaggtgggaaccgaaccggcgtgttgttcggcaagtgttttgccgggctgaatatgcagcagttgctgggtgagcacattggtgccggcggccaccatcacgcagttgccgatatcgaacatcgcagccggcaccaccgcgcccgcaccccagaatgactggacgaccgggaaagagaaacaaccgagattgaagccggcgccattgagcatcaggaaggcgcggtcggtcacattgcgcttgcgggtggccagaaagatgaacacgatcgggataaaagcaaacaggaatgcgaataccgaaataagcagcagcgagatgtcatgcggattggtggcgaacgagtatacgatggcaccgggtagcacgatgttgaattccgcggtttgcaacacgcgataatccttctgcccgaacaggccgaaccgcttgaacagatagccggcgagaatgatcagcaataggccaaccggcgtaagaatggcggacatacacttctctccttggctcacacaggctcacggcgcacaggctcagacccacaatgctgtgaccattatatttgccgccttggcattgccatatgtagaggcgtccgcaagggcttgcaattgcctcacgcatatacgaagagcctcccggaatcgttggcgatccaatgtttccaggaggctcaagccggtgcgcgagatgggacttgaacccacacgtcaaagacacaggaacctaaatcctgcgcgtctaccaattccgccactcgcgcatgcatatccgcgtttccacaggtgtggaagatatacaaaaccctaggccggacagccattacagaccagccagcctagggcatccgagccacttgtcagaatcgaactgacgacctgctcattacgagtgagccgctctaccgactgagctaaagtggcttggttcgcggaaggcatttcgccagccgcgcacaagaaattaagtataagacatctccgcgaaaagtccaatcggcggcttggcagttgtgtcgtgaccgctcggttgaagatgacggttgtgccgcgccacgaactgttcgataatgcaaacgatggcaatccgacatcgctgactgatttttgttatgttcatgtccgaatttgtgagtattctgtttggtgatacggagcgcatccgagccgtgagcgaaggcgctccagtcactgatgaaaggaatggaatcctatggccatcaatccgcccgttgacgccacccagacccctgagtgggctgccctgcagaagcactatgacgagcttcaggccgaaggcgtgagcctcaagaagtggttcgccgaagacgccgagcgtgtcgacaagctgtccttcgacgccggcgacctgcacttcgatctgtccaagaacctgatcaagccggaaaccctccagctgttcgccaaccttgccaaggccgtcaagctcgatgagcgcaccaaggctatgtacaccggcgtgcacatcaacaacaccgaagaccgcgccgtgctgcacaccgcgctgcgccgcccggtcgaggatgaaggcaagtacatcgtcgacggccaggacaccgtcaaggacgtgcgcgaggtgctcgaccgcatctacgccttcgccgacaaggtccgttccggcgagtggaccggtgtgaccggcaagaagatcgaaaccgtggtcaacatcggcatcggcggctccgacctgggtcccgtcatggtgtacgaggccctcaagccgtacgccgacgcgggcatctccgcccgctacatctccaacatcgaccccaacgacctggccgagaagaccaagggcctcgatccggagaccaccctgttcatcatcgtctccaagaccttcaccaccctggagaccctgaccaacgcccgtgaagcccgcacctggctgctcgaagagctcaaggccaagggcgccatcgacggatccgacgagaagaacgccgaggccatcaagaagcacttcgtcgccgtctccaccaacctggagaaggtcgccgaattcggcatcgacccgaacaacgcgttcggcttctggaactgggtcggtggccgttactccgtcgactccgctgtcggcacctccctggccgtcgtcttcggcccggctcgtttcgaggagttcctgcacggcttccacgagatcgatgagtacttcgccaacaccccgttcgagaagaacgtcgtggtgctgctcggtatgctgaacgtctggtaccgcaacttcttcaaggtcgcctcccacgccgtgctgccgtacgaccagtacctgcaccgcttcccggcctacctgcagcagctgaccatggaatccaacggcaagtccgtgcgttgggacggcacccccgtcacctccgagaccggcgagatcttctggggcgagcctggcaccaacggccagcacgccttctaccagctgatccaccagggcacccagctcatcccggccgacttcatcgcgttcgtcaacaccccgaacccgaccaaggacggcgaccaggacgtgcacgagctgttcctgggcaactacttcgcccagaccaaggccctggcgttcggtaagaccgccgacgaagtgcgcgccgagggtaccccggaggagatcgtcccggcccgcgtgttcaccggcaaccgtccgaccacctccatcttcggtgtggctctgaccccgttcgccgtcggcgagctcatcgccctgtacgagcacatcaccttcgttgaaggcaccgtatggggcctcgactcctacgatcagtggggcgtcgagctcggcaagcagcttgccaagcagatcaccccggccatctcccaggacgacgacgccctcgccgcccaggacgcctccacccagagcctgatcaagttctaccgcgcaaatcgcgagttctgattcgctttgctcggtcagaattcgtgattcgcgcgaccgcggctgtgctgtctggtgggcagcctggcgactgcccacgtcgcgagttctgattcgttcctctggtgccccctcgggtgagaggaggtgtcagtgtagctgactgagggagtctctctcacgactagtgcccgacatcttcggatgccgggcactttgcatatacggattgctgtcagtcagatgagtcgaacatggtcatattccgcttcggcatctgtttgcaggcataaaggcactatctggccaactcacgtggctgattcgcttattcgcccttattcgcctcatccaagctcagcagatcgtcatcggcatcgtaatcgaagagttcgccgtaacggccccactccacggcgatggcgaactgctgatgcgcctcgtcgttggagtaacgggcgcgcagcaggtccagcatgagctcgccgcggagcttgccttccgcagacttccgcagtgcatgctcaatgttgcgcaccagcggcgcgtgttccatcgccagtgaggcgaacacctgcttggcgcgcagaatgtccgccttatgccaggcgtcgcccgcctcggtgatctgcacatggccgtcgcgtaccacgatgacgcgcagcatcgtaccggcatccaccagcgggaacaggtcgtccacctcgaacgaaagagccgaggccaaatctgccaagtcgatgccgtgaggatgctcggcaaccacatccagcagaccggcgagcccgcccggcgtggcgttgggcagcggatgctccttgattttctcgatggtcttggcgggctgaaggtctgatgcgtccgtgacagatgcgtccgtgacgggtgcgttcgtgagcgatgccgatggcgatagagcctcggcttgttgcgtaggctgcgaggcctgtccggtcagaatcgcgtacagtcggtccaccatcgcctcgaattcgacactgtgacggtcgcgcgggcgctgcagatcaacccgcacatcggcaatcagatgccccgggtgcgagcccaacaccaccactcggtcggccatctccacggcttcctcgatgttatgcgtgaccataagcaccgacttgatgctgcgctgttcgctcgaccacagcttgagcacttcctgacgcaggttttcggcggtcagcacgtccagggcggagaacggctcatccatgaacagcgcgtccggccgcagcaccaaggcgcgtgcaatgcccacgcgctgcctcatgccgccggacagttccttcggatacgccgattcgaagccgtccaggccgatcatgtcgatggcatccagagccagtttggtgcgttccgcacgtggtacgccgcgcgccttcagaccgagttccacattgtcttgcacggtgagccacggcatcagcgcgaaggtctggaacacgagtgcgatgccgggattcggaccggtcagggcctcgccgcgatacttgaccgtgccgctggtcggcttgaccagtccggccagcgcacgcaggaatgtggacttgccggcacccgaacggcccagaatggccacgatctcgccctcgtacaggttgaacgagatgttgtcgaacacggtgagttcggtgccgttgtcggccgtgaagcgctggccgacgtgctgggcttcgatgatggtgttctgcggggtcatcgcccgcagcgaacgaatggtttccattgcaacagtcatattattctccttaagtctttagttcagtgcgaaacggcgctcggccatgcgctgcagcgggttccagaacaggcggttgacggccaccacgaacacgctcatcacggtcacgccgatgatggtcctcacggtgttgccgctttcggtggcctcggcgatatacgcgcccaagccggaggcggtcagcgtatgccgtccataacttacgatttccgagacaatcgaggcattccacgccccaccggccgccgtaatgccgcccgtgacccacgagccgaataccgccggcaaaatcaaatcgcgccaccgctgccagcgccccagctggaagctgcgcgtcatctcacgcagatcgtcgggaatctggctggccccggcgatcacattgaacaggatgtaccactgcgtgcccaacgccatcagcagaatactgccccagttgatatccacgctgcatgccacgaaccagagcgtgacgaacgggaacgtgaagttcgaggggaagctggccagcacctgcacaatcggctgcataaaccgcgaaacgcgcggattcatgccgatcatcgcgccaatcggcacccaaatcaccgagcagacgagcgtaagcagcgccacgcgcaggaacgtcaccatgcccaacacgaacgcctgcccgagctcgccgaatcccgcatcgcgatgaatcaccagcataagctgcaccagtccgaacgcacacgctgccaacaccagcactgtgaataccacgtcaagcgcgcggctgcgtgcggacttcacgtccgccgcccaacgtccaccggtccgacccaacgggcgggccagcgtgtcgaacaggtcgccgagaggcctgaacagccaggccaccatctcatcgatatgtgactgacgaatgatggtcagcaccacactggtcttgcgcaccgccgactcgctttgcgtaatgcggaacttctccgcccacgcggtcaacggcttccacagcagtacgtcgataagcagcaccaccagcaccatcgtcacgatggcccagcagatggccgcgagattctcctcggccgccgcctgtgccacgaagctgccgatgccgggcaacgcataggtgcgattgttcaccgagatcatctcggaggcggtcaggaagaaccatccgccgcccacgctcatcatgcagttccacagcagcggaatcatcgcgttcggcacgtccagtgtccagaatcgttgccagcgtgtgagctgtagtgagcgggccgcctcgtcgagttcagttggttcgctggtcagggaccgggtgaacgagaacgccatgttccaggcctgactggtgaagattgcgaaaatcgacgcggcctccacgcccagcatcgagccggggaacagcaccatccagatggtgatggtggccgaaagaaagcccagaatcggtaccgactgcagaatatccaacagaggaatcagcacgcggctcaggcggcggcagcgcgcggccgccgtgccgtagatgaacgtgaacaccagtgagaagaacagtgccacgagcatgcggaacaccgagcgcagcgcgtaatacggcaggtcggcgagatgcgtactgacttgtgacggcacgcctttcgggccgatcggttcgccgatcgccggcagaatccaagcgatcagaccgaacagcgccagaataccggccgcgaccagtacgtcggaggccaggcgcacggcgaatggctggcggtcggacgcggcggtggaagggttgcgggccgacgcatttggacgcgcgccgacgcgattgaatgaaaacatggtcatgaaaagacctccctatgcataggaaagacgaattatgcaagggttatccggggagccaaggaacactacaggcgagagcccgacttccggataacggaatacaagaaaacatggtcatcaccaccgcaactatgactgttgccggcggcggaactactggaataatcaccgtccatcggactctcacctccttcaagccgtgcgctgaaacgccagatcaataccatcgtcggtatccatgcgaccagcaggaggggcggaaagtattcgaatccgccgattcgagccatcgttcaagcttcagcatcgcagggcggtggaattgcgttagttcatgccttgatccgacaagaactgctgacctgcgtgcagtgtctccactgttagcggcagcaacccatatccctgcggtagcctcgcctaccgacgctcccaagataaagcccgcctgcaggtctgtcaactacgtcgcagtgccttggtgttggaatgccatcaggcagccattctgtccgcaataatccgtacaattgacgattgctgtgtcgagaagtgggccgccgcataagcccacgtctccatgggtccagtccgaacggccgcaaggcctgactttcggcggatcggcaggcttcccaagggcaaactcgagggataacgagaacaggccaacgcgcgcgatgcgtaatcgcgtggatggccccagatctgtggctgatatgcggcagcactgaaggaaaacaatggttaacgctgttgaggcttttgacgccaagcacatgaagccggctgaggaaatcccggccttccgtcccggcgacaccgtcgacgtgaacgtgaagatccaggaaggcaacaactcccgtatccagaccttcaccggcgtggtgatcgctcgtaagggcgctggcgtgcgtgagaccttcgtggtccgcaagatcagcttcggcactggtgtggagcgtcgcttcccggtgcactccccgtccatcgactccatcaagctcgtgcgtaagggccgtgtgcgccgcgccaagctgtactacctgcgcgctctgcgcggtaaggccgctcgtattgccgagcgccgcgacaactccgctaagtgagtcgattcgcgggtgcaatcgtgggcctgatgatgcaggtgcgcgaataaaccgtgaaattcagcccggaaccgtttcggtttcgggctgtttccgtattttccacgtatgatggacgggcgccggcacccctcatatccggcagcatgaatcgcgaggagatggtatgcaggacgatcaggataacggcgaattcccgatttccgacaatccggagagcaaccagacctcgtatgatgacgaggccgatgcccgcgattcccgtacgttccaagtcgccgaccacggcatcgccccgtccccggttcccccggcaccggcgcgcccggcgcacgccgcttcttccgctggcgcgaatgccgcggcagcatcatcgatggatgatgaccacttcaccctacgcgactttttcctgtggtgcggcgttcccgtgcttatcgtgctgctgattcgcattttcgccgtcggcttttacgagattccttcgcgctcgatgatggacaccatggtgcccggcgatcgcgtggtgaccagcaagctcacccccaagatcttcgatctgcagcgcggcgacgtcgtggtattcaaagatcccaacaactggttgaacgaggagcagagcagcgctcccggtggcgggtacctcatcaagcgactgatcggcctgcccggtgacgtggtcgaatgcaagggcgcgggccagccggtgaccatcaacggcgtggccatcaatgagacctcctacattcgccccggcgtggacccgagcgccttcccgttctcggtgaccgtgaccgaggaccacgtgttcgtcatgggcgacaatcgcgccaattccgccgactcccgctatcatcaggatgacggcgatcgcggcttggttcccatctccgatgtggtcggagtcggaatcgcgagatactggccgcttgaccggcttggtgcgattgatgaccaccacgaagtcttcaaggacgtgcctgacgcttccggctcaaattcctgagtcttttttgaaccgtgtgagtctttgaacgattgagttccgggccgtctgaatcctgaaccatttgaacctggaccgtctgaatcctaaccattgtgagacgatgggagccgcgcatgattaccccgacacttgacttggaacgcagccttgcggcccagggctatgaccttattactggattcgatgaagtcggccgcggcgcgctcgccggcccggtgatggtcgggtgcgccgccatctgggcccgtgatttggagccgttggatggcgatgatgccgtcgaactgtccgggcggacctacctcggcgtgccggacggcgtggccgactccaaaatgctcaccgaacataggcgcgaggcgattttcgacgaactgcgcgactggtgcgcggcctacgccgtaggccaggccagcaacaccgagatcgacgaatggggcatcacctatgcgctcggcgtggccgccctgcgcgcgctcagccaagtcgaacgcgaacttggcttacggcttggagggggattgacggcaaaaaaggctgcgggggagattgtggaaggtcgtccgggagactccgtaggggaatccattggaaattgtggggaaagcgttcgcgccctgcccaaagtcgccggaattctcgacgggccgagcgattacatcaccaaggcgctcaacacgttcgacgcgccggacgtgccgattccagccgatataacgaccaaagtcaaaggcgaccagcattgcgccaccgtcgccaccgcggcggtcatcgccaaagtgacccgagaccggctgatggtcgacctcgcgcaaagcaacccacgttacgccgcctacgaatgggctcataacaagggctatggttccgccgcacaccgtgccgccatcgccgaacacgggccgactccgctccatcgtgtctcatggcacctgacctgagccgcgtgcgacacgacagtgtgagcgctaacgcaaaactgttgtggacgcgctaaagtcagtattgattaaggtacaagcctggccgtgcacggatgccggccgccagaggggaggttaggtagcatggtgaccggccgcaagccaagcaaacgtccatccatgttcgaagtggccaagctcgccggagtcagccatcaaaccgtctcccgtgtgatcaatgactcgccggacgtttccgacgccacccgtgcgcgagtccaggccgccattgaccaactcggctaccgcccctccaactccgcgcgcgcactggcttcccgccgttcgcgcaccatagggctgatcgccggaggcctcaaattcttcggcccgatttcctccatctcatccatcgaatccatggcccgcgaacacggtctgttcatgagcgtgatgatggtccacgaggccttgtgcatgcagtccgaattcgacaacctgtgcgacaccttcaacgagcagaacgtcgacgccttcatcttcctgaccccgaccgacgtgatgttcgccgccgcctgccgtgcgcgagtcactcagccacgcgtcatcgtcaccgccacccacggccaaatgaccgtgcgtgagggattgggccttatctccaccgaaaacaagcgtcgcactgcactggtcggtatcgaccagtggggtgcaatggccaaagtggtggccttgctgggcgaatacgggcacaaatcggctctgtattttgccggtcccaacgaatggcgcgacgcccacacccgactggatgcgtggcgcaagctcgccgcctcccgatccatcgattcacagatcgtgcgctgccatacgtgggatgcctctgaggcatatgcgcacatgaatcatctcattgatgagtatgggcgtcgaggcacggcgttgcccaccgcggtcgtcgccgcgaacgacaatcaggccgtcggcatcatgcgcgcgttgcatgagcatgggcttcggattccgcaagacatcagcgtggtcggattcgacgacatgtctggcgtggataacatgtacccaccgctgaccaccgtgcatcccgatttcgaggggcttggcgtggccgccatgcgcgagacgctgcgtttgctgggggagggcggcgagccgaccttcctgaccacccagcacggcgtggggctgattcccgccgaggtgcgtgctcggcggtccttggggccggctccccggcggtaaattggcgctgttatcaaaccgttatgatgcgtgacacggtataagttgtgtcgaatgcaggttatcggtacaatgtttttttgaaattgtgagcgctaacatcctccccaaggaaggggataacaacgccggcgctccaaggcaaaggaaagatatggcagcaaccgacaacgcggccgagcaggccgcccacatcgccgagaagattcgcgctggcaagaccacgctgggcatcgaattcggctccacccgcatcaaggccgtcctcatcgacgacaacttccagaccatcgcctccggcgactacagctgggcctctcacttggaggatggtctgtggagctacaccaccgaggagatctggggcggtttgcagtccgcttacgcctccatggccaacgacgtcgagaccgcctatggcgagaagctcacgcacgtcggccacatcggcttctccgccatgatgcacggttacctcgcattcgacgaggccggcgaactgctggtgccgttccgcacctggcagaacaccaacacctccgaagctcacaagaagctctccgagctgttccagtacaacatccccgagcgttggtccatcgctcacctgtaccaggccgtgctcaacaaggaagagcacgtctccgaggtggcttacttcaccacactcgccggttacgtgcactggaagctcaccggtgagaaggtcctcggtgtgggcgatgcctccggcatgttcccgattgacccgaccactcacacttacgaaaccgcattcatcgagaagttcgacgctctgcctgaggtcgcagcccagccgtggaagctggagaacctgcttcctgagccgctcgtggccggcactccggctggcgagctgaccgaggaaggcgccaagctgctcgatccgtccggtgccctgaatcccggcatcgtgctcgccccgcctgagggcgacgccggtactggcatggtagccaccaactccgtgcgcgtacgcactggtaacgtctccgccggcacctccatcttcgccatggtggttctggagcacaagctcaaggccctccaccctgaggttgacttggtcaccaccccggccggcgatctggccggtatgagccacgccaacaacttcacctccgacctcaacgcttgggtcggcctgttcggccagttcgccaaggccatcggccagtcggttgatgccggtatgctgtacggcaccttgttccgcgcggccatcgccgacgacgtggacgccaactgcggcggcctgctgaactatccgttccgttccggcgaattcctggccggtctgcctgaaggccgcccgctgttcgcccgcagccccgaagccaacatgaccctcggcaacttcatgcgcgcccagctgttctccgcgttctccccggtcaagatcggcatggacgtgatgaccaagcaggagcacgtgcaggtcgactctctcgtgggccacggcggcatcttcaccactccgaaggtggctcagaagattctcgccgctgccttcaacaccccgatcaaggtcatgtccaccgccgccgaaggtggtgcctggggtatggccgtgctcgccaactacctgtggaacaccaacgaggatcacagcaacctcgctgacttccttgatggtttcgtgttcaaggacgcccagtccaccactgagaagccggtggcttccgatgtggttggtttcgaggacttcttcgcccgcttcaccaagggcctgcccatcgagcacgctgccatcgaaaccatcaacctcgaagataagtaagcctttctgacctccctctattgagagaggtccttgagattttgaaaaaacgtccatccatcacagtggaaaggaaaaccaataatggcaactttggctgattacggccccgaggttcgcgccgaggtcaagcaggttcgtgaggtcgtctccaacctgcaccagcagctgatcaagtggaacctggtcgtgtggaccgcgggcaacgtttcccagcgtctgcacaccgccgacctgttcgtcatcaagccctccggcctgcgctacgagtacctgaccccgtcctccatggtcgtgtgcgaccttgacggcaacgtggtcgacggtgccgaagccccgtcctcggacaccgcttcccacgcctacatctaccgcaacatgcccgacgtctacggtgtcgtgcacacccattccacctacgccaccgcttgggctgccactggtcagaacatcccgtgcggcctgacgatgatgggcgacgagttcggcggcccggtgccggtcggcccgttccgtctgatcggctcggaggcgatcggcaagggtgtcgtcgagaccctcaagaagtacccgaagtccccggccgtcctcatgcagaaccatggccccttcaccatcggcaaggatgctgaaggcgccgtcaaggccgctgccatgaccgaggaagtcgctcacaccatgtgggccgcccgtcagctcggtgacatcatcgagatcgaccaggccgacatcgataagctcaacgaccgctaccagaacgtctacggccagcactgatttgatggagtgtccgccgcgttgcggaaggctcgacgtaccttcgtacgccttcgccttccgcgccttgcgggcacacacatcaaatcagcgctgactccgccagcacggtggtgtcttggctcccctctctgaggggagctgtcagcgatagctgactgaggggagcctcggtcggcgaatgaaacttaaacaaacccccataaacaaagaagtaaaggaagtaaccctatggttatggaaaaccccttcgagggcaaggaaatctggttcggcgttggttcgcaggacctgtacggcgaggaagccctgcgccaggtcgccattcactccgctgaaatggtcgactacctgaacaacaccggcaagattccggccaagatcgtactcaagcccaccctgaagtcctccgacggtgtcaaggagttcatggtcgaggcttccgccaacccgaacgtcatcggcgtcatcacctggtgccacaccttctccccggccaagatgtggattcgcggcctcgaagtgctgaccaagccgctgctgcagctggccacccagcaccacaaggaaatcccgtgggagaccatcgacatggacttcatgaacctgaaccaggccgcccacggcgaccgtgagttcggttacatcgtctcccgcctcggcatcaagcgcaaggttgtcgtcggccactacaccgatcctgaggtcgtcgagaaggtcggcacctgggcccgcgcctgcgccggctgggatgcctccaacaacatgaaggtcatgcgctggggcgacaacatgcgtaacgtcgccgtcaccgagggcgacaagaccgaggccgagcgcgtgttcggcgcctccatcaacacttgggccgtcaacgagctcgtcgctgcgtacgacgccgtcaaggacgaccaggtcaaggagatcatcgaggactacaaggccaagtacgacgtcgacccggctctgctggacgccaagtacgactccctgttcatcgccgccaaggaagaggccgcgatggtcaacatgatgcgcgccaacggctgcaccgccggcgtcgacaatttcgaggacctcggcgctctgccacagctgccgggcgttggcccacagcgcttcccgtccgagtacggctggggcttttccgctgaaggcgactggaagaccgccgtcctcgtgcgcatcggcgccgtcatgggctacggccttgagggtggcgcctccctcatggaggactactcctacaacttcaccgagggcgacgagctcgacatgggctcccacatgctcgaggtttccccgtccatcggcaccatcgccaagccgaagctggagatccacccgctgggcatcggcggcaaggccgacccggtccgcctggtcttctccggcaagcccaccaaggacgccgtcgtggtctccatgtccgacgttcgcgaacgcttccgcctgctcatggacgtcgtcgacgtcgttgagccgcagggctccctcaaggagcttccgtgcgcccgcgccgtctgggagccgaagccgagcctgaagaccgctgttgagtgctggatcaccgccggtggttctcaccacacctgcatgaccacctccgtcggtcgtgaggcttgggaagacttcgcccgcatcgccggtgttgagctcgccgtcatcgacgagaacaccaccgctcgccagttcgagaaggaactggagctgtccgagatgtaccaccgtctcaacaaccagcactgattggcggagcgtataccgcctttcctcaggttcgacgtaccttcgtacgcccctcgccttcggacggcggtctccgcacgcgccaatcagcgctggcaagccagcaccgatgactaaatcagtctgctgactgctaccgctaaaaggggctgttccgggaaaccggagcagccccttttgctgttatcggcaactccccacaaacgcatcaaaaatcgcctgcgagcatggatctaccttgtagagaaactcgggatgccactgcacggcccacaggaagtggcttgccggccggtacagggcctcgatcacgccgtcgggcgcaacggccatgacttcgagaccgggggccacatcacgaaccgcctgatgatggtagctgtttactgcaatctcagtctgccccgcgaacaatgaagccaggggagtgccggacaccaaggaaacgctgtgcccgaacgcatcgtacggcggattcatatggtgttcgatatcgctcggatgctggcttggcaaatcctgccacaacgtgccgcccagtgccgcgttgatgaactgaatgccgcggcagatgcccagaatcggcttgtcccaagccattacagctggcagcagaatcgattccattcggtcgcgctcaggagagagcacctcgctacggccggtggcggaggccgctgcaccaaccatcggtcccacatccggcccgcccgtaaacagaaacgcgtcaaaccgttcggcacattgcgcaagaatgtcggcgtcatcggtcagcggcaacatgacgggcgtaccgccggcccgcattatcgcctccatatatccgggcagcatccacagactatcgcgcccgtaatccatcagcggagtcaccgcaatgagcggtcgattcgtagtcatgcctgcctcttttcgcccaagtgtcgctttcgtcgttctgccgcaaatcgcttgatccagtggccaataatgccgtcactgtaccgaaccaatgtaaccggtcggccaacattatttcgtcagccagtcgcgacgagatcgcacaatgtgccaatgatgggggcattcggtgcggccttgtcaatgttcgggccattgcacgttcggcggggaaagcatgcccctgtccgcgcatcgtgatgtacgagtaaggttgacggggcgggagaatcacatgaaccaggcatgcgtacgcaacgacaccatcgacgcgggcaaccatcatggccgaccgcaataccggtcgttcctgcgatttctgacatcgcaggaacgcaacgtcatttggctgttgctggccgtcgcttttcttccggtggacggcaccacgcttggcctgtacgcgccgttctggtcgccaatcagtccggcgctgttcgccgtgtactgcctatgcaattggcggcaactgcgcatcgcagccaaccggtacctgccaatgttcctcctaccggtggtctgtataatcctgtccatcccgggatggctgaagttcggcatccacctcaacgccgcgttcatgagcatcaccggattgctgggcgtgctcgccactttgggtgcgatcgcccttgcgttcgacatcaaacgcattccgtggcgtacgccattgcggattctcatcgcatcatactgggtttccttcggagtgggcgtcgtgcaatggctgtccatccgtctgcgcgccaaaccgttgaccgactatttctcgcacctcatgtaccggcaatacatcagcgacaactcggtgtggggcggcggccgtccgcagttcctgttcgccgagcccagctatatcggcatgcacctgttcggcatactgcttccgctcatgtggctcatgcgcgggcgcgaccgcatctacgccaaacggctgcgtgacctcatcgtcacgtatgccgtcggcgcggtgctcatgcaagccggcaccagaatcgtcatcgattccgtcgtggcgttgctgatcgcccttgtggcgcgcaccgattggcatgacggcgcacgccgcgtccggggcatgctgcagattctcggcgcatgcgcactgggcctgctgggtgtgctggcggattccagactctccgccatcgcggagaacggggccgagggagacggctcgttcttcgcgcggatctaccaaagcctcgatccgatatgcggattgctcacccatccgtggacgctgctcaccggttatggcgcgggcaacatcatcaatgcggtgtgggccggcgcggccaaagccggacggctgctggacggtcttggtatgaacggcggcgcggccacgggattcgcggccggcgtgaacgcggacacggtgtggacgatgtgcgcgtataccagcgtcatcgccgaatacgggctgatcgggctggccatgctggtcggagcctcgatggtctgcatgacgcgcgggaggacggtatgccgtggcggtgcggatggcgcatcgtccgacgggctggcgcacggtgtttgtgtcaccgacgttgccgacgttgctgatgttgccgggggcaatagtggtgatggcgttgccggcgcgggttcgggcgaatccggcgtctggcacaagaccgtcatctgctggctcgtcctggtcgcatacctgtacatccaatgcgagaactatgcgttcgccgctctgccgctcctcgtgttcgccgcctcgaaggtgaggcgcgagcgctgattcctctcgggccgacgcatcgacgcggcccgagatggaccaaaatccagaataaacgacattcgccgctgttccgtttttcgcccaaggcgtatctcttcccgtatcttgaggtgcatcatgtattgtcgcggctaactaaccggcgaaacgcggcatgtttcgcattttgggcgaaaagcccaaggcccacaggaggtattgatgacgttcgttgcacggtcggtgcgctatgtgctca

SEQ ID NO: 251 - DNA, 8636 bp, Unknown
  R101_18m  MAG No. k141_48289
cggatgtcagacaagtccacgccttcgccgcaggtggcaccgtattcggttacggccttcgccgcgccattgtcgtcgaattcactgtcatagctgcgttcgctggtgctgccgcatacgaataccacggtcgacgcacgcgcccattgatcggccggcgcatcgctcggcttggcggccaagagaacccggtcctccccgagacgtgccaccaattgccggtagacgcttgactgttcatcggcgggcagaggggcggtgtaatcgcccaggaagcagccgaaatcgtcggcgaacgggccggcgacaatcacagggccggcttgagcatcagctatgacgctgcggatatcgtcgagcgtggcggcagactggccatcattgatcagcgttatcgcctcgcgggccatgcgcttggcctgctcacgcccatccgcagtggcctgcgcgatggcgtcggcgctcggcatggcaattgcggcggtatcggcaccgtcttcgggcaagagaccgaacatggctttgagttccagcacccggcgcaaggccgtgtcgacagcggccactacctgttcgtcatccgcatattcttcgaggcgggtgaatccttcatcccacagggagacgtccacgccggcgagcagtgcggcgcgccctgccgcgggaatggagccggccatgtcttcgagccgatccacggccaggccatcggccatcacgatgccgtcgaaaccgagctggtcgcgcagataatccttgagcagccacgggttggcgcagcaaggtacagaatcgatatcgttgtaggctgccataaagcccaaggcaccggcgcgcacaccggcggccaccggcggcagatgaatttcatgaagatcgtgcgggcccagtacggcggactgtccgttgcggccgcccacggcctcgccttgcgccgccagatgcttgagcaccacggccactcccccgtggccgaccttgctgcgatgctcaccctgcatgccggtaacgatggcctcgcacatgcgggcagccatcagcggatcctcgccgaagcattcctcgcaacggccccagcgtgggtcacgggcgatgtccaaaccggataccaatgcgatatgaatgccgctggcggccagttctgcggcaaccgcagcttccgcttcctgcaccccctgcgggtcaaacgtagcgcccaaacccagattggtgggcagcaccgtgccgcccagcgcctgatgcccgtgaggcgcctcttcgctaagtaatacgccgatgccgtgcacgccacgttccagcacagtttgctgcaccacggcaatcgcctcagtccgctcctcagggcgtatgccgttaccccaatgttgaccagaccatgggtcggctcgcaatagaccgtacagggtgccgagtccaccccatcggtcaatctcctgcttgagctcgtccgaggccaccagccgtcccgcagcattgcgttccacggacttccaaccgagcagacgctggttcaactggccaactttctgcgtgaagctcatcgaatcaatgagtcggtccactgcggcgcagttgatgctcattgagcgctcccccttctcgtatattgtcttctcgttcttctcgctcttcggcgagtaccggatcttatgttttgccctgcgcactgcaattgtgcgcactgcaattgaaaatatccggttgtggaacaaggagtagatgattccacaaccggatatcggtttaatcagccgtttcgaacgatgggtccgaaaccgcagtgtagtaacgggcggcataggggtgttcgtcagcgtgcaattccagaatgccacgctgcgcgagcgcctcttgattggccgccacctgcgaggtgatgatggtcgggcgctggcccgccacctgcagcttcatccacaggtcgcacaccgagcctcccgggccgagcgcactgcggttcaccgggtttccggcctcatccacatcaatcaccacggcgacggtcttcggctgagccggcaatgcggaacggtactgtgcggcgagttccccgaacgtacggccgatcggcttcagctggccttgctcgtcgaacaagcccagagagtgctcgaagaacgggaagtcttccatgctggcgggcacatcgtgcgagcaccaccacgtcacaccccacaggttccggcaatccatggcacgttcaacggtcttgcggcagaattccggcgtgtagtcggtttccagcacattctccggcgcaccgacttcctggagccacaccgggcgctcggaatccttgccgaacgccttggccagctcggccaggtacagtgcgtacgacgagcactcctcactggtggcgccgtatccttgcgcgatgccgttgaacacccaggagtgaatcactgtcatatcacccttggtggcggactgcaccggagtgaacgggtgcccatcgatgaaccaggtgccatcgttgacgctgtacagcgcgttgtgcccttcaccggcggcggtcggaagcagcgcgtccagccatgcgtcgatctgccggtccgtggcgctcatcttcgtgggatgcggcctgtcagacagctgattgacctcgttgcccaaggtcagacccttgaacgcgggttccttggacagctcatcggtcatggtcttgaccagttcacgctcggccgcaacggcgtccgcatcggtgaacatgttgcccgcatgccaggtgaccagccatgaaggcaggaagtcgaagctggacagatgcccttggaacacgtccacataggcatccaaaccgtgctcgccggcgatgtgcaccatgcggcgcacatccgccacgcccttcttgttgatccaggtgcgattaggttgcagatacggccagatcgggaagatgcgcacatggtccatacccagttcgctgatctgcttgagatcgttgtcgatgccgtcccagtccgggtcgagccatgcgtggaaccagccatgcgacggcgtgtagttgactccgaatttcattggagtacctcctttttccagtccgctcagcccttgagtccaccctgctccaagccacggaagaagtagcgctggaagcagcagaagaagacgatgatcgggataagcgagacgagcgcaccggcggcgatcagtcgcggatcttggatgaacatgcccttgagtcggttcatgccgagggtcaaggtgtacttgctttcatcggagatcgcgatcaacggccacaggaagtcgttccaggcaccgacgaatgcgaagatgccgacaacggtcatcgtgcctttgacctgcggtacacagatgtggaagaaccgctgccataggttggcaccgtccaccatggccgcctcttcgagttccattggaatggatttgaaggcgttggtcatgagcaggatgttgatggcgccgcacaggccaggcagtgcgactgccagcagtgtgttctgcaggtggatggagcgaatgatcaggaactgggagatcatcacgccttcgatcgggatgaccatggtgcccatgaacatggtgaacaccagtccgcggccacgccacttcaggcgtcccagtgcgtagccggccatcgtggagaagaccacgttgccgaagatggagatcaggcagaccaccagcgtgttgagcatgtagtggaataccgggacctgcttgaacacggaaatgtagttgtccagcgtcggggtcttcggcatcaggtagggaggcacggcgtagacgttgtcgcccttgcccttgaacgacagggacagttcccagacgaacgggccgacgagcagcaggaacatcagaatcagaatcagatactggacgactttgccgacggtgaccttatgcgtgttggtattcatcagtcctcacctcgtttttgtacgatctgctgcacgatgagcatgacgccgacgatgacgagcacgacgatggagatggcgctcgcgtaaccagtgcgggcctggataccggtgccttcgcgcttgataagcatcgacatcgtcatatccatgccgccggggcctgcggagccgttggtcaacacgtagatttcgttgaagactcggaatgcggcgatggtggacagcatcatgatgagcatcatcgtggagcgcacgccgggcattgtcacgtagatgaactggcggacagggccagcgccgtcgagggaggcggcttcgtaaagggattcatcgatgttggcgagggcggtcaggtagatgaccatgtagtagccgaggcccagccagattgtcacgaacatcgagctgaagagcacgccccatcgatcggtgaggaatggaaccggcttggagatgatcttcaatgccttgagcacggagttgaccagaccggcggaatccagcaggttggtccagatcatacccaccacaacggcggacataaccaccggcatgtagaaggcggtgcggaagaagcccatgatgcgggagttgcccttgaccagataggccaggatcaacgggaggatcaccatgaacggcactacgcagatcacgtagagtgtggagttcagcagtgccgtgaggaagtactcgtcatggaacagtttgatgaagttttcgagtccgacgaaggttcccggacggagcagtgtggagttggtgaaagcaagcctgaaagtgttgagtgccgcaaggacgatgaatacaaacacaatcgcgaacgctggcagaacaaacaggtagggggcaatgatggtgccgaagctacgattctgcttcttgccgtggttgaggttcatcggttcaggccggtcggaggccgtgcgggcctccgacctgtcagcggcgagtgccgcgttgctcactgtgcgagcttctcgtttgcgaactcgacggacttgtcaagggcttccttggcggtctgcttgccctgcatagcgagggcgatctgctgctggaagttcttggagccgttgttgtcggtgaactcggacggacgagagccgtagccgtccttgacctggtcgagcgtgatcttcagagccttgccctcaagggtgctttcgtcgatgctcttgtagtagtcgtcatccagaccccccttggcggacgggaacacggaggccttcttgtcgaactcgatctggttcttctcgttggtcacgaatcgggcgaagtcaatggcaacgtcggggtgcttcgagttggcgctgatgccgagcatctcgtaggccacggaagcggacttgccgtcgttgctgatacgcgggccgactgcgaggttcttgtaaaggtccggagcgttctgcttgaagccgtcagcggagtaggcggagccggccatggagaccaggttgccacgctggaagagatcggcggcctggctccaggaggagtcgagggcctccggcgggatgccgcccttcttgtacagctcaacgaagcggctgatctgcttgacaccggcctcatcattgaaggtgtacttgctgtggtcatcgttcatgaaggacttgacgcctgcggtcatcagatcttcggtgttgtaacccatcgtggtgcccaggtagacatccttgcagttctgcacgatggtgtcgccggcggcgaagtactcatcccatgtggtcggaatcttgttcggatcaaggccgcacttctgcatcagctcggtgttccagtaggtcgggccatcgttgacataccacggcaggccgtaggcacccttctcgatgccattgccctgcatggtcacggacttccatgcgccttcgtagtagtccttttccgcatccggagcctgcttggagacatcgagcagcgcgccggccttggccagaccgtacaggatggagttgccgccgtcgacgatgtccggcagttcgccggccgcagcctggctggacagcttgtcttcgtaaccatcggacggggcgtcaagccacttgacggtgacgtccgggtggtccttctcataggccttgatcagcgcctcgaaatacggggtgtacttgtcgttcttgaggttccaggtctggaaggagatctccttcttgccgccgtcatcccccgcagttccgctaccacaggcagccaccgatacgagcatcgcaccggcaccggcgatggcgaggatcttcttcatagaaaacatgatgttttcctttccttttgattcctttttcatcccgccctgctgtggacggagaaacctaatcgttgtgctccagcacagtcacccgtcgcggtgattgacgtggtatcacaacctttattcagttctcatcgctgagactaaaccgttttagcttccggccagtcgcgaacctgttaactaaatcggtttagtaaaaacataacacaatcgaaacatgcacgcaacgaattcatcgtcgcgtgtcgcattgatatttgtccaacgggatcgctctccctcttctcatacaataatgggccgcgcccaaccgtatggcagagccggtctgttccggttccgttacggttgggcgcgacccaaaatatcgagcctaggcccaatatcccttatcggcgaatacgcagcgtggcgagctggaatggcgccaacgaaacgaccgcaccgtcggcaggcattggttcgtcaccggcgagcgcgcgcggcagttcggcatccagctccggctcctccatgagattcacctcctgcacgctggccttggcatcggagagagcggcgtcaaggcgcagtgtggccgtggcattgccgccggcggcctcgtacaggcgcacgatcagatcgctggaaccgtcatcggcgagcttgatccagtccaatacgatgacgccggtggcgtcggcgagcgagaccagcggcgccatatcaggcaactcccctattacggggctgttgagtcgcgccgcttcgtccagcaccgcattcatatcggcgtcagcgaccagagaccacgcgaaggagtgtgcgccttggtcggtgcgtgggtcggggtacagcggtgcggacagcagcgagagccgcaccatggtgccgcggccggtgccatgtgccgcatcggcgtggatggggctgacgtcggagccgtaggtggaggcgttgaccacagcggcggcatagtcggcgtcggcgatccgcacgaagcggtgcgtgcagctttcgaatttggcatcatcgctgcgcgtgttcttgttgatggggcgttcgaccagaccgtattggcattcgtattgcgcgttcagcgcttgcacggtgaccggcatatccactttgaggaactgttcgacggcatgccagtccacatcggcggtgaagtccagtgtggcggagcccggccttaaggcaatgcccgtacgaatttcaacgcccttcgcgcgagtgacagcatgcacgacggccccaccgttggcggtttcgtccacgcttgcaatcgatgcctcgctgagcgcgttggcggtgaggaacgcatcgcgttgaatatcccaggcgtcccagtggaagggttcgtctttgagcatttcgtagcggcccagtcgggtgccggcgggcaccagttcacgattggttcgctgatcgacgattgacgaaacggtgccgtcggcttcaatgcgcacgtgcagttggccgttgtcgagcacaatcgtatcgccgtcatgggtaacggcgacccgagccatggatgcggttcccgcttcggctcggctcgaagccgggcgtaccacccacgtctcacaggcttggcgggaatatggggcgattacggcgtcggttatggttgcgtcatcgggttccacggctgcgatcgcgcgcccggcttcaagggcgatctcgttcagccgagcgatgtcacgcgcgtattcggtccgcgcctgacggtgtacccatgcgatggccgaaccgggcagaatgtcgtggaactggttcaggagcagcgttttccaaatacggtccagctcttcgcgcggatagacatagtccgggttcttgatgcgggccgcggcgcacaggtattcgacgacacgcagcattgactcctcctggcggcagccgcgcttcatgtcctgctgggcggtgagggtggcgcggtgcagttcaaggtacagttcgcccttgaacaccggggtctccccttgcgcatcgtcgacgatatccttacgcacacggtcgaacagttggtcgggagtaccgaattcgatcttcggcgcgccggcgagatcatggtcgcggcggatgcgcgcggtcatctcacgggtggggccgccaccgccatcgccgaagccgtacagcagaatcgcgttacgggagaggtccttgtccaggaagttgcgctgcgaatacatcagctcgtgcatgctcatccacgagcagtaggtgtcggagggcgggaagtgcgtgaggatacgggtgccgtcgatgccctcccacatgaacgagtggtgcgggaacttggtggtgtcgttccacgagatcttctgcgtgaggaaccagtcgaatcctgcacggcgggcgatctgcggccaagagccggtgtagccgaaactgtccggtagccagatgccgcgcggcgcgacgccgagatgctccttgaaatatcggcggccgaacgtgatctgccgcaccaatgattcgccggaaggaatcatgttgtc

SEQ ID NO: 252 - DNA, 23860 bp, Unknown
  R101_18m  MAG No. k141_48457
atggggcgcggtcgggcttcgatgacgaacacgcggcgggcgggggccagaaggcgttttcggaatcgtcggttccgatatgtgacacgcgcggcgggtcggggccggaggtgtccaaacggagggtacctggagggaaccgacaatcggaaggaaccaaagcaaaaccctggaaaccgaatgatttcaacggtttccagggctccaatccgggcggaggatacgagattcgaactcgtgaggctgttacaccaacacgctttccaagcgtgcgccatagaccactaggcgaatcctccatgctttgcagcgcgcagttgaactgtgttccgcaggcaactcgaataagttaccacaggtttcggataagtgcacgcttcggcgtggcgcgtgtcgcgacgcggatgtgaagaatgatcactgcgagtgaaagactcactggaaagtcccgcgcaacacccgcacaaggaccgcatacttgtgcagggcccacacacccgcgcgcacctacacaacccccggtaaagaaatcaccgtgtccgggtgaattttcgatgttcgcccggcgcgcgcccgcaatcgcgcctaggctgtggagtcatgaacgaggggacagcggccgacgtaaccgcagcacatggcggccggtcgcgccaatcgaagaaacactcaaagacgtaccgcagcatatccgcgatccttagttggctcacggcccgccgcccgaccacgttatccacatcgctgcgcgcgcgattcctcccttacctgctcacgctcgctatcgcctggctgccgtggctcatactcacttggccgggttcgatgcgcgacgatacgcttgcccaatatctgcaatcgtccggtctgcaccactactacacccagcatccgctgtttgatacgctcacgttcggcctgttctggcatatcggcagcgcactcggctcccctctgatcgggcaggccctgtacaccgtgacccaagcggttctactcgtcgccgggtgcgcgcttctgctgtgctacatccgcaaaatcggctcgccgcgctggctcatcggtctcggccttgtctatcttgccaccaactatgtggtggtcggcgcaatcaccacgatgggcaaggactcgttgcatgccgtgttctatctgccgttggccgtgctgttcgtggaggcttgtctgacgcgcggctcggtactggctcgccgcccggtggcattcgcgttcgtcatcctgctgttcgccaccatcgcctccaagcggacggcgctcataatcgtgctatgcgccggctgctgtttgctcgttgtctgtacgcccaaaggcgcgcggcgtcgtgcgtttgcgtgtcttgcggttgccatcgttgtggcgcagggcgtgtggacgccattaagcgcggccgccacgcatgcgaatcgatcgcccggacgtgaggtgtggggcctggtcacccagcccgtggcccggctcgcgcacgatgatcccagtgcgatagacaagattcagcggcggcgactgaacgcgatcatggacctcgactgggccgccgccggcatcaacccgcaccgcaccgatgagaccttccgcactctgcgcgagcaccctaggccaaccgcggcgcaacaactcgcggccctgcaggtctgggtgcagctcggcctcgcgcatccggttgaatatgccacggcctatgccggggtgactcgcggatggtgggacccgcgcgtcaatttcgcgtaccccactgattccgactacctgttcacgcctagctatctcaggcaatgggcgtctttcctgtctgaaggtgcttggaagcatacttccgacggcgatgccgataccgtggcggccgaacgacttgccgccatcgaacatgaccttgcgccgctgaggggtacctccgacaagccgcaatggcagaaaaacatattgcgggcgattcatcggtgggtgcgttcggatggtcatgtcggtgttcgcaaaggcaatccgctgacttcgatggccctgtacgtcacgtggattccgctggctgctggtcttgcgctggcggtgcggcctgcgcgacgacgctacggccccgcactggccgcttacggcttgctggcattcacggtgctgtcgctgtatgcctcacccgtggcactattttggtatccgattccggtattcctcacgttgccgctttttgtggtgttgccgttcacattccgggaaagccatcctctctgagcatagttatctcagatagtgaaataattgcggggttgaaaagcactaaaacgccttctattacctcgcacccgtcaaaaaatcaagactgttgttcaagaatttttttctataaagttcatagttgtttttggaccattcgagtacttgaagtgagaggaattcagcatggttcgtcgcgcctgcgcgcagtccgctgaaatgaacacgatgcgggaacgtgatacgcgcgttgccgtttctcgcgtgcgcgcgaagtcgggcagcgcctgtcgtctgcagtcggccacggtctcggctcgtgcatttgcggtcatcgtttttctgtttgcgatgatcgccgcgaccttcctcccctccgccatcattccgcagtccgcgttcgccgtgacgccggcaaccactgccactgctgccaccgtcaagagcgacgacatcaccagcgtcgattacgcgacctgggccgacgttgccaaggccgtcgaagcgcagttgcaggaaggccttaaggaatacaaggacggcaacccaatgggtgccaagtccgatttcggggctgcatacaccaccgtctacgtgacgtccaacttcaacaaagtggtgagcgacaccatcggcgcagacaagcagaccgcgcagcagcaggccttccaggacctgcaaagccaggtgttcacgtcagaccaggccgatcagcttacccagaaggtcaacgacctgaccgccgacctcgacgccacggcccagcagctcgacgccaacaccagcctcgccaacccgaagcagtactccgaagacctccagaagcagatcgccaaggagcgcaaggagctcgacgccaagaagaagcgcaccgaggaaacggccaagacttggaaggaagtcgcggatgcgatgcttccgatcctggacaacgcctacaaggcctatgagggtggcgacgccgccaagggcgccacgctcgtgaacgacgcctactaccagcactacgagaagctcggcttcgagaagaccgtgctgagcgccatcagcggcaaccgcgtctcccaggtggaataccagttcaagctgtgccgctcctcgatgaacaccggcaagcctgcttccgaagtcaagaagtacatcgacgacctgaagaacatgctggccaccgatgccgccaagctcgacggcggcgcggccgatgaggagggtggcttcctcaagttcatcaccagctcggtcggccaggcgttcctgattctgatccgcgagggtctcgaggccctgctcgtggtcgccgctgtggtggcctacctcgtcaagtccggcaacaagcgcttcaccaagtggatctacgtgggcgtgctcgccggtctggccggcgcaggcatcgtggcggtcatcttcatgctcgcgttcggcggctccggcccgctgcaggagatcatggaaggcgtgtgcgcgctcgtcgccatgtgcatgctgctgtggaccagcaactggatgctcaacaagtcctcggtggaagcgtggaaccgctacatcagggaaaagaccgaagccgcggtggcctctgtctcctcgcaggtcgaatccggcgagaaggtggcttcccgcacggtgatttcgctcgccatgctgagcttcctcgccgtgttccgtgagggcgccgaaaccgtgatcttctaccagtccatctacacgatgagccaggatacgcatggcatggtggtcggcgcactcgccgccgccgtggtgctcgtgatcatcttcctggtgattcgcttcacctccgtaaagattccgattggcccgttcttcctggtcacctcgatcctcatgtccgtgctggtggttgtcttcgccggcggcggcgtgcacgcgctcatcgagggcgacctgctgcccgccaactacctgccgggcgttcccaccaacgactggctcggattctacccgtacgccgaatgcatcatcgcccaggtactggcagccatcgccgtcatcgcgctgttcgtggttggctttgccaaacagcgtaaggccaaggcccggcttgcggccggtgcgagcaagtcggacgcgaaggctgacgaggagagcgcgcaggcgtagcacaacgcccggtgcgaccatctcgcgcaacacaacttgcgacatggcaatggaagcgattccagcccacgccgccataactaaaaacagataagtcgtgaataatccattcaccacaacagaaggaataagagaaatgatgaagaacaagaagcttgccgctctgctcggcgtgctgctcgccggctccatggctgtttcgatggctgcttgcggttccaccaacaacgcttccgataccaagtcctcgaccagctcctccgacaccgccaagaaagacgactccaagaaggccgacgccccgactgagacctccggcttcgaagaggtcccggtcggcccctccggcaccgccaaggagcaagacaaggccgctggcccgctgaccgtgggtgccgtctacttccagcccatcgacatgtaccctgcttccatgggtctgaaggctgctgacgcttccttccacctggaagccgacatccacgcctcccaggaaggcaccgactacggctacggcaagggcgacttcgtccctgaccttactgtgaactacaccatcatcgacaagtccaccggcaaggaagtcgagggcggccaggccacctccggtaccttcatgcagatgaacgcctccgacggcccgcactacggcgccaacgtcaagctcgacaaggccggcacctaccaactcaagctctccatcgagtcccctgagaagaacggctggatgctccacgttgacccggagaccggtgtcaagaaccacaagttctggaccgagcccatcgaggtcaccttcgacaactgggactacaccccgcgtcagtggtgattgactaagcagacagccccctcgtcagagggggctttacgccgctttagggagataattcttaggacggtctaaaaactcccctcagtccgctttgcggacagctcccctcagggaggggagcctaagatgaacagagaaaggacgcgaatgcttgaacaattcgtggcagtgatgccgggcaccttggcccccgcattgctggtgatgagcctgagcgtgatgctcacggtcggcgaggggcgagataagccgataagctcgcattggcgtctcatcggcctgaccgtcggcctgatcgccgctatcacattcgccggcctgcgcgcctcggccgtgatcaaccagcgcacgttcgtcaactatccggtgctgtggtgcgcgatcattgccgacatcctcaccatcgtcgtggtggtgttcgcacgccgcatcaccaccaattggcagcagcacaaggtgttcatgcacattgcgaacgccgtggccgccatcgacatcgcgctcaccctgttctacgcgctgccggacgtgatcctgcagctgaccatctgggtggagcccggcgacccgatcttcacgtccgacatgctgctgcgcgcgctcggcttcgcgctgggcctggccatgtcaatcatcgtggccgtgatcttccgcacgatgcgttcgaccgcggtgcgtgcctcgttcaccgccgccgtgctcgcggtgctggtgattctgttcgtccggcacctgaccggtgtcatgcagatcctgcaggcacgcggtttcccgatgggccacacgggattcgtggccctcgcctggtcgatcaaccacaacgactggatgatcatggcccaggcgttcgtgttcctgattccggccgtcgcctccgtggtggccggcttccgcatgccgctgaccggcgcgaacgaagccatcggccgcaagcacaaggcgttccgccgccgcgccgtggcctccgccgtctggagcctcgtggccatgatcggcgtcacgctgaccctcaccgtcggcgccgccgcgacccatcagaccatcactctttcgccgccggaagcctactcgctcaaggacggcgtggccaccattcccttcagccaggtcgaggacggccacctgcaccgtttcgaatacaaggccaaggacggcaccgtcatgcgcttcatcatcatccgaaagaacggtggcgcgtacggcatcggcctggacgcctgcgagaactgcggcgacgccggctactacgagaaggacggcaagatcatctgcaagaagtgcgaggtggccatcaacctggcgaccatcggcttcaagggtggctgcaacccgataccattcccgtacaagaccggccacggcaagatcaccattcagactacggatctggacgcgctgagcgcccacttccagtgagtcaggcaggagacaagaatcatgttctttctgcgtatgattactcgctcgttcacccgacagctgcgccggcgcctgcttatcgcgctgaccgtatgcctgtcggcgaccgtgtccgtatcgatgctgggcgtcgtgttcgacgtgggcgacaagctcaacgccgagctgtccacctacggttcgaacatcaccgtgcagcccaaggcggacgcggtcgtttccgacctgtacaacaccgagtcgggcggcgcggcgtccaccagcgacccgaccgcttttctgaaggagtcggacgcggccaagatcaagacgatcttctggtcgttcaacatcaccaacttcgcgccgcagctcaacatccatgccacggtgaacggtgccaacgtgccggtcgtcggcacgtggttcaacaaggacctcaagatctccaccggcgagaccaccgtcgtgggcgtggaaggcatgcgctcgtggtggcagctggacggcaagtggcccaaggacgattccgaccagggcgtgatcggcaagacgctggcctccgaactcggtgtgaccaccggcgacaccatcaccctcaacaaaaccaccgcctcaggcaagaagaacgagcagaaaatcaagctcaccggcgtctacgattccggcgacgaggacaacggctcgctctacatcgcctcctccacggcccaggtgctcgccgacctgcccgattcggtcgacaaaatcgaggtcaaggccctgaccacgccggagaacgacctggcccgtaaggccgccgcgaacccggccgcgctgagccaggaggaatgggagacctggtactgcaccgcctacccgagctcgatcgcctaccagatcgaagaggtgattccgggcgcggtggccaagcaggtgcgtcaggtcgccgcgttgcagggcaatgtgctgcagaagacgcaggccgtgatgattctgatgaccgtgctgagcctgatcgccgcagccgtggccgtggccaacctgatggtcgcctcgatcggcgaacggtctggcgagctggcgctgctcaaggcgctcggtgccaccgatgccgcggtatcccgcctgatgctggccgaaacggcggcaatctcgctgctgggcgcgattgtgggcgcgttgcttggttccggcgtggcccagctgataggccgggtggtattcggttccggcatcacgatgcggccgatggtgttcgtgctggtgttcgtgctgctggctgtcaccgtgctgctggcgtccgcctcctcgattcgttcgattctgaatctcaagcccgcggaggtgctccatggccgctgagtttatctacgtaggtgtggaaggaggaaaccgatgaccaacaccggtatgttcttcagaatgctgttcagcgccgtgttccgccggcgttcgcgcgcggtgatggctgtggtggcgtcgctggtcggcgcggccacactgttctgcctggcgatgatctgcctcgccgtgccgcagcagatgaacgaggagatgcgtgcgtacggcgcgaacctgattgtcacgcccaccgaatcgaccaatgccgacggcaaggccggcatcgacaaggcgatggtgcagcacaccactgaaatggtcaaggccaagggttccgcgaaatacgccacttaccgctacgagaacgtgcgcgtcaacgcctcgccgtacgtgatggccggcgtgaatgcggcgcaggtcaagaacctcaaccatcactgggtggtcgacggctcgtggccgaccgacggcaaggtgctggtcggacgtgacatcgccgacgccatcggtctgagaatcggctccgccatcaccatcggctaccgtgcatccgataacgccagcaccaacggcacttcgtcgaactcctcgatcgaccagcaaaccaaagacggccgtgtctccagtgacatcatggacacctccggcaccgaattccgcgtggccggcatcgtggacaccggtggcagcgaagactcgatcatctacgccaccaacgccgacgtcaacaagctcaccggcatcacgcgcggcgtggacgtcatcgagtattcggccggctccagcgatctcgcgggcctggtgtccagcatcaacgacatgacctccatgcacgtcaaggcgcagcaggtcaccaagatcaccgcctccgacacccgcatcatcaccatgctgcagacgctgttctggatcgtctcgttggtggtgctggtgctgacgctcgtcggcgtcggcaccacaatcagctcgatcgtctcgcagcgacgcaacgagatcggcctgcgcaaggccctcggtgccagctcgcgtgccatcggcaccgagttctacatcgaatcatcgctctacggcctgattggcggcctcatcggcaccgcaatcggctacggactcgccagttggctgtgcgtggcggtgttcgaacgctccatcggattcaactggtggctggcgctgatctccgtgctgttcagcgcgctggtcgccatcgtcgcctccatcccgcccgtccaccgcgccacccgcatcgaccccgccgtcgtgcttcgcgaagaataaagaaagagaaacgtcatgctacttgaactcgaccacatctcgaagatctacggcgacctgcatgccgtggacgacctcaatctgaccgtgccggaaggcgaatggctcgccatcgtcggctcctccggctcaggcaagaccacgctgatgaacatgatcggctgcatggacacgccctccaagggctccgtgaagctggaaggccgcaagctggaggacctgaacgccacgcagctggccgacgtgcgcaagaacctcatcggactggtgttccagaagttctatctggtgccgcacctgaccgccgtggaaaacgtgatggtggcccagtactaccattcggtggtcgatgagaagcaggccatggaggcgctggaaaaggtcggcctgaaggaccgcgcccaccacctgcccggccagctctccggcggcgagcagcagcgcgtgtgcgtggcccgcgcgctgatcaacgacccgaagctgattctggccgatgagcccaccggcaacctcgacgagaagaacgagaaaatcgtgctcgacctgttccgcaagctgcacgagcagggcaccacgattatcgtggtcacccacgatgcgcttgtcgccagctgcgcgcagcgcgagatcatgctcaaccatggcgtgctcgtcggtgagaagtggaatgacgaggatgcgcgcaaggcctacgaggcggccggcggcaagcccgcctccacgggtgcacaggtcgagggcgcgcagaacggcgagaccgccattggtttcgctgaccccaccaaggccgcgaaaaccggcggcgaggagtagggccgtcaggggcatcgagcagtatgtgaggaatacatggcaagctgatggtctctcccccagtcagcttcgctgacagccccctcgtcagagggggcttaaggagcgtgaatatgaccgaaaagaatacgttgaagaaatccgcgacattggcggcggccggactggtcgtggctggcgcgctgctggccgggtgcggcgaatccaaggccacgccgatggacgatgcgtacgccggcaactcgggcgagaccgagaagtcgcaggaagagcagtcgcaatcccagtcgaacggctccgatagctccgacggctccgattccggctcatcgcacaacgacccgtccaccaccacgtccgacaagaaggacaccggcaactacaaggacggcaactactcgatcaacggccagtacggcccggtcggcgaggattccatcgacgtccatctgaccatcaaggacggcaacgtcgagaccgtcaaaatcattgggcacccgttcaccacgatttccaagaagcatcagggcgacttcgccaaagccatcaacggcgtagtggacggcaagcccctgaagggactcaaagtggacaaggtcgccggtgccagctggacctccgacgccttcaacaaagccctcgaagtcgcccgccaggaggcttcgattcaggagtaagaccgctacttcagcaatgctggccacagcagatcggccatgcacgaggcccaggcggtgtcgtcgtccatcgctttgccctcgatggcctcatacgccaccaaagacccgataatcgtggacaacagcaacttctcgtcaacgtcctcgcgaaacacgccctgcgcgactccctgcttgaggaacgcccccacatgctccagccacggggtcaccacctggtcgacgatgtgctggaagaactcggcctcgctggacaatacaatgcccacgcgcttgacgtcgatgtcgttgtcgcgcacccaatcgaccaatcgctgcaatagttgcgtgaaatgctcacgcgtggggctgggcactgggtcggaatccgggatggccagatacatcgcgctgatctcgcgcagcagctcgtcggcattatggtatcgacggtaaatcgtggttttggccacgccggagcgccgggccacctcctcgatggtcacgccgctgatgccgcggtccaccgcaatctgcagcgtggctcgcatgagcttgcgatccgtcgcctcgcgcgtgcgctcaccgcgcggtgtcgccgtcgtacctgtcatctccgtcatctcttctcttcgaaatatgctcccgtacgctcccgttggcgggagctgactggcaaagccagactgagggtggtaagtccatgccgtttgtaggcaacccccggataatacctactagctcagcactttagtgctctcgactttggccacataccactggttgaaccgcaccagtggcttcctgagcaacagcccaagcaacagcagcggcggcacgaacgccagcagcattccggcggcccgccagtaatccatgtcgtagatgccggcgatggccgcacgcatcatcgtcaccgcatgggtgagcggcaagaacggactgactttggcgatgaagtcgggcaacatctgcaccgggtaggcagcgttcgcacccgaaatctgcacgatgagcataagcacgccgattgccttacccacattgccgaaactcaccaccatcgtataggtgaagaacgagaacaccagcgaggccagccatccggacaacataaacagcagcggatgcgcggcctgcacgcgcaggaacagcagatcgccaccgagcgacaccgtggattgcagcagcgcaatcagcgcgaacaccccgtaatgcccaaggaagagccgatgcggccgcggctcgcccaatgctttgcgtgtccggcgagacacggtggttttcagcgtcaccaccatcagcagcgcgcccacccacaacggcagcagcgtgtagaacggcgccatcgacgaaccgaaattcgccaccgggaatacggccttgcgcctgagctgcaccggcgcggccaacgtactggccagcgtttcgggatcattgcccagcacctctttgaccatgctcatatcgccactgtttagtgcgtcgctcagtgtgctgttgaacgaagccagttcggcaccggcggaacgcagtttgccggacaccttgcccaaggtggtgcgagcgtcgctgagcatatcgctggcgtcgtcggaagtccttttcaggtcgccgagcgtggagtccaactgggtggcgccggaactcagtatgccggaggcgtcagagacggtggacgacagggagtcgatttgcggtttcaccgtggccgtgaaatccgacttgatattggcgatactgttctgcgcttgatcggccagatccttgacctgcgcatgctgatcctgcgcgtcctgattaccttggcgaatatcggtcgccgccgtattcagcgcttgccgcagcctgttctgccgtgcgattgaacggtcaatcgccgtgatgatggatgagtcgttgcccagtatgccggccaacgtgttgcgaatttcagtgtatttctccgtctgcttgccaatggccgtggcttgacggtccaattcgtcggcggccgtggtggcaccatcattcgcgtcggaatacagcttgtctatggaatcggacaccgcgccgaaactggaggcgctcgcgtccagtgagctgctcatcgcgtcagcggtggtgcccagggctccgaccacgtcggtgactccctgcttggcgctggcgagatccttgcctccttgtttggcggcagaggaaacctgcgtgatcagcgagttcgaggtgtcaagcaaggcgccggccgtatcggtcaatgcgctgtatgtgccaagcaaatccgccgtatcgtcaagccgtgtggcgaaatcggcgatattggcgttgaaggtattcagttgctctttggcttcgggcttggacagctgatcggccagcgaagacgcgatttccagccctgccgaagtgatggtcttggcgaacgtggtgttgatttccgccgccacctcgtccgtgccctcgttgagcagattcggtgccagcgcgttcttcttctcgttgcggtaataggtcagttcggcatgctgcacatcgtcggagaagaaggtcatcatgtctttgctgaacgacttcggaattacgatggccgcgtagtatttgccggatcgtgcgccctcgacggcatcggctttggacgtaatcgtccaatcgatctgactgttggcgcgcagcgcgttcaccacctgatcgccgaccgtgactttcaccgggatcaggtcggaacgatacccctcatccacattcgccaccgcgaatttcaggttcttcatattcgagaacgggtcccagcatgcggccacgttgaaccaggtgaacaggccgggaatcatcaccaagccgatcacgatgatgatggagaccacgttgctggtcaggcgtttgatgtcgccggtaaatagtttccacatggtgttcatcgtgcgtgcctgccttccttggtcggcggaatagtggggatgattgcggtaacggcggcgctcgggtccgcttcttcgtggcgttcggcggaggtgtcgcgacgcttggccttatgcccgtacagcatggcgcggatcgactcgtcggagaggttgccgagctcggtttggcggcggatggaatcgcgcatgaattccacgaccatcaggaagcccatgatgatgagcacccatgccagccatgtgcccatgaccacgattttctcgctggtggtcagcacaaacacgataatgagcgcggccggcaccacgaatccggcgataagcgcacccagcagcagccggggataacggtaggcgaatttggcggcccgacgttcgatggcatgacggtattcgtcgcggtcggccagtgccgcaatggcctgagtgacacggtattcgctgccaggcaggtgcaccggctcgccgataatcatgtcgctttccttgatttcccgcgcgaacaggcggttgagattggccagtttcggccgggcgccgaggccaagcgcaaaggccagaaccacgaaaatcagcaatttgccgatataggcgaaccagaggccgtcgtagaagccgccgatggtttcacgcattgcgtcaatcgaataggtgaacggcagcagcgggtagatggcgcggaagaacgcgggcatcatttcaatcgggtacaggccggaggcgcccggcacctgcagaatgaccagcgccacgcacacgcctttgcccacgtgcatgaacgtggtggagagggcgaaaatcaccgacatatacaccagtgaggtgatgacgcaggtgagcagaaacaccggggcgctcgcgcattgaatgccgatgacaagatcgccgatggccgtgaccaggccttggacggcggccagcgtggccagcagcaggaaacggccgagatagccttgggttggcgtgagatcgtcgatgccctcgtcgtcggtttcgagtttgggaatgaccacgagcacgaacgcgcccacccacaaagacagggtggtgaacagcggtgccatgccggaaccataggaggcgaccgggtagacggcccgttcgctgataacagtgggggagagcatgaagtcggcgattgtggcggcatccagtttgccgtcggtgccgatcagggaactgagtgaactggagatgctcagggctttgatgtcggtggtcagcgtatcgagcttggtttgcacgccggccagcgccttatcggtgtcgtgcagggcggtcaccgtggtggaggcggctttgtcgagttggtcgagggtgtgcttcgactgatcgatgagtgagccttgcgacgtgatgccggtcgacagagtgttggcggtcgagctgagggtgttgaggccggtgttgagctgaggaatggtgccggagatgatggtgccgcgagcggtattggcctcgcgcaccgtggtttgggtggcggtattgagatgctgcgccaatccggcggtgtctgtggaggcattgccgatagtggtgttcaggctatcgaggttgcccagtgcgccggcaagctcgctattgcggctttccagtgtggcaatggcggattgcagcggttctcgatcggcgttcggcagccctttgagttggtcgatgatgtcggcgttcgcttggttgatgtcttccgccgtattgatcagtccgcctacctgctgattggcggcgctgatggttccggctaccgtgcccacgctttggttggcctgtgctgcggcctggctcagcaggcttgagccttggtcaagcgcttcggacgtggaggtgacgaagccgttcagactggcttgggtagtgccgatcagggtggagacgccggccaggcctttcgcggtgtcgatgccaagtgcgcgcgcgtcgtccagcgcctgacgtgcggtgcgtgtctgctccggggtatcggtgagtttggtggtgagcttggcgatggtgctgcgtgtgtgctgcacgtcgccggaggcctcggcaagggccgtgagggccttggctttggtggtgtcttcggtgctgatggctttgccgccaaccgtattgatgacttcggtaagtacttcggatacggtggagacgaatgtggaattgaccgtgcggtccacagtggacgcgcctacgtcggtgactttgggggcgatggcgctggctttttcgttgacgtaatactccagagtgggccgactcttgccgccggtcaccacgccggcgagatcgtcggaaaagtctttggggatgatgatggctgcgtatgccttgccggattccacctggtccatggcctcggcttcggtgacgaaggtccagccgagctggtcgttgcttttcagctgcttgacgatttgatcgccgaggttttgcttgccgatgagcgcgttgtcggtgccgtcgtcattgttggcgatggcgacggtgatgcctttggtattgccgtacgggtcccagaagccgacgatgttgtaccacgaatacagtggcgggataaacaccatgccgaacaggatcacccatgcggccggcaccttgaacaggcgcaggaagtcgcgtttgaggaccttgaagatattgcccactgatacctccggagcttggtgttgcttggttgctacgttttccgtagcgatacgttaatcgtagcgctacggttgtagtagcgtaatacggctgccggagattattggggtgattgatgatggttttggcggaataacgccgctgcccagcggcttatcgtgtgtctctgggcagtgtgcctaattttttgtggctggggtgctgtgtggccgggtgtgctgtgtgtgttggtgtgaggctgccctccatggggcggtaaaaccttcattgggtggtaagtggcccatggggcggtaaaattcccatggggcggtggcttaaaatggctttattccgcggaatgcggttttgggctaaccgccccatggggtaattaccgcctcatgagagagctaccgccccatgggtaaaccgttgtatcagctttcgatggtgccggattggccatcaatggccgactgctcgttctggctggatgactggtcggagttggagttaccggaagtatcagaacctgtgccggagctgctgccggtgccggactggccatcagtgccttggctggagcgaaaggcgttctggaacttattgacaagatttctggatggtttttggatgtttcctgaaagcgatagcgggctcggtgtccggcaatgtagacagacatgtaccggctgtccatcaagttcggcaaaactgcaatcgggtgatagtgtaaggggacgctatgtggggaggaaaccatggttgaattcaaggacgatggcacggccactacccctggcaagccgcgggagaaccgtgacgccgagtccgcagtcgtggctgatctggtggccgtcgaactggacgacgccggcttgaacctgaacgccaagcgattaccgattctggcgcgcatctatggcgcggtcgtgctgctggacggactcgccacattgccgattatggtgatttccatcctctatgccgtgcgtgagattctggatggtcatgtgcacgtcgatgcgatgagcctgactttcatcctgtccgcgattcatgcggtggtgctggtagtcagtgccgcatgcctgattgtgttcggcgtgatgctgctgcgcaatcatcgccggtatgccgcgcgctggacctacgtgctgatgccgttgacgttggccgacggcatgctgtcgctggccctgaccggccttggcttcaacctgctgctgccgctgattcagatgattattctcgtcgtgatttcggtgaccgctgatccctccctgagcgaggaacgccgtttgcagcgcgcgctcaaacgcatggacgatcgcgatgattatgaatcggcggtggcggccggcatgctgggccgcgaccaatccggcaagggctatattgcactggacttcttcaatatcttctggctgtttaccatcgcttcggtgggtggcctgattatggagacgatctaccatatggcgctgtataacggtgaacttcaggaccgcgcgggtttgctgtggggcccgttctcaccgatttacggctgtggtgcggtattggtaaccgtgtgcctgaatcgcctgtggaaggcgaatccgttcttgatcttctgcgcttcggcggtgatcggcggcgcgttcgaatactgcaccagctggttcatggaagtggcgttcggtattaccgcgtgggattacaccggccgttggctgtccatcgacggacgtacttcgggccaattcatgttcttctggggactgattggtgtggtgtgggtcaagtggctgttgccgcgactgctggctctgattaatcgcattccatggaaagtacggtattcgctgactgcggtatgcacggtgctgatggtgatcgacattgccttcacgctgatggccttggattgctggtatgggcgcatggccggccagccgcaggattcaccggtcgcgatgtggttcagcgaacgctacagcgacgcttacatggccaatcgcttccagaccatgcatatcgacccttccaaggccgggcgtatgtgaatggctggcaagtaattacgcttcgcgggcagaaggtgcgtagaacctaagacagccttcgcgtgtggggtggtaagtgggatacactttcaagcgttgaaggaatgattccctccgctgatgtgctgttttgtgacgcgcgtgatgacgatgggacaatcaaacgaaaggcaaggcgcatggccgaagctacagcaaacattggtgtgattggactggccacgatgggctccaatctggcgcgtaatctggcgcaccatggcaacacggtggcgttgttcaaccgtcactactcgcgtaccgagaagctcatgaacgagcatggcgccgaaggcaacttcgtgccggccgaaacgctcgaggaattcgccgcgtccctgaagcgtccgcgtaccgccatcatcatggtcaaggccggtgctccgaccgacgcaactatcgcgcagctggaagaggtgttcgaaccgggcgacatcatcgtcgacggtggcaactccttcttcaaggacaccatcaagcgtgagaaggaagtacgtgccaagggcttccacttcgtgggttgcggcgtgtccggtggtgaggaaggcgcgctcaacggcccgtctctgatgcctggtggcactgcggaatcctggaagaccttgggcccgattcttcagtccatcgccgccaaggtgaacggtgaaccgtgcgtgacccacatcggcaccgatggtgccggtcactttgtcaagatggtgcacaacggcatcgagtatgccgatatgcaggtgattggtgaggcgtatgacattctgcgccgtggactcggcatggataccgaggagattggcgacgtgttcgctgaatggaacaagggcgaccttgactcctacctgatcgagatcaccgctgagattctgcaccacaaggatgccgagaccggcaagccgttcgtggacgtggtcgtggatcatgccggcatgaagggtactggtacttggaccgtgcaggctggtctggaatttggttctcctgtggctgctatcggtgaagccgtgttcactcgtgcactgtcttcgcacggtgagctgcgtgaagacgctcagaaagaaggtctggctggcccgaacaagaccatcgatctggccggagaagacaaggccgcgttcgtcgaggacgtgcgcaaggccctgttcgcttccaaggtcgtggcctatgctcagggcctgaacgagattcaggacggtgctaaggaatacggctgggatatcaacctgtccgaagtggcccgcatttggcgtggcggctgcattattcgcgcccagttcctgctcgaccgcatcaccgaggccttcaagggcgataatttgccggcttccctgttgttcgatccgtacttcgagaagatcatcggcgaatcgcaggatgcatggcgtcgtgtaatcgtgcgtgccgtggaggccggtatcccgaccccggtgttctccagctccctggcgtactacgatggtctgcgctccaagcgtctgcccaccgccctgacccagtcccagcgtgacttcttcggtgcccacacctacggtcgcgtcgacaagcccggcgtgttccacacgctgtgggctgaagaaggcaagcctgaaatcgaggcgtagcctcgtgatttcaggtttaggacagccctgtgggctgtccggccttcttcaggctcggcgatagccgagctgagaaaacagcaagcctgaaatcgaggcgtagccatagacgaattaagccccctcatcagagggggcttaattcactcacaactcggtgacggtttcttcggtggagaaccaggtgaactcgtccactccgttggcgtaggaggacgggtaatccgggttgttgggccgctcgaagacatgggccagcgattcggctttgccggcaccggcggcgaagaaccatgtacggcgcgagcgggcaatcagcggcgcggtcaacgagacgcgcaacggcggcatcttgggggagtggttcacacccacggtgagcctatcggtaaccttgacctcatcatgacccgggaacagcgatgcatagtgaccgtccggtcccatgccgagaatcatcagatcgatgaccggttccggccccaattcattcaccaactcgcgctcatagtcgctcgcgacatcgtccagcaacgcatcattcgcggcatcggcggcggcgcgaacggaagcgtcatcactatcggcctgatccatcacatcggcgatgtcatcggctgaacgggtatcggccgccatctcatgaatattcgattcaggcagcttgccatccgccaccagctggtcaagcagcaggcgacgggcctccagagcattgcgatcggtgtcgtaagccggcacaaaacgttcgtcgctccaccagaaatgcacgcgcgaccaatcaaccgcatcagccagtggatcgttcagcgccaaacccaacggctgtgcggccgaaccgccagacagcgccacatccacacgtgtgcgatgcgtgccatcaggcaatcgttcggcgagcaaatcgagtagcgccaagacaaaacgttgcgcgccagcctgaatcatcagatctttattcggatacacaatgagttttcgagttgccatgtatggtccttatatggggtatgtgtcgtactttgcaatgtggattgtgttgtcagttgacaacgcataatacgggtggcatgccgggaatccagccatttgcagcaatgaaatgtgttgtcagttgacaacacaatgtacattgtgcgacatcgcatatgtcactttattactccgcggtcatgagcttcggcatcgcatgaggtaggaaacgatgagcaacggcgttggcatggctcgaccacaattgccgaactcatgccaacgccgctgtggcaacggttctaccgacttcagtgacgaatcagatcccagccttcgttgatgacctcggcgtagatctcatcgggatcgatgcggcgcagttcctcggtcagacagtcctcgatggtgcgcatcggcacggacacttcctgcggagtctggccgggcagcgagatcagcgcttggtcctcatacgggcgttccagtgagatcacaccgtcctcacgggtcaggtacacgccggtcacggcctgcgcgtcgggcacgaactcagtttcgactggtacaccgagtttcagacgcagccatgcgcacagcatttccagaggcaggaagtcggccttgccggtcaccttcacggcggtgatgggcaggtgcggcggctgatcgagcatcgaggcgagcattgcgcgccagacggtcagtcgtgtccaggacaagtcgatgtcttccggtgtccaattgcggcgcaaacgctcgatcgtggcctccggattattggagtgcagcgcgtcggtgatgcgactgcgggccatcgcacccatcagatccttggccgggttcgacggcggtgtggtcggccaccacgccactacaggcgcatccggcacaagcagcgggataaccagcgtatccgggtggttgataaggccaccgcgcggacgcaagatgataatctcaccggcaccggcgtccgcgccgaatcgcacttgggcgttcaggttggaatcgttcggatcgttcgggccgtcggtcaaatcgacggccggattatcgcgattcgcgctcacctcggcggccacttcggtctcgttcggttcgccttcgccggactgatcggcaggattggtatccggtactacggcaatcacgcggcacgggtgctcacggctggccgagttcgcgatttccagcgcatgctctaggtccgcgtcctcggtggcgatgagtagcgtcagcacgcggccggtcgccgattcgccgcgctcctcgtgcagctgttcgattttgtgcgcaatctcgcgggtgcgggtgttcggcatatcgatgatcatggcatcctccagtggcggccgtcgcgcgccagcatttcgtcggcctgtgccggaccccacgtaccggcgcggtaggcctgcggctggccaagcgtggaccagaattgttcaatcggatcgaggatctcccagctgaggttcacctcttcggtggtcgggaacaacggcggatcaccgagcagcacgtccagaatcagtcgctcataggcttccggcgagttctcggtgaaggagcggccgtagctgaagtccatgttcacgtcacggacctccatggtggagccgcccggcaccttggctccgaagcgcatggtaacgccctcgtcgggctgcacgcgaatcacgatggcgttcttgccgagttcgcgcacggcggtctgctcgaacggcagatgcggggcgcgcttgaacgccacggcgatttcggttacacgcttgccgaggcgcttgccgcaacgcaggtagaacggcacgccagcccagcggcgggtgtcgatatcgaggcggatggcggcgtacgtttcagtggtgctcttggggtcgatgcctttttcttccaagtagccgaccacttcgtgcgagccctgccagcccttggcgtactgaccgcgcgcggtgttggcggcgaggtccttgggcaggcgcacggcggaaagcaccttggtcttttcggcggtcaggtccttggcggtgaagctcaccggctcctccatggcggtcagagccatgagctgaagcaggtggttctggatgacgtcgcgtgcggcgccgatgccgtcgtaatagccggcgcggccgccgatgccgatgtcctcggccatcgtgatctgcacgtggtccacatagttggcgttccagatcggctcgtacatggcgttggcgaaacgcagggccagcaggttctgcacggtttccttgccgaggtagtggtcgatgcggaacacggagctcgggtcgaacacttcggataccacgctgtcgagttccttggcgctggccagatcatggccgaacggcttctcgatgatcacgcggcgccatgcgccctcggacgagcgcgacaggccggaggcggccaactgcttggcaacctgcgggaaggcgcgcggcggcaccgacatgtagaaggcatggttaccctgcgtgccgcggtcgcggtcaagctcctgcacggtggcgctcagacgctcgaaggcctccggatcgtcgaacgtaccctgcacgaagcggatgccggcggccagattgcgccaagtcgactccttgaacggcgtacggcaatgcgcccggacggcggccttgacgaattcgatgaaccgctcctgtgtccagtctcggcgggcgaagccggtcaggccgaagctcggcggcagtaggccacggttcgccaggtcgtagacggccggcagcagtttcttttgtgccagatcgcccgtgacaccgaaaatgacgaggctgcacgggccggcgatacggggcagtctgaggtcgcgcgaatcgcgcaggggattgctccaattgggggattcactcataatgtacaagggtagtcgccggcggctatctatcgttagaggcgatatgcgatttgggctgcgatttgggccacattgcgtgtgctgtgccgtgcgttgggccaatcgcgtacgcaaacgtgtacgcaacgccgtagttgaaatatcccaaaacggtgtgtattttagaagagttgc

SEQ ID NO: 253 - DNA, 7604 bp, Unknown
  R101_18m  MAG No. k141_49405
ccccactggttgcccagcgtaagctcgaggaaggcggcgagggtttcggcaaacagtgcggcaccgggcttgcgcacgatgattgcggcgagcgggccggcgaacagccagaatccgttgagcagaccctcgaaaccgggggtcacgccttcgaacagggccagcggggcggagcagacaatgtcccagccccagaaaatgacgccggatgcgacggcgatgattgcggcgacgacgatatcgacgacgcgccacttgtaattggctttggccacagcttcagtcatgaatgtgcctttcttctgctcgtacgcaggccgaacatacatggatatatgtacgcacatgatgcatatgttcgtgtccacgcgcgggttggttcaggcacgggtgggtaagagcgacatttccgtgcgccggcattatccggtcacgttccatcggtcgagactatgaatctcctctcagccgcctaacggcagctcccgtgtcaactccccgactataaagcaagccgccgtcaaaggcaatagccacatccgtgacctaccggacggcggctcgccaccattaccgatgcggttcggttacttgccgagcttgtccagcagcaaagcctcggtgatcacgttgttcttgaggccgggcagggagatggactcattggggctgtgggcgttggccttcgggtcttcggggccggtgaccagcacctgagcgttggggaaaatgcgctgcagttcggggatgaacggaatggagccgccctcgcccttgttgatgggctcaacgccgaaggcctcggtcatggcttccagcgcgtctttggtggccacggcggtcgggtccatggcccagcccatgccgttttcgccgcgttcgacagtgaccttggcaccgaacggcgcgtgggattcgaggaatgcagccagtgcttcctgcgcttcttcagggcgctgggtgggcgcggtgcgcagcgacagacggaagcgggtctccggggcgatcacgttgaaggatccctcgaccgggtgggcgtcgaagccgatcacggtcacggacggcttggtccacaggcgtgaggccagcgaaccggtgccggcgaactcgtaaccggccaccacgccggaatcctcgcgcacggtggtttcgtcaaggtcgcgttgcaaaccgccgattggctcttccgcggccacgccgggcacggccagatcgccgttctcgtcgtacatggaagcgatgagcatggcggccaacgtgttggagtcaagaatcgggccgccgtactgaccggagtgcaccgggtgctcaaggccctgcacggtcacgtccacgcaagtgttgccgcgcagcgaggtggtcaaagaaggaatgtccgccgaccagttgccggaatcggccacgataatcacgtcggcggcgaattcgtcgcggtgagcctcgatgaagggaatgaagcttggcgagcccatctcctcttcgccttcgatgaacactttgatattgacgttgaggtcgtcgcccagggccttcagtgcaccggagtggatggcgatgccaccgccgtcatcggcggagccacggccgtagaggcggccgtcgatttcggtggccacgaacgggtcggtgttccactcggccgggtccggaacaggctgcacgtcgtgatgggcgtagagcagcacggtgggggcgtccggagaaacgatatgcgagccgatgacctcccatgcgcccggagtgccgtcggcattggaagcctggaccaccttggcatccacacccacgaggcgcagttcgtctgccacgaattcagcggagcgcttcatatgttcggcggtgatgcccttggcggagatcgactgcagcgcgaccttttcggccagcaccttgacgatgcggttccaatcggtttcgacgcgcgaacgaatctcgtcagcggtgagcgttgccatgatggtcctcctttatatatgtgcgtatatatgtgcgtgagcggcgtcattgcaatgactgcgccagtgtacaagtgtctgaacgtcaccgtaacctcaaagcatgacatggaatccgtttaggaaaaaagaagaggcccaagttcccgttgagcaggccccgaagaaggccgccgatccttctgagaaaaaaggccgtcctaccccgaagatgaagcaggctcaggccgccggtatccgtccgctggttccggtggaccgcaaggccagcgccaaggccgccaaagcccgtctgcgcgagagggagaacgccgagtacgaggcgatgcagaagggcgacatcaaccacatgcccaagtcggaacgcctgccttggcgtatctacatccgtgattatgtggatgcccgtttcaaccttggcgaatggttcatcccggtggccttcgcgattctgatcgtctccatgttcgtcacttctttgatgcagaaccagtgggcttccatcatcatgatggcgcttatgtacggttacctgattgccgtgatcatcgacgtatggctgatgtggcgcaagctcaaggccaagctcatcgccaagtacggcgaacagtccgtgtccaagggctcccgctccttctcctacgcttggagccgttcgattcagatgcgtcgttggaggcttcccaagccgcgttacccgaagcgcggtcactggccggcagactgatgtccatatatactttggctcccctcgttgaggggctgagccgtaaagaaaacagtccagtggactgtttttaggcgaagtggcggcgatagccgcatatggctccctagcatgggagccatacttatatgcaccaaggaggcaatcatgagcgaacagtttgatctggtcatcatcggggccggccccggcggctattccacagccctgcgcgccgccgaactcggcatgaaagtggcactcgtcgagcgtgacgccaccgtgggcggcacctgtctcaaccgtggctgcatcccctccaaggcgctcatcaccgccacccacaccatcgacaccgtgcaccgtgcggccgaactcggcgtcaacgcctcggtgaatggcatcgacttcggcacgctgcgcgactatcgcctgcgcgtggtcaaaacgatggtgggaggactggccggactgctggcccatcgcggcatcaccgtgttccgagccaatgccgcgttccatgcggatgagatcgctccagcaacttccaaccacatcgtccacctcgttccctcccccgaccaaagcgacatcctcacctatcacaaggccgatgtccccgaacccagcggccccacgatggacctcacggccacgaacatcgtcatcgccaccggtgccaagccacacccattgcccggtaacccgttcgccggcgccctcatcgactccacacaggcgctggaagtcaacgaatttccctcttcggcggtgattatcggcgccggggccatcgcccttgaattcgcctcgatgtggaacgccgccggttcgaaggtgaccctgctgattcgcaaggaccgcgtgctctcagcctgggaccggagagccggcaccacgctgacccgtgagctcaaacgtcatggcgtgaacatcatcacccgcgccagcgtcacccatgtggacaccggcgcgaaccttggcgccaccgtgcactacacgcgcgaaggccaggacggcgaacagagcgtttggggcgaaatcgcccttgtcgccatcgggcgtgacccgatcaccgacccagcatggggcgtgacgattgatgaccacggacatgtcgccacggatgcgtacggtcgcaccgacaaaccgggcgtatgggcggtgggcgacgtgacggccggtcacgcactggcgcatcgtgcttttgagcaaggcatcgtcatcgcggagaccatcgccggactcaatcccaagccggtggacgaagccgctgtgccgcagatcgtgttctccttccccgaagcggcgtcggtcgggctcaccgtcgaacaggcgcaggcgagagaggacctcgtcgaaatcaaggagaccaactatccgatgctggcgaacgcgcgcatgctgatgagcggcacggccggctcattgaccatcgtctccggctgcgacgcggccaacccggacaccccgcgcgtgctcggcgtgcacatggtctccccgatggcctccgacatcatcgccgaagccgaacagctggtcggcaaccatgtgccgctcgccgacgcagcccgcctcgttcacccgcatcccacattcagtgaaacgctcggcgaggcgctgctcaaggccgacggacgaccgttgcacacacgctgagaccaaccagcacaagcaagttcggaccagcgcacctgataagatattgcccagtgtgtttcgtcccaacaaaggaagaagtgatggcggaaaaggacgcgaagccgaagaagcagagcacaatcaagcagatcatccagatctacaagtacacggctaaggaagacaaggccctgccgtggcttgaggccggtgctttcctgctgcctgtagtcgtgatgatcatcatcggtctgattgtcaagtggacctggctgacctggatcttcaccatgattaccgccatcatgctcggcattctgctggccaccatgatgctcacccgccgcgcggatgcagtcggctacaagcagattgatggcaagcctggtgccgccatcggcgtgctgagcaacatgcagaaagccggctttgacttcccgcaggaaccggtgtggatcgacccgaagaccaaggatgccatctggcgcggcacttcgatgaacggcatctacctgatcggcgaaggcgaatacggtcgcgtcatgaaggcgatggatcgtcaggaacgcgatatcaagggcgtcaccgccggctcctccattccgatataccgcatcgccgtgggccacggccccaagcaggtgccgctgaccaagctgcgtagcacggtgatcaagtccaagagctacgagcccacggaccacaagaacgcactgatcgccaagattcatccgcgccgtcgcttcctgctgaccaaggccgagatggaaacgctgaacgatcgtctgcgcacgctgcaggccaagaagggctatgccatccccaagggcatggatccgaaccgcccgcagaagatctcccgccgcgcgatgcgcggtcgctgatcggcagcacaccaccaaatcgcacagaagccccggaatccgttcaatcggttccggggcttcgtcatatgtctcataatcgcgtccacttacatccacctacgtcacctgtcaatacccactgtccacgttgcggacatctctacctactcccccgatagtctccgtttccattctgtaatgatgtttcgttgaaataacgcgcctgcgcgattgtcggccacagtcacgaaacattctcgtaacccaagtttcgagccggcgaaacgcgctattttacgatatataccgttatatctcatacgaaaggagcggtcccgtgaccgaactcaagtccaaggaagacgtcgaggcccttatcaacaaggaaggcatcgagtatgtctccgtccgtttcaccgatcttatcggcgttcagcagcacttcaccgtgccggctagcgaattcctgaaggacgctttcaccgacggcatgccgttcgatggttcctccgttcagggcttccaggccatcaacgagtccgacatgaagctggtcccggacgttgagacctctttcgttgacccgttccgcaagcacaagacccttgacgtggccttctccatcgtcgacccgctgaccgacgagccgtactcccgcgacccgcgtcaggtcgccggcaaggccgaggcctacctgaagtccaccggcatcgccgacaccgcatccttcgctcctgaggccgagttcttcatcttcgacaaggtgcgtttcgagaactccatgcagcgctccttctacgaggtcgactccatcgaagctccgtggaactccggcgttgactccgaagaggacggcaccccgaacatcggtttcaagaatcgcgtcaagaagggctacttcccggttccgccgattgaccacacccaggatctgcgcgacgatatggtcgccaacctgcagaaggtcggtctgatcctcgagcgttcccaccacgaggtcgccggcgctggccagcaggagatcaactaccgcttcaacaccctgcagcacgcaggcgatgacctgatgaagtacaagtacgtcgtccacgagaccgccgctctggccggcaaggctgcgaccttcatgccgaagccgatcgccgacgacaacggcactggtatgcactgccaccagtccctgtggaaggacggcaagccgctgttctacgacgagaagggctacgctggtctgtccgatctggctcgctggtacatcggcggtctgatcaagcactcctcctccgtgctggccttcaccaacccgtccctgaactcctaccaccgtctggtcccgggcttcgaggctccggtcaacctggtgtactccgctcgtaaccgttctgccgccatccgtattccgctggccggcacctccccggctgccaagcgcatcgagttccgcgctccggatccgtcctgcaacccgttcctggccttctccgctcagctgatggctggcctggacggcatcctgaaccacatcgagcctccggagccggtcgacaaggacctctacgagctgccgccggaagagcacgctggcatcaagcaggtgccaagctccctggccgaggctatggacgccctggaagaggaccacgacttcctcaccgccggcgacgtgttcaccgacgacctgatcgagacctggattggcctcaagcgcgacgagatcgaccaggctcgcctggccccgaccccgctcgagtacgagctctacttccacatctgagtttgagagcttagcaacgttgggatttcgccattgctcttctcttgtgggagtctaatgggagtcattcagcgtaactagaaagaacctcgtgaaattcgtttcacgaggttcttttttgtatgttgcgttgtgtgttatgcgatgtgtgttgctcctggaatattccaggggcgggccgctacttagtctcccaacgctccttgagtacataggcggcggctttgggctgacggtcgcgagtgaagacgcccttcttgttgccgtcgacgcgcatgatgccttcaccggtttggaagtcgcagaggttccatacctgctcgcccaccactgcctcgaacatgtcgaacacttcgtgctgcatggtgaggtactcgcattggtattcctcactccactgcacgcttggcagcttgtgcgcaccggcatcggtgtccgcaccgtattcggtgaacaggaatggcttgttgggttcggtgttcatccattggttcatctcgttgatgaaggccttcttggctccgatgagctgatacccatcttgcacataccagccgtaataccggttcaggcagatgacatccgcgaactgatggcacttgtctttgcctccggcggccatcagcagattggtgtaggtcagcgggcgatgctgcggatcg

SEQ ID NO: 254 - DNA, 6118 bp, Unknown
  R101_18m  MAG No. k141_49714
ccgttgcaggggttgcgagatgtcgcccgcggcgcagagttgccgagggccggcaaatcactcccgcgtcgggtccttttgcaggagcaggaaaacgagcgccacaacgagcaggacggcgatggacagcacgccgaacgaggcgttgccggtcagggacgtggtggtggccaccaggaaggtgccgatgatcgaggcggtcttgccgaagatatcgtagaagccgtagtactcgttggcgtggtccttggggatgatcttgccgtagtacgagcgggagagcgcctggatgccgccttggaacatgccgaccagaatcgccagaatccagaactccacggccgatttcatgaagaacgcggcgaagagcacgatgcacatgtatgccacgaccgccgcagtgatcatcactttgcagccgagccggccggccagacggccgtagagaatcgcgcaggggaaggccacgaactgcgtgacgagcagtgccaccaccagctgggtggagtcgatgccaagctcggcaccgtaggaggtactcatcgaaatcaccgtgttcacggcgtcgatgtagaagaagaacgcgatcatgaacatccacaacggcttgttcttcacgatcttgccgaacgtgcccgccagttcgctgaacgtgccgcgcatggccgagcccagctggtcgcgggtggcacggtagtgcacctggcggtagctggtaagcagcgggatggtgaacgccacccaccagatggcggtgatgatgaacgaggcgcgcgtgcaagccaccgtggaccagtcgaagagcgacgggccgccgaaaatcagcgcgatgcagaagatgaacggcacggtggagccgatgtagccccagccgtagccgtgcgaggagaccttgtccatgcgctcgttcgaggtggtgtcgatgagcatcgaatcatagaacgtcagcgagccgttgaggccgatggtcgccagaatgtagacgaccaggaacggcagccaggtcaggggcagggccattgcgcagcaggtgaccgcgccggtgccgaagaagccaaggaagaacttgattttcatgccttgcacgtcggcgatggagccgagcaacggcatgagcagcgcgatgaccaaggaagcaatggtttgcgcgtagccccaggcggacacgatgttgccgtccgccggcatcagcgatttggcgtaaatggggatgacggcggtggacagcagcacgaatgccgagttgccgacgtcgtagatgatccacttcttctcgcgggcggtcagtttggcgctttgcggcaccggttcgtggacatttgcgggatcagtcatatgcactcctcgacagtattcaactcaatctatcgtagaagcgcggactagggtagaaaaccgccaaagttgaacggcgggtgaataatgccgggcccctttctaaggggagccagagcaaaaaaatagctcccctcgctgaggggagctggccgcgaagcggactgaagggagccgatcgtggattcccccagatgaggaaatccactcaatcgtccggaaactattcgccgatcagcgcgatggcctcgtcgtaatcggggcattgcggcacgccgttgaggctgcgctggatggcgatggatgccgccgcgttggcgatctttaccgattcggccagactatggccctttgccagcatcgcgcacatcacgccggtgtggcaaccgcccgccgaacgggtgtgtacggccttggtcgggtatccctcgatatgaatcgtctcgccacctggctcacgaatccaagcgccgcgggcgccgacacgcaccaccagcggcgcgcgcagtgtagtgcccaagccgtcacacaactggtgcatgaagtcgtcgagtccaccgccgatggtgaccttgctgtcgtcgatcggcgcgcccaggcgctcggccagcgtcatggcctcctgacggttgcaggaccagaccgggcgcgcaagcaccagatcctcgagcatgtggtcgttgaccagacgcaacgtattggtgggattgatcaccagcgtgtagtcgcgtgtagccgggtcggtaccggccttgagtaggaatccgtccacgccggtggccgtatggtccatcagtgtgttgccgctgatgtgcaccacgtctttgggctgcggctctagcgtgttgaacgtgtccgcgtcgccatgagcctcggcgccataggaagcgatgaacgtcttcttcggcgcgccggagctcagcaccacgcggaaaccggaatcctcatcaagacgatcctggccgatatgcgtaatgccgttgtcttggaatgactggcggatgaaatgcgcccacaggccgttgcccagaatgccggcgtgctcggtcggcacgcccatgcggctggccgcctgcagcacgcgatagctgccgccaatggagggcttcggatgatcggccacggcgaatccgccctgtgccggcacctcgtccacattgagcataatgtccacccagacttgacccagtgaaatcacgctgggctcgtgagtgccgatacctcgcctgagattcaacatgacagcctccttcgtcgtaagttgcacgaggaccccttcgtcccttgccgtctcttataccgagattatatgagagtttgttggatgcggaataggcagtccggcgtgttttatcgggtaaacgctacgatttgcagcgtaattcgccgctggcgaaccgctggcgaactgctggcgaactacttgcggaccgctggcgaaccaatgccgaaccgctcgcgaaccgctgatggcccactcgcaagttacgctcgaaccgcgcgtgaaccgccgaagttcgcccatgatacacgcaagagttgcggttgtcggtattgggctatatatttgtgaagttgtgtgttcggcatgtcgggtgaaaccggcggtcgaatgcgtgaaagacttgacacatcaaggttaagggagtccatcatggcagctcgttgcgcagtgtgcggcaagggaccgcagaccggtttcaccgtttcccattcgcaccgtcgtaccaagcgtagcttccgcccgaacctgcagtctgtacgcaccacgattgatggcgagaacactcgtctgcgcgtgtgcgtcaagtgcctcaaggccggcaaggttcagcgcgtggccgcgtgaatcgcgtactaacgtggagcaaaacccgtttgagcttcggctcagcgggttttgttgtttctgcggtctaaagaggccgtgcgaatagaataggccaatatgagcatcactatggacaccactctcgcttcgctggtcaccaacaagcgtcgcgtgtccgcgctcaaatcgctgggaatcgtcactgtcggcgacgccctgacctactatcccttccgcgtcaccgaaccggtgccgcttcgcgccatccgcgaggccgcacccggccagcagatggcatttgccgccgtgatacgagacatgcgcgtggtgccgatgaacgctcgccgcggctaccgactcgaggcgacggttgacgacgccgactttgcccgttcgcgtcgcgtacccggcagcacggcccggctcacgttcttttcgtatcgtaaatcgtatgtggattgggtcagcatgcggctgcgcgccggcacgtctgtggtggtctccggtatgcccagcgaatacatggggcagctgcaattcacgcaccccgaaatcctcactgtcgcgcccgggtcggccggagcaggagcggggcttgagggttacgctcggggtgcggcatccggcaatggtgcgtttgcgggaagtaccgatccgtatgccagtgtgcagtccgcgtatccgccggccgcggctgcctcttccggggccgcgctgaaatacgacgccgataccgtgcaagaggcgcttacccgcgtctgccggccccgcccggtatatcacgccagttcgcgtatctcgtccgaacatattcatgagacgattctgggattgctgtggatgatgggggcccgcacgtcatccacgcctgacgggcaactcgctggcgctgggtcagccggcattgtggctcccgcgaccgacaccatcgccgtccaaaacggggaagagaattccggcacgaccgccgaatccggtgctgaggcgctctcccaatccatcccagatgtgctgcccgaatcggtgcgcaaggccaagaacctcatgcatcgggctgaggcgttcctggccattcatgatccggcctccacgacccggttcaaggaggccatcggaaccctgcgctatgaggaggctttcgtttcgcagacctcgctgcttaaagccaggtcgcacgcccataaatccgcggctcactcttgcccgttggtaaccgacagtctgcgcgatcagttcatcgcatccctgccgttctccctcactgcagggcagcagcaggttattcatgatattgccgccgatttggctcatgactggccaatgcagcgtctgctgcaaggcgaggtgggctccggcaaaaccgtagtggcgctcgctgccatgctccaagccgtagacgccggctatcaggccgtgcttgttgccccgactcaggtgctggccgagcagcatgccgaaaccattggccggatggtggagcaactcaagccagcgattccagtcacgttgttgacgggcggcatgaagcttgctgcgcgacgtaaagcacttgctgcggcgtccagtggcgagccgggcattatcgtggccacgcacgcggcgttttccaagaccttccaagccccgcacttggccttggtggtaatcgacgagcagcaccggttcggtgtggaacagcgcgaaagtctcaacgccaaaaccgacgacggcaccacgccgcatctattggtgatgaccgccacgcccatcccgcgcaccgccgccatgacttggttcggtgatctcgatatttcctggctcaccgaattgcctggcggccgcaaaccgattcgcaccgtggtggtcaatgaggccgacgccgccaccatgggccgtatgttcgcgcacattcgcgcgcgagtcgacgcgggggagcgggcctatatcgtgtgcccgcgcattgatgcggatgatgaggggaacgaaggcggttccggcgtttcggcagcagccggttctgcccgcggacgcgccgcagcatctggttccagtgcccgcacagctgcgggcggccgtgcaacgcgcgcggcggccgacgccatcggcatcgacgacccctacgaaaccttcgacgaaaacggcgaaaccgtggctcgcccgccattgcatgcggtggccgaaatcgccgaccggttgcagagactcccgcaattccaaggcattcggtttgcgactctgaccggccgcgacaaggatgacgtcaaaacccaggtcatggccgattttgccggcggcgagactccgattctggtgtccaccacggtgatcgaagtcggtgtggatgtgaaacaggccagctgcatcgtgatctttgatgccgaccgatacggcctctctcagttgcatcagctgcgcggccgcgtggggcgtggcggcaccaactcgtgggcgttccttatttcccgtgcggaacccggctccccggccgagcaacggctcgaagtgattcaccactcgctcgacggtgccgaaatcgcccaagccgacttggaattccgcggtgccggcgatgtgctcggcgacgcccaatccggcggcaagtccagcctgaagctcctgcgcgtggtcaaggacgccgacatgatcgccgacgcccgcacccgtgccgagcagcttctggctgccgaccccgaactggcagacgaggtccaactcgccggtgccgtcctcgacttcacccgaggcaacgaaaccttcctgacctccagctgaggcacctccagctgaggctagggctgcgcccccgtaatcgcacgatatagtttttccgtatgccgatcgtgaggaaatcacggtcgggaagccctcgaatgtgcttcagtggaggcaagaccattcgtacatgaggtactcgaagtgcatatatcattggtgcgcttcgagcaccccattgttgttcatgattggtatgcg

SEQ ID NO: 255 - DNA, 7404 bp, Unknown
  R101_18m  MAG No. k141_52108
attacgtagtttgcgggcgttacctgtttcaggtgacgcccgttttacaatacttaatgacaacgccagcgcgttcatcgaatattcgccatgaacgcgcattggaaaggggaacgatgagcaacgacgatctgacgcatgagaattttgattttcgtggattcgacgtgccggatctcaaagcggtgacgctggcttcgtcttcggacggcgatcagtccaagcagccgaagaccaagcacgaggatgcatcgaagaaccgtaagcacggtaagaagaagtcaaaatccgatgcacgatccaagaagcgggccggcgcgggcaagacgagcgaatcgttcgatgattatgaggattatgaggaaagggaagctgtgagcaaggcagataagaaagccagcaaggaccgtccgggactgtttgcgccaatgacgctgcgcgaagtgaccgtgcgtaatcgtatttggttgccgccgatgtgcacgtattcgtcgttcgcctgcgatggtaggcccacgccgttccactaccagcattacgtgtctcgtgcgttcggcggattcggcatggtgatcgtcgaatccaccgccgtggctcctgaagggcgtatcacgccgtgcgatctgggcctgtgggaagacgggcagattgatgcttggcgctggatcgtggacggtattcgcgaggcgggtgcggtgcctgccatccagctcaaccatgcggggcgtaaggcttcgaccggttgcttcgccgttggttacgacggtcagagtgtgccggaggaggcgggcggctggcccaccatggcaccgtctgaaatcgcgttcggcgggctgcgtacgccgcgcgcgctgtccgtggatgagattcatggtctggtcggcgcgttcgccgcggcggcgggccgggcgtcggccgccggcttccaagcgattcaaattcatgccgcgcatggctatctgatttctcagttccttgacccgctgagcaatgagcgtgatgacgaatatggtggcgatttgaccggtcgctctcggttcctggtcgaggtcgtggatgccgtgcgtggggccgtccctgagggcgtgccggttctggtgcgcatttcggccacggattgggccgctggcggttgggatttggaccagaccatcgcactatccaaggtgctgaaggagcatggcgtcgatgtgatggacgtgtccactggcggcatcatgtcgggagtgtcgattccggtcaagccgaactatcaggtgccgttcgccgagcaggtcaagtccaaggccgatattccggtgaccgcggtgggtcttatcaccaagccgaagcaggcggccaagattctggcccatggcgaagccgatgccgtggaaattggccgcgccgcattgcgcgatccgtactggccgttgcgtgcggccaacaagctgggcataccgtccacagaggtcccctacgccccgcaatacgtggccggtgcgtactaaatcctcatggggcggtaactttcccatggggcggtaaaaccctcatggggcggtaacccaaaacggcggtattctgcggaatgtgaaatttggctaaccgcctcatggaacaatcaccgccccatgagggttttaccgccccatgggtaatagggcaatatgtgagttcactccacgtccacgccgacggcgtcggagacgtgctcgaatccgtcacggcgcagcagctgggccagaccgcgcttcaacacggtaatctgctgcgggcctcggtacatcagcgagctgatgaacatgaccaagctggagccggaacgaatcttcgcataggcttgctcgggggtaaagacgccaccgatgccggcgatagcgaaccggtcgccatactctttatacaccttgcgaatcagctcggtgctggcgttggtgcacgggccgccggacaggccgccctcccaatcgcgcggaatctcgaggccggtgcggtccttctgcagattggcgatggacagcccctgcacattgtgctcggccagcacatcgagcagctccttgtactcgccccacggcttgttcaacggcatcttgaccagcgtgggctgcgggcggtcgatcttgtcgagcgccgtaaacagacggtcgagcgcttccggagtcgtggtgaacggttcgccgacgtgcgtgttcgggcaggagacgttgacctccaccatcgcggtgcggccgacggcgcggcgcattgaaatgcagtaatcctcaatgccttcgtccaaatcgccgcactggtcgtcgttggtgcgggcgatcgacacggacagctgcatctggcgggcctgagtccaagccttctcggcgcgctcgatgaccttgtccgaaccgatgttggcgaggccgacgtgcaccatcatcgaatcgtattcaggcagacggtggaaccacggcttggcgttgcccgagcagggacgcgaggtggtggagcctacggtttcgaagccgaagccggcgtggtccagcaccacgggcatgtcgcagttcttgtcgaggccggcggacaggccgaacgggttggtgaaatcgacgcccatcacattcgtttccagaatggggtcggtgtagtcgagcataagctgctcggcgagcagcagcggcgggacgttcttgacgacatggcagaactcgatcatctgatcgtgtgcctcatcggggcggtggttgaacacgaagttcggtttgatgatgtgcttgtagctgaaggtgaacagatcggtggtggctttgttgacggcgtcgtgccagaagctttcagaaacgtaagtcataccgcctattgtctcacgcttgggccggtgcggctaggcgatccctacctaggcgaattggggaaggggctaccgcgtgtcgaggcacacgcaggcgtaggctcggcagaagatacatgaatcgggacgcaccaggtatcaggcgtgactctccgctgagcaacgcgcgcgggagagtcgtcggtcgtgagctatcgcgctagtggtcgctgtgagaatatcggttcgcgcaatgtgcgattttgcgtggttttgcggaaatgaacacctgaattgcccggaattttcgagaaattgtccccaaaacgctcaagccggtttggtttgtgagcttttgtgtgcgataatgttcacatgatttcgtcacaacgtcagcacctcatcttgagcaggttgcgcacacgcggggcagtgcgcattacggcgctatcgaaggaactgggtgtgtcagcgatgaccatccgccgcgatatcgccgaacttgccgacaagggactgctgaagcgcgtccacggcggcgcggtgactaccagtactttgctcagcgaacccctgttctctgtcaagtcccagatggatatcggcctgaagggcgccatcgcccaggaagctatccaatatgtggctcccggtgacgtaatcgccatcggcggcggtaccacggcctatgtcttcgcccagcatctgctcgaatcgcagcagtccagcggcatcaccatcctcaccaattcgattcccgtggccgaactggtccaggccctcgaatccaaggacgtggaggtgatcgtcaccggcggcgtgatcacccgatcgaactcgcttgtcggtccgatcgcggacaaggtcgtcgcctcgctgcgtgtcaacaccgtattcctcggcacccactcggtgtcgattccccgtggcttcctgatgccgaattcgctggaagccgcaaccgatatggcgatgatggacatcgccgatcgcaccatagttttgaccgatcacaccaagtggagctgcacatcgctgtcgctgtttgcgcgcttcgaccaagtggacacggtcattactgacgacgggctcgaccccgactccgccgccaaaaccaaggatttggtaaaggaactcgtgctggcccaccagagcgagaccattgaggaaagtgagtaaacctatggctgatttcgccaactacacccccggggagtatgcgaaggagcacatccgcatcacgccgacgacgcttgccgacggtcgtgactttttctacctggacgacgaccccgagttcgtctccggtgccaagacccgcgagctcaaggacccgcgcccgctggactaccgtttcgccccgcacctggacgccgacggcaacgaagtgccgtacgccgccccgcagatgcgccgcgacccgctgaccggcgactggatcccgatggccaccgcccgtatgaaccgcccgatcaccgccggccccggcgccaccgccaagggcaacccgctggccgcccgcaagcccggtgacccgtaccaggacggcgaagtgccggacaccgactacaacgtcgtcgtgttcgagaaccgcttcccctccatggtgcgcgtgcccggcgtctccgaggacgtgacctacgttgacggcaacccgctgtgggagaagaagctcgccgccggccgctgcgaggtcatctgcttcgacccgaacgaggacggcctgccggccgatctgccggtctcccgcctgcgcaccgtggttgaggcttgggccttccgtaccgccgaaatctccaagatggaaggcatcgagcagatcttcccgttcgagaaccacggccaggaaatcggcgtctccctcgcccacccgcacggccaggtctactgctacccgttcatcgccccgaagatggagaaggaactccagcacaccgaggcctaccacgagaagaccggcggcaacctgcttaaggacatcatgaacgccgagctcgaagccggcgaacgcatcgtgatgcgcaaccacagctgggtcgcctacgtgccggccgccgcccgttggcccctcgaggtccacgtggctccggtgcgcgacgtgctcaccctcgaccagctcaacgacgaagagcgttgggaccttgcctccatgtactcgcacctcctgaagcgcggcaacgccttcttcgacaagggcgacggcaagggcatggatctgccgtacatcgccgcctggcaccaggccccgatccacgacgcccgccgcgagaactaccgcctgaacctgcagttcttctccttccgtcgtgccgccaacaagatcaagtacctcgccggctccgaatccggcatggccgcctggatctccgacaccacgccggaactcatcgccaagcgcttccacgagctcggctccatcgacatcgccgactgatagaaagaaaaacatcaatgactgctgttgaattcattgagccgctgacccatgaggaaggcgtctcgcaagccaccaagctgtttgtggacacctacggcgctgcgcccgagggcgtgtgggctgctccgggccgtgtgaacctgatcggtgagcacaccgattacaacgccggcctgtgcctgccgatcgctctgccgcaccgcactttcatcgccctgaagccgcgcgaagacaccaaggttcgcgtcgtctccggcgtggctcccgacaaggtcgccgaagctgatctcgatggcctcaaggcccgtggcgtggacggctggtccgcctacccgaccggtgtggcttgggcgctgcgtcaggctggtttcgacaaggtcaagggctttgacgccgccttcgtctcctgcgtgccgctgggctccggcctgagctcctccgccgccatgacctgctccaccgctctggctctggacgacgtgtacggtcttggctacggcgattccgacgccggccgtgtgaccctcatcaacgccgccatcaagtccgagaacgagatggccggcgcctccaccggcggtcttgaccagaacgcttccatgcgttgcaccgaaggccacgcgctgctgcttgactgccgctcggagctgaccccgctggagaacgtctcccagcaggagttcgacctcgacaagtacaacctcgagctgcttgtggtcgatacccaggctccgcaccagctcaacgatggccagtacgctcagcgtcgcgccacctgcgaggaagccgccaagattctcggtgtggccaacctgcgcgttaccgccgacggcatctccaaggccgatgaccagttccaggccctcaaggaaacgcttgacgccctgcctgacgagaccatgaagaagcgcgtgcgccacgtcgtcaccgaaatcgagcgcgtgcgttccttcgtgcgtgccttcgctcagggcgacatcaaggctgcgggccgtctgttcaacgcttcccacgattcgctggccgccgactacgaggtcaccgtccccgagctggacatcgccgtagacgtggcccgcaagaacggcgcctacggtgcgcgtatgaccggcggcggcttcggcggctccatcatcgctctggttgataagggccgttctcaggaagtcgctcagaagatcgccgacgaattcgaaaatcaaggcttccacgcaccgcgcgccctggccgcgtacgcagcgccgagcgcttcgcgcgaggcctaggacaacccggtgggttgtccggcggatgcggtcgaggtcgagccaataggcgaggccgaggtaatgctgggtcggccgtaggtcgtccgtaattgcaggaccgcgtgcgcagcgccgagcgctttgcgcgaggcctgagccattgcaagctccctctgacgagggagcttcgttttatcccgcaccaccaccatgcccgccggcgaatccggcaccacttattcccataacccccataacgctcctgaaaccaggcatttcgaccatccgcataaggtgatgctcggcctgtacatcggcgcattcctcggcatgctgtccgagacatccatgaacatcgccctgcccgatttgatggacgagttctccgtatcctccggtaccgcccagtggatggtcgtcggctgcatactggccattggcgtggtgatgaccgcgatcggcggcgcacagttctttaccatcggcgtcaactcgggcgttgtgctggtgttctccttcatgttcaagggcggcaaacgatacatgaatcggtaatgaacataaatggcgggtgtcttccctatacttggggagtcacccgcttttcgtatacgaccagggagagccatgaataaggccatcatcaccgtcgtcggtcaggataccgtcggcatcatcgcgcgcgtctgcacctatctgtccgagcacaacgtcaacgtgcttgatatttcgcagaccatcatcgacggatatttcaacatgatgatgattgtcgactatgccaatgcggacaaggactttggcgccatggtcggcaaccttgaggatcttggcgacgacatcggcgtgcgtatccgctgccagcgtgaagagatcttcaccaagatgcaccgtatctgattctgatatagctttcgattccctcccgctgg

SEQ ID NO: 256 - DNA, 3161 bp, Unknown
  R101_18m  MAG No. k141_52526
actacacccaatacgtgcatttatccgtttcgaggaggctaatttttgcgtttgccggaggcctacttccgtttcaagtggctgatttcgcatttgccggaagtctatctccgcttcgaggggctcctcatccatgtaatcggaagtataaacggctacacgtcaacgtcattccgccgttttagggccgtgtctacttgggcatcagcccctcgaagtggaagtagacttccagataaggcaaaatcagcccctcgaagccgagaaagcacgtttctacggtgtcagaagccgacggaacgcaaaagggtcgtctgcacgcagacgacccatatgatcaattcgccaatagacgcagcaaacgcggcctagtgctgctttttgcgcggcgaccagtgcttcggcggcggccgtacttatcggacaggaagccggagaagccggcgccgatcacgccgccgatcatgatggagctgatgaccagaccctgcagggccgggctcagcgcgtacttgtcctgcaggaagtcgatggctcccgaaatggacacggtgtcataaccgtagagcaaaccggttagacacggcgttgtatacaatccacaaaaccagacagacaacttctccattgcccacaacgcgcgcaaccttacgccagcgtaacctaacttgtcagaatggctcgattttgtcaacagccatcacgcaacgcacgtaaggacacggcccgcttatgcttgaccactacaccacgcctggcgaatccatcgaaatccgcgacaaccagaccatctactccctacttaccgatcgccttgcccgcaccggcgcggacacggtaatcgccgccaagaaaatcggccccggccgctggcagaacgtcaccaccggcgaattccacgagcgcgtggtctcggccgccaagggcctgatcgcgctcggcatcgccaagggcgacgcggtgaccatcttttcctccacccgtctagaatggggcattctcgatttcgcactggccgcggtgggcgcggtaagcgtgccgatctatgacaccgactccgccccgcaggcccagcgcatcatgaacgattcggtggtcaagctggcctttgccgacaatcgcgagcgcttcgaccggctcgactcggtcaaggaccactgccctgccttgaagcagattctcatgatcgagggcaacgcactgggcgcgctcgaaggtctgggcgtggctgtttcggacgaggaactgaacgagcgcgtggccaccgtgcgcacggacgatctggccaccatcgtctacacctcgggctccaccggcaacccgaagggtgccgaactgacccataagaacttcgtgtccatcaccatcgccgcctcgcaggcgttgcatgaggtggttctcgacgaccatccgcgcctgctgctcttcctgccgctggcccactgcttcgcacgatttatccagtacgcctccatcgcctccgatgacggcgtggtcggttatctgccggacaccaagtccctgctgccggacctgcgttcgtttgaaccgacctacctgctgggcgtgccgcgcgtgttcgagaaggtgtacaacgccgcctcgcacaaggccggtgccggctggaagggccgcctgtttgtcaaggccgccgaggctgcgcgcgtctggagccgcaaggagcaggccggcgagcagcacacgtttgccgaaatcgccgagcgcgccaagtatgaaacgctcgtctaccgcacggtgcgcggtgctctgggcccgaagatcaagtatgtggcctgcggcggcgcaccactttcgcttgatctggcgcatttctacaacggcatcggtctgccgatgattcagggttatggcatgaccgaaaccgccgccccgttcgccgccacgcgcgtgaccgacaatgtgatcggcaccgtaggccagcccgcgcccggctcctcgattcgcatttccgacgaaggcgaactgcaggtcaagggcccgaacgtgttccgcggctaccacaatctgccggagaagacggccgaggcgttcaccgccgacggctggctcaggaccggcgacttggccgagatcgatgacgccggccgcatcatcatcaccggtcgaatcaaggacattattattaccgccggcggcaagaacgtctcccccattccgctggaggaggagatcgccaagtgcccgatcgtggagcactgcgtggtggtgggcgaccagcgcccgttcatcggcgcgctggtgacacttgacccggagtcgctggccatttggctgcccgcgcacggcctgtccacggagacgccggtcgaccggctcgccacgaacgccgcggtgcgcgaggagatccagcagtacgtggacaaggcgaatgcgacggtctcgcgcgccgaatccgtacgcaagttcgccgtgctggacacgcagttcacgcaggagaacaagtgcctgacaccgtcgctgaaagtggtgcgcccggccgtcaatcgcgtgttcgccgatgtgatcgacaacgagatctacaacggcaagcggtgaaacgcgcggttcgtaatccgacacaaaaaagggccttttgaaccgcacctccgatcatcgaatctggattactccagtccaacaatcggggtgcggttcaacctcgccgggcacttcatcattcatcactggcatgattccattatcacgcacattatggcgcagagcgaatacggcaccccggcaacgcgagtgggtcgccggggtgccggagcgcgggggtgccagaatgccgaagggccgggataccggagtgcccggtcgccggggtgccgaaatgccgaagcggtgtatgggtgccgcccggcccaggtgggtcacgcccgggtcagtttcttgctcctgagacgcagcacgacatcggcggagtcggcgacacgcttggaatgcgtcaccacgattacgcatttgccgagctgatgggcggcatgctgcagcagatgaatcacctcgtcggtcatctccgggtcgaggctgcccgtcggctcgtccgcgaggatcgcgcggcccggggcgaccagcgcgcggccgaccgccacccgttgacgctggccgcccgacaggtgcatgatgttgcgcttggattcctcacggctcaaacccag

SEQ ID NO: 257 - DNA, 6215 bp, Unknown
  R101_18m  MAG No. k141_53656
ccacatagtcaacggtctcgtcagccgaatggtccagcgccaccagatccccgtgcccctcgaacacatccaaagcgggttcgtcattatcaccgacatgcgcgcggaccagaccatgccacgggttgtcggccggattcaagcgtccggtggtctcgtcaagcgccgcccggacggccggatgatcgcggctcacatgattgaacacgccatccagcaccacctgcaatcccatgtcccggcaggccgcaatcagctggtcgaacgcggcatccccgcccaatcgcacatcgatgtgcatatggtcgagcgtgtcgtatccatgcgtcgccgactcgaacaccggacccagcagcaggccggacgcgcctagatcgcgcacgtactccagccaagggatcatcgcgtcaaggccgcggccatggaactggcgcgggccggcgggcctgatatcggcaccgcagaagcccagcggatacacgtgccagaacaccccgtacttcacccaatcgggcattgtgcggctcgaatccgtgcttacaaccactgtgcacctcctgattgacaccgtgtccattttcgcacacgcatgaccgaatcctcggtagatgacgagagttgtcgatgcaggcgccgaatcgaagcatacgactgtcctgctctgttttcacgaaaggatgcgcggcgcgcaacataacaacaccatataatccgcgcgccatgggaactacgtagccattcttccgttacaatcagtgtgacggcttccgcccccgaagaagaaggtgttgattccccttggacgtctcactggcgcatttcctccaacaagtgctttccaacccggctctgaccgtcacaacgttgctgacgctgggagtcatcttcgtcaacggctggaccgacgcacccaacgccatcgccacctgcgtgaccacgcgatgcatgcgcgtacgctccgccgtcatcatggcggccatcttcaacttcctcggcgtcttcatcatgacgcagctcaacgcctccgtggcctccaccatcagcaacatggtcgatttcggcggcgacacgaacgcggcgctcatcgccctatgcgcggcgctgttctccatcgtcgtatacagcgtgggcgcctcgctgctcggcatacccacctccgaaagccacagcctgatcgccggcctgtccggagcggccatcgccatccaaggcggcatcggcggcatcaacatgggcgaatgggtcaaggtgctctacggtctggtcgcaagcctcctgttcggcttcgccgtcggctggttggtatgcaaggccgtgaccctgatttgcgctggcatggaccgccgccgcaccaacgggttcttcacctacgcgcagatcgtgggcgcggcggccatgagcttcatgcatggcgcgcaggacggccagaagttcatcggcgtgctgttcctcggcatggcgttctgcaatggccaacccagcgtgaccggtgtgatgattccgatctggctcatgattctgtgcagcaccatcatgggcgtgggcacgtccgtcggcggtgaacgcatcatcaaatccgtgggccaggacatggtgaaactcgagaaataccaaggcttctcggccgatctgtcaagcgcgctgtgcctgctcgtcatgaccgtgctcggcatccccgtctccacaacgcacaccaagaccagcgccatcatgggcgtgggcgcggtacgccgcctctccgccatcaacttcggcgtggtgcgcgacatgatgctcacctgggtgttcaccttccccggttgcggtctcatcagcttcgtaatggccaaactgttcatggtcgtgttctagaaaggattccacccatcatggcgagacaaaaagacgtgttctacttcgacggattcctccgcagcgcggactacgcatgccaggccgcgaagctgctgtccgaggtcatgcacgacttcaatccaggccagctgcgcgaacgcatggacagcatgcacgcgattgagaagtcggcggacgaggtgcgccacgacatgatggacgaactggtgaccgcgttcatcacgccgttcgaccgtgaggacatcgacgagcttggccacgtgctcgacgatgtgaccgacagcatcgaaggcgtactcaaccgcatgtactacgacaatgtgaccgacatgcgcgacgatgcggtccagatgtcggatatggtggtgcgcgccacggaaagcatctgcgagctggtcaacgaactgccgcgattccggcattccaagacgttgcgcgaactggtgttcgccatcaacacgatcgaaacggacgccgaccacctgttcatcgagtcgatgcgcacgctgcacaccacctgcaccgatccgctgcaggtgttcgcctggcatgacgtgtaccgtcacctcgaacagtgctccgacgactgcgagcgcgtggccaacaccatcgacagtatcgtcatgaaaaacagctgaggttggtttttcacaacctccctctgatgagccgagccgtgaagaaaacgccggaggtgtttttaggcgagggtgagtgacaacgagcgaataagaggtcagctgcaagctgtcctgaatcgcgttcgaggtggcatcgcgaagcgatgacggagggagagacctacttgaccaaaggcccctcaccgatgggcgttgagccagaggatggcgagttgggtgcgattggtcaggccgagcttgtccagtatcgcgctgatgcgattgcggaccgtgccttcgctcaggaacagtctggcggcgatgtcgcggttatcgaggccctcggcgaccagcgcggtgatctcacgttcgcgctcgccaagcaggccctcgatggaatcggcggtatctccggaatcgtcggaatcggcaggattcggagtccgttcggtgagcttgccgagcacttccgcgccgagcaccacctgaccggccatcaccgcctgcagcgcaggcccgaccgccgccacatcctgtttgatgagatagcccttggcgccaagccccatcgcctgcgcgatatacgactggtccgcaaacgtggtcaggaacagtatgcgcgcggccgggtccgtggccagaacctcgcgcgcggcatccaaaccgctggtgccgggcatctgaatatcgatcagcagcacgtccggtcggctcgccggcgtctcgaaataacggcgcacggcggcgtcgccgtcatttgccgtccatagcacctcggccgtgccggtggccgtcagaatcgtctccaacgactggcagacgatcggatcatcatccacgattgcgattctcatcaatccctcgattccatggtccaacgcttcttcggcacggatacgaacacacgccagccgtcctcatacggcccgcagaccgcggtgccgccaagggcgcgcacgcgcgattcgatatccgccaaacccatgccgcgcatcagctcatcggccgaaccacgcatatcggcaacactgtcggcggcgagtcgcgagccgacgcgcgtggcacgcatcgcacgcgggcggacagcggccgtccgggacccatcggactcggacacggccggccccggatcctgaatgaccaactgccagaacgcggggaagtcgcgcaacgtcacgctcgcctcgtgcgccgcactatgatgcaccacgttcgacaatgcctcgcgaatcacggtcgtgaaacagcgcgagaccggcgcgggcgccttggcgatatcgttggccagcgtcacggcgaaaccgggggagatgccgtcgaacgacgtgacggcatcatcgatctgcgcggcgaaatcagtgccgtcatcctcaagatcatgcaccgaacggcgcaccatcgtcatcgcatcatccaacgtcgcacccaacgtggcgaacccttgcgcagcgaccgtatcgttcgtcgcctcggccaccgtcctgccggcctgcgcctgcatgatcgcgcgggtcagcagatggcccacattgtcgtggatctcccgggcgatacgcgtgcgctcgccgagggtcgccatgcgaatcgactgggcgcgttcctcatcgatgtcggcgatgcgcgaacgagtggcccgcgaggattcgcgcgccctgtcctgcgcgtgcagcaacgcgcgccgcgcctcgtccgaggaggcgcgggcccggcccagaacgaatccaagcagggcgaccatcgtcatcaccagcgtctggagacggtcggtgccacgggcgaaccagagcgcgatcagcggcaacacccatatccagcgcgcggcgaccgaaagccacggggccgaacgtattgcatcggcaagggaacggcgagaggccgcggtccgcgagacactgggggagcggccgcttgccgcagtccgtgccccagcccgggctccggtcgaggcgagggccggcagctgtgcagtatcgtaggcgatgagcggcatgaacgcgcaccatgaaggcaccgccacggcgatgacgagatacgccgtacacaagacccaagaccattgcgcgggacgcagccattccaccaatccggcgacggaaacggccaacagcaggccggcgatgaacacgccatcgagcctcaccccgacaagccaggccaaagccaggcccaacacgagcagcaagcccttctcggccaacacgcgcatggcacctccccggctcgacgctcttccaccaccagtctagcggtgtgcggaacacgacgaacttgacgggcatgcggaattattcgcatgacggtccaagacaacgggtctacacttcccgaatagatgaggcacaagcgtcggatgttgtcgacacaaccgtaaagggatgataccgatgattgcgcaaagccacagggcgtccaactattcgatggacgagatcagcctgatgccggtcgataaggtgtacaaggccatgcagaccgacgccgaaggactgtaatgacaaatgtcacgcctgtgcggccaagtcgtgacgtttgcctgtggcggcgtccggccccttcttgggatgatggaatcaccaaggaagggagtggctatggcaaccgacaacagagcttccgaacacgactcgacaaccaacccggccctggccgtgcacgtcagccaactggtcaaacgctacggcgacatggtggcgctcgactactttgaccttgacgtgaaccagggcgagattttcgggctgcttggaccgaacgggtccggcaaaaccaccgcgatcaactgcatcctcgcgctgctcacctacgattcgggcacgattcgcgtgttcggccagccgatgacgccgacctcctacgcgctgaagcgccgtatcggcatcgtgccgcagaacgtggccgtgttcaatgaactgaccgtcaccgaaaacatcgactacttctgctcgctgtacgtgccgaagaaaactgaccgtgcgccgctggtcgaggaggccatcgaattcgtcggtctccaggacttccgcaagttccggcccggcaaactgtccggcggtctgctgcgacgcctgaacatcgcctgcggcatcgcgcacaagcctgacctgatcttcttcgacgaacccacggtcgccgtcgacccgcaaagccgcaattcgattctggaaggcatccagcggctcaaccaggccggcgccacggtgatttacaccagccactacatggaggaggtcgagcagatctgcgaccgcatcctcatcatggaccacggccggcacctggcgctcggaaccgccgacgagctcaagaacatgatcgacacgggcgagcgcatcaccatcgaaacgctcgatctggcggattcggcgatggccgaggtccgtgcgctgccgtgcgtgatcgaagccacctacgacggcaaggaactcgacgtgcgatgccggcgcggcgaacacaacctgaccgacgtgctcgacgcggtgaaacgctccggcgccaacatcggccacctgaccagtcgcccgcccaccctcaacgacgtgttcctcgaactcaccggcaaggcgttaagggactaacaatcttgcccccgctggcgggggctcccgcgaagcgggtggggtggtcccgtagtaaccaccctcagtcggcttcgccgacagctcccgccagcgggagcaggtaaggagacatcatgtggaccacatttctggtcgcattgaaagcgaacctgcgcaatcgtca

SEQ ID NO: 258 - DNA, 10601 bp, Unknown
  R101_18m  MAG No. k141_54087
ccccggtttcgagggtctgctcaacggattctggctgttcgccggcccgctcgccgcaatcatcgtgcgcaagcccggtgccgcactgtttgccgaaaccctcgccgccttcctcgagcttacgctgggcaaccagtggggtgtcggcggctcgctgatcgtcggcatcatccagggtctgggtgccgaaatcgccttcgccgtcttcgcttggaagaagtggaacatcggcaccaccatcctgtccggtgcgctcgccggcgtgggctgctgggcctactactgggccaccaacccgggctggaacggcctgcgcgtcacttggtatctggttggctccatcatctccggcgtcgtgatcgccggcgtggtggtctggtacttgtctcgtgcgctcgccgccaccggcgctctggaacgctttgaatccggccgcagcaaggcgcgcgtctgatgcaggttaatccggctgcggtagaggccagcggctggggatggcggcacgccacgcgtaaggacttcgcgttgcgtgccgtcgatttcaccatccggccaggtgaacgtgtgttgctgctcggtgcttcgggggcgggcaaaagcacgatgatggccggtctcgcaggcgtacttggcggcgatgaggaaggcgagcaggagggctcgctcaccatcgatggcgtcgatgcgcgcgaggcgcgaggccgcgtgggactggtgcttcaggacccggactcgcagatcattcttgaacgactgggcgatgacgcggccttcggctgcgagaacctcaacgtgccgcgcgaggagattcggcagcgagtgcgcgaatcattggatatggtgggactcggcggactcgaactggatcggtccacccgccatctgtccggcggtcagcgccaacgtctcgcgttggccggcgtgctggctatgaagcccggtctgctgttgttggacgaaccgaccgccaacctcgaccccgaaggcgtggtcgaagtgcatgacgcggtcaaaaaggtcatcgaggccaccgggcagaccatggttgtggtcgaacatcatatcgatgtatggctcgatctggtcgatcgcgtgattgtgctcggccgacccgatgcaagttcgcccacgggcgcggtcatcgccgacggcaagccggacgaggtgttcgccgagatgggcgacgtgttggccgccggtggcgcgtgggtgccgggccgtgcgattcccgattactcgccgaagcgggagcctgcgcacgatgcgccggtgctcagcaccgagaacttaagctttggccgtgggaccgctcttggcgttggcatcaatctggatttctatcccggcgaagtaacggctctgatgggtccgaacggcgcgggcaaatcgaccttggccctgaccttggccgggctgctcgagcctatcgccggcaaggtgctcatcgccgacaacctcaagcccgcgcatgccgggcgtgagccgattgactggaaaagcaaggaactgctgggccgtatcggcatggtgttccaggagcccgaacaccagttcgctgccaactttgtgcgtgacgaggtatccatcggccccaagtcgatggggcagagccaagacgaggcttatcggaccgccgaccgcatgcttgagcagatgaatctcacgcgcttcgccaaagccaacccgtataccttgtctggcggggagaagcggcgactgtccgtggcctccatgctggccgccgcacccaaagtgttggtgatggacgaaccgacattcggacaggatttcagtacgtggaatgaaatggtcaagctgatcgccgccatccgcgaccaaggctcgtgcgtggtcatggtgacgcacgatgaggcgctggtggatgcgctgggcgcacgacgcgtgatgttcgaggaggcgaggcatgagtgacgtggtaaccgtcagcccgcaggaaacgcgcgtggagccggtcaaagcctcatcgccctcatggttcatagcgcgcatcaacgcggtcagtcgcatcatcggtgcgctgttgctgtgcgttccgatgttcatcagtctggatgtggtatccgcatccacggcgctcggcatcgaattcgtgctgctgtggattggtggcgtggctccgtggaccgtatgccgtaagacctggccggtatggatcgccgccgccggcagttttatctccgtgtttctctacggccgtacctcgggcgagatcctgtggcagggtggctggattgtgatcagtgagggatccattaatctggccatcgccacggctatcagggtggcggccattgccgtacccggcgtgatcctggccctgggcctcgatcccactgatttggcggacggtttggttgagattctgcacttctcaccgcgattcgtatacggcgggttggctggattgcgcatgtttacgctgctgcaggaagattggcgcgcacttggcttgtcccagcgttcgcgcggccttggcgacggtaacgccatcgcccgtgccctctcccaagcgttcggactgctggtgctctccatccggcgcgccaccaaacttgccaccgccatggaagcgcgcggcttcggctccagcgccccacgctcccaagcccgtatctcgcgtctgaagcctatcgactggatcttctacgtcatctgtctggctgtcccgctggcctccataggcgtagccatcggcaccgggaattggcacttcgcctttcaaggtgtctgaaaggcgacagactggcacagtgcctttcaaggtgtctgaaaggcttacgatgcctccgccagcgggagcgagccacgactgacgtaatgacccggcagtagggtagtggctatgcccatcaacgcccagattcttgataatccgaaatccgaccgcgttcgccgcatcgccgatctgacccgcgccaaaggccgcgaacgttcgggccgttttcttatcgaaggcccgcaatccgtgcgcgaggccgtcacttggcggccggacgtggtgcaggacctctatgtggaggtttcgcaggcgttggaacatccgcgtatcatctcctccacgttggagaagatcgtcgaaacctcgcaggatgccacgatttatgtgcactactgcaccggcgacgtgatgcaccgcatcagtccggacgcccagggcatcgtggccgtcggcaatgccgagtccatgcacgccggtgccgatgacgtcgaacttggcaagaacggccggggcccgcagatcgccgccttctggcaggtgcgcgacccgggcaacgccggcaccgtgatccgtgcggccgatgcggccggctgcgacgccgtaatcttcgtggacgactgcgtggacgtgctgaaccccaaggtcatccgctccaccgcaggctccctgttccatctgccggtactcgccatgagcaccgacgaattcttcacctggacaggcgacgaccataatatgggcgtctgggccgccgacgtatacggcaccgaagaatgcaagccggaaagcctgcccgcagtactggcggacaaggcggcggtcgaggctccgaaagccgtgctgttcggcaatgaggcgcgtggcttggaaccggacatcctcacacgctgcggccgcatcgtctccatcccgctgtacggcaaggccgaatcgctgaaccttggcacctcggccgcggtgatgttgatgtcgctgtctatgtcgggtcatgttgaaagaatgtgaaaccggtaaaaacgctgtgaaacgctgagaaaacatcagacgaaagggttctcgtggcagaacaaatggtgttcgacgccgaccaggtgaccgctgaggttgccaagggcatcgagaaaatccagaacgcctccaacctggaggagctcaaggccatcaagacaacgtacgcaggtgccgattcggcgatgaccaaggccagcaaggccattggctccctgcccgtcgaccagaagaaggaagccggcaagctcatgggcaagctgcgcgccgacttcggccgtgcctatggccccaaggaggtcgagctcaaggaagccgccgagaaggccgcacttgccgctgaaaccgtggacatgacgctgccggtgaaccgcaagcctctgggcgcccgtcacccgctgcccaagctgatggaagacgtcgaggacttcttcatctccatgggctggcagatctcctccggtccggaaatcgaagccgaatggtacaacttcgactccctgaacttcggcccggaccatccggcccgccagatgcaggacaccttctacgtcaagggcaatcaagccaaggacgccgccggtttcgtcggctccaacatggtggtgcgtacgcagacctcctccgatcaggtccgtgccctcctgacccgtggcgtgccgctgtacatcgcgtccccgggccgtgtgttccgcaccgatgagctggacgccacccatactccggtgttccaccagtgcgaagccctcgccgtcgacaagcacctgaccatggccgacctgaagggcgtgctggacaagctcgccgtcgccatgttcggccctgaagccaagacgcgcctgcgcccgagctacttcccgttcaccgagccgagcgccgagctcgacctgtggttccccgacaagaagggcggccccggctggctcgagtggggcggctgcggcatggtgaacccgaacgtgctgaagtccgccggcatcgacccggacgtctacaccggtttcgccttcggcgtcggcatggagcgcacgctcctgctgcgcagcgacatcaacgacatgcacgacctggtcgaaggtgacgtgcgtttcgccgaacagtttgtgatgggggagtgattcagccatgcctatgatcgatatcgattggctcaaggaccatgtcgaggttcccgaaggcctgacctacgaacagctcgccaaggaccttgtcaaggtgggtcttgaggaagaggagatccactcctcccaggtgaccggcccgattgtggtcggctacgtggtcgacgccacccccgaaccgcagaagaacggcaagaccatcaactggtgccacgtggactgcggcgacgaatggaacgagaccgacgaagacggcaacaaggtgccgcgcggcatcatctgcggcgcgcccaacatgaaggccggcgaaaaggtcgtcgtcaccctgcccggtgccgtgctgcccggcgacttcaagatcgagccgcgcaagacctacggccacatctccaacggcatgtgtgcctccgaacgtgagctgggtctgggcgacaaccacaatggcatcattctgctgcgtcagtacggcttctccgaggctgaatatgaggctctgaagcctggtcaggacgccatgcacctgctgcacctcgaccagcctctgcttgagatcaacatcaccccggaccgtggctacacgctgtcctaccgtggcgtggcccgcgaataccaccactccaccggtgccgcctacaccgatccggccgtggcactgaacgagaaggccccggaacctgctgactaccagcccggcaccccggtggacatcgatgttgaaatcgacgataacaatccgattcacggcgtgcccggttgcgaccgctactacgcgcgtatcgtcaaggacttcaatcccaacgcccacacgcccaactggatgcgccgccgcctgattcgcgccggcatgcgctccatctccttggccgtggacgtgaccaactacgtgatgcttgacctcggccagccgatgcacgcctacgacctcgacaagctcgaaggcccgattgtcgtgcgccgcgccaacgagggtgagaaactcaccaccctggacggcaaggaacatgacctgagcgtcgaagatctgcttatcaccgattcgccgaacggcgaacgcggctcgcgcatcctcggccttgccggtgtgatgggcggcctgtatggcgaagtgaccgctgacaccaagaacattcttctggaggcagcgcacttcgatcaggtgaccatcgcccgttcggcccgtcgccacaagattccatccgaggcctcccgccgcttcgaacgtggcgtcgacaccgcgctgcagcccgccgccacccagatggccgccgagctcatggccaagtacggcaacggcgagcccagcgaacacccgaacgacgtgaacaacacgccgcgcgccaaggtcatccacttcaaggcctccgaagtggcccgcgtggccggcctcgacgtggacatcaaccgcatctccgacatcctgaccgacattggctgcacggtggccggcggcggcaacggcgagttcgccgtaaccgcgccgagctggcgtccggacttgaacgagccgtgcgacctggtcgaggaaatcgcccgactggtcggctacgaccagattccgatcaccgtgccgccggcaccggtcgagggtctggtgggcctgaccccggaccagcagcgtcgccgtcgcgtggcggacgagctcgccgagttcggcatggtcgaatcgctgagctacccgttcgtgggcgacgacgattacaaggccttcggcttcgacccggaagccaccaagaaggtcagcgtcgagatcgccaacccgctctacggcgaccgtccgtacctgcgtcgcgagattctgccgaccctggccaccaccgtgcagcgcaacatccgccgcggcatcgaaaacgtgtccctgtatgagctcggccacgtctacctgtgggatccgaacgcgcccgccatcccggcactgcccggcggcgtgcgccccaccgacgaacagctcgccgcgcttgacgccggtctgcccgaacagcccgaccatgtggccggcatcctgaccggtctggccgaggacgatggctggatgggcggcaagcgcccggtcgactggtccgacgccgtcgaggccgtgcgccgcatcgccggccgtatcggtgccgcaatcgaactcgaccagcccgccgccgacgatgtgcccgtccaatggcaccccggccgcgtcgcccgcgtcatggtgggcgacgtcttcaccggctgggttggtgaactgcacccgcgcgtcaacgaggcgctcggcttcccggcccattccgcggccttcgagctgaacctcaccgcgctgttcgccacgctgaccggcaagcccgtccaggccaagccgatctccacgttcccgccggtcaagcaggatttggccttcaccgtggacgagaccgtgaccgcaggccagcttgagaacgtgattcgcaaggccgccggcgcgaacctcgaatccatcgaactgttcgacgtgttcaccggcgaacaggtgggcgagggcaagaagtccctggcctatgcggtggtgttccgttcgccgagcaagacgctgtccgccgaagacagcgacgccatccgcaaggccatcgtggctgaggccgccgaaatcggcgcccagctgcgcgcctgacccaaccgatcatccgaatcgaggagcgtcatgagccaaccggagcaggacaagccgaaatacgggcagtaccagcagcctgaatatggtgctatgtctggccaatacgggccgaattacaacccgtatatttatggcgctcccgagccggataccaagaaggattccgccgcagccgctggcatcaacggtggcgcggcgcaatcccagcaggccggccagccgtacggtcagcagccggcgtggcccggcaatcagcaggcgggcggctggccgtatgctcaaggcggccaacagtccggtccgggcgcatatccgggcgggtacccgggcatgcaggggcagtcgtatggtcaacagccgaacggtcagcctcaccagccgcattattaccacggcatcgacctgaacgatccaaaccagaacccactctacgggcactgggattcgtatgcgatcatctcctttatcctcgccctgttcttcccggtgccagtgctctcgacactgatgggcgcggtggcaatgtggcgcacgcgcaccttccatatgaagggcttcggtttggctgtggccgccgtggtgatcaacgtgctgtacaccatcgccgtcatctggatggccttcaatggctatgacgccatgagcctctaccaggaagccctccagcaactcaccggcggcaccggctcctcctccgactccatctccgcataagtagcgttcacataccaacacacccactgcataaatatgcaatagtctgcataatcgcgtatactcatcccaagacacatcagtgaaaagagatgagtatggcgaaatatacagtggccgtggccggtgccacgggctatgccggcggtgaagcgctgcgcattctggccgcgcaccccgacttcgacatcacctgcgtggcaggccattcctcagtgggggagtcgatggccaagcacatgccgcatattccccaactggccaatctggtcgtcgaagataccacgcccgaagtgctgaacgggcatgacgttatcatcctcgcactgccgcacggtgcttcgggcaagctcgcctcgcagctcgatccgaatgccgtggttgtggatttgggcgccgaccatcgtctcgaagagcaggccgcttgggatgagttctacggcggcgatttctatgagcattggacctacggcatgcccgagctcatcaccggcaaagccgcggacggctcatacacccgccagcgtgcggcgcttcctggcaccaagcgcatcgcaggccctggctgcaacgtcaccgccaccacgctggccctccagcccggcatcgccgaaggactggttgaatcgcaggatatcgtggccgatctggtcgtcggatactcgggtgccggcaagaatctcaagcgcaccaacctgcttgccgccgaggccctgcaatccgccctgccgtattcggtgggcggcaagcaccgccacattcccgaaattctgcagaacttcgcccacgcggccggcaagagcgcggccgaagccagcgaattcacgctcggcttcacgccgattctcgcccccatgtcccgaggcatcctcgccaccgtgtccgcccgcatgacggacaaggccaaggcactgagcgatgaggagattcgcgccgtatggtccaaggcctatgaaggtcaggacttcatggtgctgctgcccgagggcacactgcccgccaccggcaacatcatcggatccaacgcagcccacctgcaggtcgtcgccgaccgcaaggccggccgcatctacgcttttgccgccatagacaacctcaaccgtggcaccgccggacaagcggtccaatcactgaacatcgcactcggcctgccggaagacgcgggcctgaccaagatcggagtagcaccgtgagcgttacatttgcacaaggtttctccgccgccggcgtggcggctggtatttcatccgtcgaaggcaagaaggacttggccctcgtggtcaacaacggcccgctcgacgcggctgcaggcgtgttcacctcgaaccgtttctgtgccgccccggtgcagtggagccgtaaggtcgtcgccgacggtcacgtcaaggccgtgattctgaactccggcggtgccaacgcctgcaccggcgaggccggttacgcccagtccgtcaccaccgcggaaacggtcgccggtctcatcggcgccgaaccgaatgatgtggctgtctgctccaccggtctcatcggtgaactgctgccgttggacaacgtgttggctggtgccaagagtgcccatgaggctcttgccgccaccgccgaagccggcgccgccgcctcccacgccatcatgaccaccgacaccaagccgaaaacggtcgaactgaccggctccaacggctggaagatcggcggcatggtcaagggctcgggcatgattgccccgcagttggccaccatgctgtgcgtcatcaccaccgatgcggtcgtctccgccggccagatgcaggccgcactcgccgtggccgccgaacattcgttcaaccgcatcgacgtggacggctgcatgtccaccaacgacacggtcctgctgctcgcctccggtgcctccggcgtcgaaccggacaaggacgaattcaacaagctggtgcgtgaggcctgcgcatccctgtcccgccaaatcatcggcgacggcgaaggtgcctcccacgacatccgtatcaccgtcaccggtgccaccagcgaagacgcggcacttgcctgtggtcgtgccgtcgccgcctcgaacctgctcaagtgcgccatctccggcaacgatccgaactggggccgcatcgtcagctccctgggcactgtgccgcctgaagtcgcgccttacgattcgaacaaggtgaccgtggacgtcaacggcgtgcgcatctgcgagaacggcggcgccggccgcgaccgcagcgaggtcgacatgaccccgcgcgaagtccacatcgacatcgacctgaacaccggctcggacgccgaggccaccgtctggaccgacgacctcacccacgaatacgtccacatcaacgccgactacgaaagctgacaaacagcccagtgggctgtttgtagcagccggcag

SEQ ID NO: 259 - DNA, 35047 bp, Unknown
  R101_18m  MAG No. k141_54162
ccgccatcttccacttcaagtggtcgaatcgcggaatcagccggcggatatcatgtgccgcgtcgttaccagtcaagccgggaaattcgttgcagacggtcagtcgaccagcgaattgatctggatgacatggtcgcgctgcggaccggtgccgatcgcggagatacggcagccgctcagctcttccaaacgcttgacgtaggcctggcaggtggcgggcagctcgtcgaaggagtggcagtcggagatgtcctcatcccaaccgggcatggtctcgtaaatcggcttggcggcggcgaaagcggcctgatcggtcggcatatcgtcgtgacgttcgccgtccacgtcgtaggccacgcagatcggaatctccttcaggccggtgagcacgtcgagcttggtgagcacgatgtcggtcaggccgttgacctgggaggcgtaacggttgacgaccgcatcgaaccaaccacagcgacgcgggcggccggtggtcacgccgaactcgtgaccctgctgacgcagccattcgccggactcgtccagcagttcggtggggaatgggccttcgcccacgcgggtgacgtaggccttggagacgccgattacgcgggtgatcttggtggggcccacgccggtgccggtgcaggcgccgccggcggtcgggttggaagaggtgacgaacgggtaggtgccgtggtccacgtcaagcatggtggcctgagcgccttcaaacagtacggtcttgccttcgtcaagcgccttgttgagaatcaggccggtgttggccacgtacggcttgaggcgttcgccgagcttcagcagctcctcggtggtctggtccacgtcgatcggacgacggttgtagagcttgaccagcatctggttcttctggtgtaggctggcctccaccttgtcgtgcagatggtcggcgttgaacaggtcatgcacgcggatgccgacacggttgatcttgtccgcgtaggctgggccgatgccacggccggtggtgccgatcttgtgcttgccaaggaagcgttcagtcaccttgtcgagtgtgcggtggtagggcgcgatgatgtgtgcggcctcgctcaccttgaggtgggagcaatcgatgccgcgggattccaggccgtcgatctcctcgaagagcacttccgggtccacgaccacgccgttgccgatcaccggggtcaggttcgggttgatgatgccggagggcagcagatgcagggcgtacgactcatcgccgaccaccacgctatggcccgcgttgttgccgccgttgaagcgcgcgacgtaatcgaccttggtgccgatcagatcggtagccttgcctttaccctcgtcgccccactgagcaccgataagaacaattccaggcataacacacctccgcattcgcacgattccgccggaaacagactaccttacaccctctactcggggcgcggccatctcacgcaatcgggcttctggtgtctttgccgcgcgttgcgcgaggcgggccgacaccaaggcgccgccacggcgaatgacagtttatttgggtgttatctgagtgctttgccggccgagccgagttgcttgcatgcctcagccacgcgggcggacatggattcctcggccttgcggccccaggaacgcggatcgtagaacttcttttcgcccacttcaccgtcgatcttgaggaccttgtcatagttctcgaacacatggtcggcaatcgggcgcgtgaacgagtattgcgtgtcggtgtcgatgttcatcttgatcacgccatggctcacggcttctgcaatctcttccggacgggagcccgaaccgccgtggaacaccaattcgaacggcttgccgttgggaaagtcgactatgccggcggcgctgggcagctcaccctcgaccaccgcgcgcgccacacgggactgaatatcaccgagcagggcgggacgcagcttgaccacgccgggcttgtaggagccgtgcacattaccgaacgtgaaggcggccatgtatcggccacgctcgcccaaaccaaggcgacgggccacttcaaggccatcggccggcgtggaatagaggcgttcgtcgattttggcggaatagccgtcttcctcgccgccgaccgcgccgatctcgatctccagcaccgtgtgcgcggcctgcgacttatcgagcagctcctcggcgatgtccagattttccttgagcgacacggtggagccgtcccacatatgcgactggaatgtgggctcctgaccatgcgccacctgatcggcctcatgtgcgagcagcggtcgcacccattcgtccagatactgcttggcgcagtgatcggtgtgcagggcgatggtgatgttcgggtacttcgcggcgacctcgtgtgcaaaagcggccaaggccagcgatccggtgacacggtcgttgacgccgatgccggaaaggtatgcggctgcgccgacggacacctggatgatgccgtcggattcggcatccgcgaaccccttcagcgcggcgttcagcgtctgcgagctggtcacgttgatggcagggtaagcgtagccgccgcgtcgtgcggcgtctagcatttcggcataacgttccggtgttgcgattgtcatggcttcattatcgctcggggtgtgcccgccagactaggttctggagccaggcgagctgtgaactatctcacgaggaacaccatgatgataatcatagcgaagccgaccaaatcggtcggggtaaagaccgcgccggcgaataggacaccggtgatagtggcggttacgggttcactggtgccgagcatggtggcgcgcattgcaccgcagcgctgggtgccgccgaggaatagccaataggcaccgaatgtgccgaacaccacggtgaataccatcagaccaatgccgaaccagtccaacgcgggggcggtggtccacggacgcacgagcggcagcagcattagaccggaaacgatgaacatgacgccgctggccatgaagttgccccatttggccattaatgcgatgggcagaatcgcaagcagtgacgtgcatacggcatcggtcaggccccacagcagaccgggcagcggcagactgagctggctgagatcgccgcctgtggcgatgagcaccgtgcccacaaaagcgagtaccacaccgatgctttcgcgtttgccgggcagccgtttgcccataatacatacgaatacgagtacaaccagcagattgagcgtctgcagcactgtggccgtgccggaattggtccagtcaatggccttcaagtaggagacctgcaccatgagcacgcagaagaacgcgcacagcaggagtctcgggtaggaacggtagtccttaagcgagttgatgaacttgtcaggcgtgaagattcctgcgcaaaccagaaagatgacaccggccaatagctcgcgcacgcaggcgatccacagcggatcggcgtgatagtcgttcatcaggagtttggagacggtggcgttgacgccccagaagacgcctccggcgagcgccagtccggcaccgacgaagatgtcgtgcggggtgtgttcgagggttggcgttggttggccattggttgcagcggtcttgggttcacacatcgcccatcacgatacgcggacgacgtgaattgttctcatatagcggtcatacggcaggaaaataagctctcaaaagagggaaaaccgttgaaatttcaaggaaaatcgatggagcggacgacgggagtcgaacccgcctctaaagcttgggaagctttcattctaccgatgaactacgtccgcatgtgcgcttccacgcacgagaggcaagtgtatcacctatgcggcaccttgcgccatgtgccggtttgagttctgtgctggactagtgaattgcgcgcgtggaatacgtggatgcggccaccggagtgccgttcatttcattggccatttgcatcaggcgtgcgatgcgctgatcagtcggcggatgagtggagaacagcttggagaatccggctgcggagaacggattggcaatcatcatcgcggagacggactgggtgccggccgttttgcgcatgggcgtggtctgggcaccataggagatcttgttgagcgcggaggccagggcctcggggtcgccggtcagcagactgccgtcttcgtcggcgtcgtattcgcgagtacgggagatggccatctgaatcagtgatgcggcaatcggcgcgagaatcacgctgaggagcacgccgatcaagccgagaccgcctgaattatcgcggtcgtcgcgcgagttgccgccgccgaaatacatcagagaataaccgaggtacgtgatgacggtggccatggcagaggcgatggcggaggtcagaatgtcgcggttgtacacgtgcatcagttcatgacccagcacgccgcgcaactcgcgggcgttcagaatctgcaggatgccctgcgtgcagcagacagccgcgtgccgttcgttgcggccggtggcgaaggcgttcggactcatggtgggcgcgatgtagatgcgaggcatcggcttgccggccttggcactcagctcgcgcacgatctggtagatttcgggggcttcctgctcgctgacctccctggctcccatggatgcgatggcgagtttgtcggagaaccagtatgagccgaacgtggtggccaacccgataatgacgtagatgcccagcgtctgctgcctgccgcccgtggcccaccatatcagcatgatgatggcccacatcaaggcgaacagcagcgtagtcttcaggccgttgaaatggccgtgcacccgtactttggcatccatgaggctcacactaaaatcactgcctgaatattggctggatgtgcgccgaggggtgaatcggatgggggttggcggtgcttacggtgcggttggcggggatcggaatagcctgtttacatgagattgacgatgcttgacagtgcggttgcttggcctgttttaccgctttaccgctttaccgattggtctgatcgggacgctttgcttgtttggcctgctttggctgcttggatcgtttggcccatcggcctgctcgactggcatgacactggcttttatataaataagaacgctggcgtataaccggcgttcttatttatcgatgtatcaatcgcgccgattgctgctggtgcagttgccggtgcgatgagctgatagtcaatcaggccagagcgagctcacgcatctggtcgggctcgatgaccttcttgtgctcgcggccctccttggcgccttcggcgcgctcgaaggcgtcgaccttcttccagccagcgaagtcaatcggcttgacgccgcggctttccagcagtcggtcgatggattcggggtcacgatcctcggccacgcgaccaccttcggcggccttggccagatcctcaagcatgttggtcacgatggcaagtgcgtcggacttggtggagccgatcaggcccaccgggccgcgcttggcccagccagtggcgtatagacgctcgcgcacttcgccgccgtctgcttcggtggtgatgcggccatcgccattggcgttggccaggtgagcgccgtgctcgtcgtaagtaatgccgggagcctcggccggcttgtagccgatggcgtggtagacggcctcaaccgggtagtcggtgaactcgccggtgcggctcatcttgccgtcggcaccggtttcggtgcgctccacgcggatggccttgaccttgccgtcctcgccgaggatctcggtaggggcggagttgaagtgcacgtagtacttgcggtcggccgggttgccttcgaagtcgacgtcgccgtcatcttccatgtcctcggccatctcgcggatggcgaacagttcctcgaccatctggcgggtgagcttgtccttgccggccacctcgatggtctcgtcgtccaaatcgaagtcgtcctcattgatgatgagctgcacgccgggcagcttctccatctcgcgcagttcctgcacgctgaacttggcctgggccacgccacgacggatgaacaggtgcagcaccttggccttgttctggccgatgccctcgtacacgttgtcgggaatgtcggttctggccttgaggtcgtcggcgtcgcgcatgagctcgcgggccacatccatggccacgttgccgccgccgatcacggcgacgttctcggccgtcagcggccattcgcgggcaccggtgggatacccgtcgtaccattcgacgaacttggcggcgccatacacgccgtcgaggtcggcgccgggcaggttcagcggcttgtccttgactgcgccggtggcaaacagcacggcgtcgtagcgggcgagcaaatcatcgagggttacgtccttgccgaattccacgtcgcagtagaggtggatgtccggattgtcgagcgtcttctcgagtgcggatgcgatgaacttgatggacgggtggtccggggccacaccgtaacgcaccaggccgaagggcacgggcagcttctcgaacaggtcgatgcgcgcttcggtgccgaggccaagttcttcgcccagcttcttgagctggcgcaggaagatatcggatgagtagacgccggccggaccagcgccgattacagcaatacgaagttcagtgttcacagattcagtcacgcgctctagcctaacgcaaagccttccgttgcaacaggggtgagtggtgggaatcctgtgcctaataccctctgccagcctcacgccagcggggcaaaaccacgagtcgatcaagaaattgccccactcacagaccgccagcggagcaaaatcgcgagtaacccgaaaaattgctccgcttacagcccatcagcggagcgaaactgcgactaacccgccaaggcaccccgctgaacacccaccagcgcagcaaaaccactattagaccgtaaaatcaccccactcgcagaccacgagtggagcaaaacccctattagcccacagaatcgccccgcttacagaccgtcagcggggcaaaaccgcgactcagtcgaggagataccccgcctagtcgcggtcgatgagggcagtgagggcccagaggatgctgaccacgtcgatggcctcttggaggaaagcgccgacgatcactggaatgaggttgaaggcggcggcaatcatgccgatggtggcgagtacgagaccagcgatcacggcctgcagcatcacgcgcttggtacggcgtgcaatggcgatagcgcgcggtacagcggcaatatcgtcattcataatgaccacttgggcgctttcggaagcagcagtggaagtgccgtcggtcatggccacgccgatatcggcgacggcaagtaccggggcatcgttcacgccgtcgccgaccatcatcgtgaccggcttgcggattgcggcggcgcggctgcatcgagaacgcgacggttgagaaccatcggaccggatgccatctacggcatcggacacagggctggcggcgtgattcgcgcgcccggccggcgcggcgcttgcctccgtggcagccttgacggcggcaaccttgtcttcggggaacagctcggcgtggacctcgtcgatgccgacttcgtccgcgatgatttcggccgaggcgtgcttatcgccggtaagcatggcgagcttggtaacacccagttcgtgcagattggcgagcgcggttttggtgttggcgcgaggtacatctcgcagcacgatgcgggcgatcagttgcccgtcaacggacacgtaggaggccatttcgtccggctgtagcataccgaatcgcgtacgcagcgtttccttttccttagtgttcccggcaatcgtacggccagatcctgcctcagtatccccgcccagaggggactgtccgtgaagcgggctgaggaggtcggccgcctcctgccgtgggccatccgcccggcttacacccgctacctcggcagtcaagaacccatcctccccggctgcagcgaacgacagtcgcccgacgcggacggcatggccgttcacctcgccggacacgcccttgccggagtcctcattaatattcttgacgaccggatattcgcggccgtggccgggccagctggcctctggttcggggcagagacgctggccgtccgcgaaacgctgacgcaagcgggccatcgcgtcggcaccggctttggcgatgcccttcgacaggatgtgtacggaatagctctctacaacgccggccaacatcagcacatggtcctcattaagacgggtctcagctccaggcagcatctcaacgcgcaccacttgcggctgcttgacggtaagcgtgccggttttatcgaagaatacctgggtgacgcggccaaggttttcgagcacatcctgcgccttgatgagcacaccggcggcggcgagacggccagtaccggcgatgtatgccacgggcgcggcgataagcagtggacagggcgtagccagcactaacacctgggcgaaccgcgtcggtatgccggacaccgcccaggcgacgcccgctattaccagcgacagcacagtgaacggaacggccaatcggtcggcggttttcaccacggccggacgggactcctgtgcggaagcgacgagttcgaggatgcgctggtactgggaatcggcggccacctgggtggcgcgcatggtcaaggcagtggaaccgttcactgcgccagacatcactcgggcaccggcgaacacctcgcgcggcaccggctcgccattgatgttgctcagatcgagcgtggccgagccggaaagcagttcgccgtcgaccggcacggtttcgcccggcaacaccatgagcacatcgccgagcttcacctgctcgaccggcaccgtgtcgaagcggtgcgtggcggcctcagccgaccagctcccctcagtctcgctccgcgagtcagctcccctcgacggcggtacttggttcccctctccaaggggagctgtcggcgaagtcgactgaggggaggacgtcgccggaaccgagcctacacgccggaagccatcggacgaatcgtccttatcagcggcagccccacaccccacgccaggcaagttgacgacgtgcgcagtttgcggtgctgcctgcatcaatgcggtcaaactgtgctcggccttggcctgcgcgtattcctcaatggcctcgccggacgtaatcatcagcatgaccgcccagcttgcccagtactcgcggacggcaacggtggaaagaatcgccactacggccagcaaatcgacgccgacttgtccgtggcgcaaatcgtcaatcatgccacgcactgtgtcaatcacaatgattgccaccagcgcgattatcagccattggcctacaccaggattacccagcaccggcatcgcaattgcgttgccccatgggcgccaatcgcccagcaatgccagcgggattgcggcgataacaacaacgggaagcatcggcacaagtcggcagatgtcgaggattttggtgaagaatctgatgagtccgctcatcattgctccttacgctcgtatacggagtcgattgcggcaagcgtggcccgcgcaatcggcgctgcggtcacgccttgttaacccaccggcggctttgcttagggcctttcggctccgcgcgaccatccgatacacggcgtaaagaaatcgtttttagttatgtgttgaattattgtgcgcatcgttcgagacattgcccgaatcagcgcttggcctaccctatcagcggcctgaacgcgacatgccgggcggcgaaactacgttggcagctcagtcggaaggcatcaatcgccccccccctacgattccgccaagaattcccgtgcatatgaggggctcgcagcccttatgcgcctgcagctgacgtcctgccagaacgattcccgtgcatacaaaagcccacggaacaagatatctgccgccgctccggccgacccagccaaacgcttcccgcgtatacgaaaggcccgcagcaggagttgctcactgctgcggacctttgcctatctgacacggcgttcaacggttaccgctcaacgccgtgtgacgcgctgaaccagctttaccacaggccgaacgggtcggagaagccgccgccatcaccggtgccgccatcgttgttgccgttgccattgccgtaaccattccggccgttgccgttctggttgttctgcttattctggctgttaccgttggaatcggagctggacgaaccgttcaccgacgactcctcctgatcgagcgtcacgtccacatccatggtcttgccgtcgcgcacgatggtcagcgtcaccttgtctcccaaagccgcggcacgaacgtaaccaagcagcgagtagttgttgttcaccgcgttgccgttgaaggccacgatggtgtcgccctccttgagaccggccttgtcggccgggccgccggagacgaccgcgctgccggtggcgctcgacttggtgatggtcgcgccgccgcgggtcacaccgtcggcttcaaccgtgtcggacttgatgaccacgccgagggcaacgtgcttgaccttgccgtccttgatgatttcgtcggccacacgcttgacgaggttggacgggatggcgaagccgatgccgatcgaacccgcggagtcggatgaggtggcggtcgaggcgatggacgagttgatgccgatcacctggccggccgcgttgaaggtcgggccacccgagttaccggggttgatggccgcgtcgatctggacggcgttggtgacgatctcgttgttgttgtcgtcggtcacggtcaccgggcggttcagggcggagacgataccggtggtggcggtgtcgtcgtagccgagcgggttgccgatggccatcacgttctcgccgacggcgagcttgtcggaatcggcgaatttcacggccttgaggtcgctcggcgggttgtcgagcttgatgaccgcaagatcggtggtggtgtcggtgccgacgagcgtggcggaatacatgttgccgttggcaagcgtcacctgaatctgctgggcaccggagatcacgtggttgttggttatgatgtggccttcggtgtcgatgatggcgccggagcccttggcggtgccgttgctcaacgcggtctggatggagaccacggagccggagacatcgctggcgacagtctgccagtcgggggcttcgccgctcttggcggtggcggacccggagccggacttattcgagctgacgttggacagcgaattgctggtcggcaaggtgatcaggccgctggtgagggcgccgtaaccgaggcccaggcagagggccgcagccagaacggcggcgaccacggcgatgaggatgttgctcgccgtcttggacatgccctgcttggcggggccgggctgaccgggctgtcccggctgggccgggccttgaccgttcggcgtaccggtaccgggagtgccgaaaccgaacagaccgccctgctggggctgctggccattccggccattctgaccggactggctggcaaacgggttgccgttgttctgctgcggctgcgtgggcggattgaacggattgccgttgccctgcggctgcgggttattggtgtagtagggattgcggttgccctgctggccctgtggggtttgctgtgcaggctgaccgaacgggaattgctgcgtgggctgggcattgctgccggcctggccgccctgctggccctgtgcctgagtcggggtcggaccataagcgccatattccggggccggacgatacagcggagttgtggccgaggtctggcctgcggccggtgctgccggagaagccggcgaggaggagaccaccgtgctctcgcccttggcggaggcgtagtccgggatgggctcggtggcggcagtgtcggtagcggcttgcgtaggctgctgatcggcagcgagggcggccgaggaaaccggggcttgctgctcgctggaatcgctggcgttgccggcatcaaccgagtcgccacccacaaacgggttcttcggctcggcgttgccggtatcggcagtactattggggttttcgttattccgcggggtctggtcgacgccctgcgggttaaattcgtcagccattgctactccttttcctaaattcctatcacgtctgttcggcggctattcgggcacttgcccattgccacttctcgtgtgctacctcagtagtaaaggcagtcaatctggaggttttctgaacgttgattgaaagtctatgcgtaatcatcgcagagtcttatgggcatctcggcttcgaggggctgatttcctgtttcgggaacatctacttgcacttcaaggggctgttcgcgcggtcaattccgagtatcaagggccctcatttaacgccattccgccatttttgcagccggcctacttgaccgggagccccttgaagcggaagtagacgttcgggagcggcgaaatccgcccctcgaaaccgagttcttcacaatttccggcccttttctggcccttctgcctaaagtgaacatatgacgatcagccttcttgaacatccgttgggcgcacagcccggacagcccggcgaccgcagcgccttccatttcgaaacgatcacccgcctgccatccacggccagcgggcttgggcgagacggtgcccgatacggccgcaccggcatcattcacacgccccacggcgatattcgcacgcctgccttcgtgccggtgggcacgcaagccgcgatgaaggccgtgttgcccgagcagatgaaggatctaggtgcacaatgcctgctggccaacgccttccacctgttcgagcgcccgggcgaggacgtgctggacgcggccggcggcttggcgcgtttcatgaactgggatgggcccacgttcaccgattctggcggtttccaagtgatgtcgctgggcgtcggcttcaagaagacgctggcaatggacgtgaccggcatgaagtcggacgacatcatcgccaagggcaaggagcgcatggcctgggtggatgaggacggcgtgacgttcaagtcgcctttgaatggtgacgcacatcgtttctccgctgagatttcgatgggcatccagcacaaaatcggcgcagacatcatgttcgcgttcgacgaactcaccacgctgatgaacacccgctcctaccaggaggactcggtggagcgcaccttccgctgggcccgccgatgcgtggacgagcaccagcggctgacggctgagcggctgagcaagccctatcaggcgctgtatggcgtggtgcagggcgcgaattacgaggatctacgccggcgcgcggcctcgcagatcgcctcgctggacttcgacggcgtgggaatcggcggcgcaatcgagaagcgcatcattggagacacctgcgcgtggatctgcgacgcgatgccggagaaccgcccgcgccatgtgctgggcatcgcctccgtggacgatatcttcgcgtgcgtggagaacggcggcgacaccttcgactgcgtggcccccgcgcgctgcgcccgcaacggcgcgatctacacgcgcgccggccggtacaacatcaagcgcgcccagcataagttcgatttcgggccgctggaggagggatgcgactgctacacatgccagcattattcacgcgcgtacgtcgaccacctgctgcgcgcccgcgagttcaacgggtttacgttggccacgatccataacgagcatttcttcgtgaagctgctagacgacatccgcgcctcgatcgacggcggatactttgatgagttccgcgacgaagcgttggcccacttctacggcaacggcgagcgccggccagggttgtgagtttttctccttcgttgcggcttgtgccgaacttctctctgctcccctcgctgaggctgagacgttaagcaaacagcccagtgggctgtttgtagtcgaaggtgagacgatagtcgaaccagcaggttgcaggcaaggcccgtccttaattgcggacgagctgtcacgaagtgactgaggggagtgccgccaccctcaaagatcacggcgcccgcaggagacccacaagcgatatatccctgcctcccatgcgacacgccgaagattgcatgattacccagccgggtgtaagttagtcgattgtctgcgagtgtggcggaatggtagacgcgctgtcttcaggtggcagtgagtgtatgctcgtgggggttcaactccccccactcgcaccagcaactaaagggctggaatcggaaggttccagcccttttgctttgtccgggcaagcgccgtttttcaggggggctttaggacttgagacttatggcccaactttcgtggcggaaaatgtcccggtacctgcatcaatcgcttgacgttcaagccaggccagaatccgctgtcccggttcgcgatttcgggcgatctttgcaaaccgggacaatttttgttgccccggtataaatgtcaatcgatttatgcgaaaaccgggacaacgtgccaattccagaatcggccttattccgccgattccgtctgccagacgatatgagttgaggaaaccggagtgtcccggttcacgaaaacaagccgaaatcgccgaccgggacagcggattctgccccggtcgacaggtcaaacgattgacatatgaaccgggacaaatacagatcagagagaagcccatgaagcagatttaactttcctcaactttccatccgccataaactagcattacataacatcatgaaccgagacgaaaccaacgaagtatctggagtcaccgacgaccagctcggccgaacggccgagccgtacgaatccggcaactggcggggcggcgtcgggagcatcattcgcagcaatccgaaatcaggaaccgacacaagtcggacccagcagacacgcataatacgagttcacagactcggcgatgtattccgcaaccgcaccaccgaataccacaccacggaagaactgtaagcattacgaaatcaaccttgattattgcgcgggcctatactaagttacggtagcgtaggttagtggtcgggagagcgtcgccggccatagcgaggtgatcagtatgagcgtttccatcagcacgccatctggacgaaccatggcttccgccgcaacagttgcgccttccgcaaccgcgagtcaaaaatccagcgcaaacgccaaccccaccgcactggaccgtgcatcagcccgatacagggccgcgcaatcgcgctaccgccaagccaaggccgcactgaaggcgatcaagcgccagatcgtccccgtggatgcattcggcaatcgcaagccgcgactgcgcggatggctgcacctcgccaccctgccgctgtgcatcgcggcgtccatcgtgctcatctgtatcgcgccggccggtcccgtcaaggcggcctgcgcggtgtacggcgcctcggccatgctgctgttcggcaacagcgcgctgctgcacgtcgtgccatggcgcagcgcgaaggtgactcgcgtgctgtgcggcatcgattattcgaacatcttcctcatcatcgccggcaccaacacacccgtgctgttcgcgctcagcccggcgattcgccggccatatctcacggtaatctggacgaccacggcgattggcacgatactgcatatcgtctggctgcggacgccgaactgggtgttcaccaccgtatacgtcgtgttggggctggccccggtaacgcttattccgcagctctggacggctcccgcagtaggcccggcgccgaccgtgctcatcgcgtgcggaggcgccgcgtacatcgccggcgctgtatgcttcgcgctgcgcaagccgaaccccgtccccggctggttcgagtttcacgaggtgtttcacttgggcacggtcatcgggtatgcctgccacgtcgtggcgatttatctgattgtctgtgcgctgtagtcgtccagcaattcatacaggatgcttcgaactcgctgtattgcagcgatttgaacacggcgcgggacagacagcggcccttaattctcggagccaagaatcaagtccttgaccagccagccgtgacggccgccttcatagacctcgtcagtgagtcgatagccgcactgctcatagaacttgtagtggtcgttttccgagtgcacggcggtcatggttccgccggcttgcgcgatgcggcgttcggcgtcagccagcagccgcgagccgatatgccggccttgcgcctcggacagtaccgccaggcgcgcgatgatgtatcgcccgggctggtcgggatgatcggggtccgcgtagaaccgacaggtcgctacggggtgattctggctgggctgaatgggctggctgcgtgaggccaattgcgcggaagggccggggcgatcggacgaatcgaccgaatcgaacaccagcagatgtacggacgcggcatcccattcatcgaactccggccgccagtcgcgttcgcggatgaacacctgctcgcggatggcgcgggccgcgtcgggcagccggtcgtatgcttcgattcgtatggtcatgagcgtcagtgcaatgcgtcacgataaccgacaaagcccggctcgatggacgagtccgggcccaggctgtgctcgatggactcaggccgtacgcgcgatctgcacggcggtgccggacgcggtaaccatcagcatgccgttgtcggcgccgagcacctcgtagtcgatgtccacgccgaccacggcgtgcgcccccatcgcctccgcacgctgctgcatctcggcgatggcctcgttgcgggcacgcatcagctcttcctcatagccctggctgcggccgccgaacatgttacgcaggcccgcgccaagatccttgaacatgttcacaccggataccacttcgccgaagacgatgccctggtaattggtgatggtgtatccgtcgacggacggggtggtggtgacgaggatcatggcgaggctcctttggcttgtctgcgtagataaatcactgccgagagtcggaccgttcccgaatctcacctcggaaacggatcgcttctcttggctaccacaatagtcgagagcgcctttcccgacatcttcaatccacgcgattgcgtaatcaaatgcgtgtttcgccgccaaaaaatgctggtagatgtcataggaggagcgcgccacagcgaatacgcatacgatttcatagcaagcagcacgtacactagtaccagtgaatgtcagaaatcggaaaggaacagggcatgactggtgcatccagcggggctacccgtatcggctcaaccgcaccacaagcgcttgagttctttgccggcatagggcttgcccgcctaggcctcgaagaggctggcttccacgtggcgtggtcgaacgatatagatcacgccaaatgccagatgtataggaaccagttcggcaacaatgagcaggaacataccctgatcgagggggacatgggtgagctacatggctctgacttgcctcacaatatctccattgcttggggctcctccccttgtaccgatatatctctggctggaacccgtacagggttgaacggcaaacagtccagcgctttctggcagtatatccgcctcctggaagagatgggcaacaataggccacctgtagccgtacttgagaatgtcgcaggtcttgctacgtctcactcaggcgaggatatagcagcagcagtaagcgcattcaaccaactgggatattcagttgacgcgctgtcaatcgacgctcggcgttttgtgccccagtcccgccccagactgttcttggtcggcctaaccaatcctcctgagggctcgcaagccaattccccactacggccagattggttgcaacaggtgtttgccgatacctccctgcgtatgcacagggcagttctgccggaaccgccggaaccacttatggcgggctttggcatgtacgccgaagagatgtcagacgatgattcccgatggtggcctaagggcaagctaacggcatttcttgactcactgtccgctgtgcaatcagagagagtgatgaagctgaaggacaatccgttcatctcttatcgaacggcatacaggcgcactcggaacgggaaacccacgtgggaagtccgagcggatgacatttcgggatgtctacgaacagctcgcgggggttcttcaagacaagccgtggtacgactcggcaaggggtcgacggcagtgcgctggatgactccaaaggagtacgcggcacttatgggcgcatctcattacaaccttaatggtctgcgcaccaaccaagccttgttcggcttcggtgacgcagtggcagtacctgtagtcgaatggcttggcgagcactacttcatgccagcacttcgcggtacattggacaaggcaaagcagcaacacgagctacggtcagcttgatagtcgtcgaaggagagcgagcatgggtattgacgccatcgaggagtttcgaaagagccacggcattaacaccaaaggcaacctagccggcatactgcagctcaaccgcgccttctcgaaagatacattgccaatcaatcccgatgattatctcacgggtaaagaaggacaggtcaaaggactgagtggtgcgaactgccaaagcattttagaggagtaccacatcaagagggtgctcgcgtccgaaggtggtcgaactagccgcggccttatgggcataatgaaagattatgcagcgctcattaatgaagagcggccgtccagcaaagatttcagcgagatagagcgtttttggattgatcgtatacgcaagttcttcaatagcaagccattcaggctagaggccgatgagtcactctcaatcaccgcagcagtaggcaatctgttagagcaggccaagaagcggcaaaaagagaatcccggtaccatgtacgagggcacggtgctgcagcagctcgtggcagcaaagctgtctattatcatgccggaagtggaaatcaacggagcttcagtagcagatgaccccaccgggcgaggcggcgacttcaatatcggagataccgccatacactgcactaccgctccagccacgttgcttatggagaaatgccagcgcaatatcaagaatggccttcatccaatcattatcacggtgaaagaccgagtgaaaactgcttgggatttggcagcggatatgggcttcgctgaacgattggaggtctgggatattcagtcattcctgtcaaccaatgtccatgagcatggtcattttagccaagatgaacgcaaaacaatgctcactgatttggtcacctcttacaacaagattattgacacatacgagacagaccccagcttgcgtattgagtacagtaattagaaagatgcttatactagccgccaatcttaattgattattcgaaaaccgttcttaacgtacattacactagagttttgcaagcaactttaggcacgtcgaggtatcaccatgagagaacgaacatgtgcgccaaatcccaatctgctggaatccatgcgttctgtcggatatgacttgaatactgcggtagccgatatcatcgataattcaatagctgcgaatgccactaaaatcagtattttgtacttcgggcaaggcgaggaaccatacatcgctattgtggataacggcaatggcatgagcgagaaaaccgcattcgaagccatgcagcttgccggcaacagtcccaataaggatcgcgcgtcaaacgatctgggtcggtttgggcttggtctgaaaactgcttctctctcgcaagcacgatctttactcatgacaacacttcagaacggagcacgtactacactgcgctgggatttggacgctgtagcacgcgcaggcgaatggacgttagaacaattgaacgagaaagagaccttgtcagcgctgccccaaagagtccacgatgccatgcccgtctcacacggcacttgtatcttgtggcgcaatctcgacaaacttgaaactcttgccggaagatctctcagagagatcgataaggctatggaagagcttaccggataccttgcattggtatttcaccggtttacacatccctatcccgacgataatatccggcaaatcgtcatcgacgtcaacggatgcacgattcctcagcgcgacccattccttcgcgataatccggcagtccaaaccactggagtccagcgcatcagcacttccggagccacgctgcgcggttatacattgccgtatcaaaaccgtctgcgcgacgaagacagacagctcctgaatctcagcgagcaacgaggtaagacgctaaccgatactcaaggattctatgtatatcgtgcttaccgattaatcacttggggcagttggtttcgcatgcttcccaagaagcaggccactaagttaagccgcgtgcaagtggatattccaaatagcctagatgctgagtggactcttgacatcaagaagtctcgagccacgccgccgaagatcgtcagcgaagtcatgaagcgatatgtagaccgtttagcaaaaccaagtcgcagggcccagcaattccgcggtcgcagaaaaaacgatgacccctatgctcctgtgtgggatatcgtgaatgaccgggatggtgtattccgctacgaaatcaacaggagcaacccatatatcgcgtcatttttagacgcattaaccgttgaacagcaaaagacgttcatggaaatggccaagattctatcggccacgatcccatatgaagatatgcagtctcgttttgcaatggaccaacgagctgacaattttactctcaacgatgatcaagcccgcgtctttgctaaacagatgtggacgctgaacgagcatatgggtttaacgccagaacggttcgtcgaatacttcaggaacactgaaccaatgtccctctgccgtaacggagagatgatactcaaggaggtatcacatgtctgatctgtgggccaaggctatccagcaaacaacgaatgcgctatctgcaaacgatattctgccaaacgaaaagttgatcggaaatatacttcgtgtttatgcatcagtgcttgggctagattgtgataccgatgaatatcgggaagccgttcgacgtctgagggacatgtttcttgcgaagatccccgagggtacaacgcttactgataatggggagaccaactggcgggagtggctgccagaaatgaagcaagacgggctggttccgcaacgatggtttgcataccagcaatacttacaggagaaacagaacgccgacttcattcagcttcaatcattggataagtccacggatcgggtgctcggcctgctctctgacccacggcgcgatcacgcccccatacggcgtaaagggctcattttgggcgatgtacaatccggcaagactcgtacatacatggcactaatgaacaaggcagtggactacggatacaagatgattgtagtactcactagttccgacgaaggcctacgcagacagacccaagaacgcattgactccgattttctcggtatcaagagagtgacaagagaaagcacgggaatcggcaaatataccaaaggcaagagcatacccactccagtctcgctgacaaatgaggatgatttcactactccgagtagcaaggcatttcaggggctgccacgaccgacgtggaacgaccgtcccgtgataacggtcatgaagaagaatggcatagtcttaggcaaattcaacaagtggcttgacagcccggagtttccaaaggatctgcccatgctcatcatcgatgacgagagcgactacgcatccgtaaactctgccaaggaagacgagtctcccacagccatcaacgggttgttacgcactttatgcaatatcagtgagcggtcatcatatgtagcggtgaccgccaccccattcgccaatgtgttcattgacgatgaagttaaagaggatctgtttcctagggacttcattcacatcctgccaactcctcccgcctacatcggcgcgaagaaattgttcggcgaccttgataccgaaggccaaaagagcccatgcgtacaactccttgatgaagatgaactctccagctggttacctctgtcccataagaaggaataccgttttgataacaatggacaatgtgagttaaatccgcaagttgctcatgccattgattgcttcctcatcgcctgcgtgttgcgtcccggcgcggaggacaagcggcagtcgatgctgatccatttgtcacgatttactgcagtccaagaacagattgccgacatgatcaacaaatatgttggcgacattgtatctgcgctaaaattccatccaagtgaaactgaccagcgcatttataagatgcatcgtgtctacgatgaggaatattcggcttacggccaaaccaacgggatgtcttggcagcgagtcctacatcggatgcgtctgatgaccgaacggctacaggtgcgcctagtcaattccaccgcatcaaagtggagcgaaatcaaccaagtacccatcaacctagcgaaaaacgaatgcaccctctacgtgggaggcaacagactgtcacgtggtatgaccttggatgggctcatttgcagcgtcttttaccgcaacgtcacgtcggcggacacgctactacagatggggcgctggtttgggtaccgaccaggatacgccgacctgcaacgtgtctggctgacagatcagtccattgctgatttccgttatgcttgctccatcaccgagaatctcaaaacgcaggccaagaaaatggagcggcaaggacagactcccaaacagttcggtctagccatcatgaagaacccagaaaaaggcgtgcgcatcaccagcgccacgaagatgcgcagcgctgaagaaggtagcagcgacgtgcttgctaatttcgacttggaagggacccgaatcgaagctgtacgtatcagtgcagcgccggaccgcttgaaagacaatgacagcgcgctcaataagttgatcactgagtgcaattcaatgccgagcgcgtttatcgcggattcgccgatgcgcgtctacaggcatattcctgctggaataatcacagagtttctatctcactatcgtgccggctacgacgatacatacttcggccgtacgctattgcaatacagaaatcaaatcaaagagcttaacaccactaaggccctcgaattcgcaaaaacccagcagacagaaaatccagatatcgactggaacatcgcgtttattagcggtaagggggaacccattgatggagtcaggttccattggacgcaagtagagcgcaaaagcacatatgacagggaacacgacctgttccgcatcagcggcaaaagcatgcgcctagcaggcacacaggatgtgttcaatgtcgcccgggcaatctcaccagttcctatgcccaaaaagatgaccagtagcgagactgattactacctcacgaagtatttcggaatcagccccacacttatgctgtaccgcgtccagattaagcagaatgggaaaaagatctatcccgtaccggatagcggcaacggcgtgctcgccgccaaactcgtcattccaactgccgagatcacggacgaccggcatagaggcaatgcaacctactactacaacaaggtcgcaacacgacagcagtatcgcgccatgagggagcaatatgacgctaacaacgaagggggagacgaagattgggcctactaatcgattccggttcccttgagaatctctggcggcaactagccaaacgactagggacggagaaccaagaattagatctgtccctgagacttccggtagtcatcggatgtacgtctgaatgccggccgtacatcatgctcctatgcaatacacgacccaaagcattgaatagcttgaaggcgattgatgtgcgtgttacagcacggcagtcgcctatcaaggagaattggtccttgactttcattctcaaggactggagcttgttgcacgcattcgcggaaatctgcctcgcgttcatcgagcgcattcgccggtcatcgtccgaacggtccgccttgcgcgagatctacgcaacgatggaccaatggcgacgcctattaaaaaccgccgacggaactggtataaatacgctacgcgggatatgcggtgaactgctggcttccttcgaaatcgcaaagctcactagcagatcggttgacatgacgtgtgaggcatggacaggcccgtacggcgcgcctcaagactactcattcgaatcggaacgttgctactgggaaattaaaacgatccacagtaacgcgaagaggatcaaaatctcctcgcctgaacagctagacacgtctgaccgacgtatcaatctagtcactgttgtcctcaacgagccatcgggaacaaatgaggaacatctggtgaatctgtctcggattatagagctgctactgcgagtctcggacgatccctaccgaacgggtctatgtatcgataacgggctggataccttgggtttggagcagtattcggacttggccagacacaccatgttcgcagtgggagcggccaccgtatacgctgttgaagaagatttcccacgtgtgacggtcaagacagtgccggccggtataacgggattgacatacgagatcgaaaccgccgcgatgaaaccgttcatcacaagcagcgacaccgaggtcatggcagtatcaccggaggagtgatggagctaactagctacagacgcgaactcgtcacaagagtccaagagatggccatagacgaagggcttctcgaccaagaggcattcttccaagtcgtctgtgaaatgttacgcgacagcgaggccatcgctgactaccagcccattgaaccgggatatcgatttggtgagggtacgaaccgattcatggcggtagatggatacgatcaatctgcattcgatatggacgaatccatcgtcgtcattgcatgtgatgactattccaaccgtgttggagacgaacaggtaaataccattcaagccaaagattgcatgcgatacatcaaagccatgcgtcgttacatcaaagccgcctttgatggttccttccttgaacaggcagaggagagcagcgcagcctgggaattcgcctcattcattcacgagcacaagaggggcatctctcgattccgtctttattttattaccgaccgggaatacaccgggcgcgactccagcatcaaggaccccactgacttttactccaaaggtgaggatgagcataaggtcagcctcgaagcccatgtatgggatttgcgccacctcatggaagcatcacaagctgcggccccgctcgaacacctcacagtaagcctcggggccgaaggcattccagccgtcaaggcacccgaggctggtaacaatatggacacctatcttatgttcttgtccggccaaacgctttccagctggtacaaaaaacatggctccaaacttatggaggccaacgtccgttcgttcttgtccttgcgtggaaaggtcaaccgcggtatccgcaacacattaagcacagaacctgatcgatttgtcgcttataacaacggcttatctgcgaccgccagtcgagtcgatatgaacgaacgaggaaacattacggcaatccatgacttgcagattgtcaacggcggccagactacggcatctattttttacagccaaaagaaagacaatctcgacttgtccgcagtcgtagtcccggtcaagctcgttgtggtacgtgaggatattgcccgagaacttgtcccgtacatttcccgatacaccaacagtcaaaacaaggtcgccgagaccgatttctcatctaacagcgagtaccaggtcaaactatcccagctctctcagcaagttctcacgcctccgttacccggcaaaaacccgacgcattggtattacgagcgcacccgcggtcagtatgatagtgaacgaaaccgtagggacactgctgatcgcaagcaattcgaaaagctcaatccttccaagcagcgtatcaagatgattgatgcaccaaaatatctcatgtgttgggacgggtatccccacatcgccagccttggatcacagaaatgtttcgctcgattcgtcgaaaatgaatcaaagaaagggcaagaaagcgtgaaagcgctcgacgccgagttcttcaaacagctggtgtgcaagcggattctcttcgacaccgtgtacaagcacatcaagatggcggattggtataagggggcctaccaaggcaatatcgcggaatatgccgtcgcaaaatatgcactcgatctgaaacggttccacgctgatttcgattttgagacgatttggcgcgcacagcgcatcaacgataccgccctcggacgccttatgaaggccgctgaacaggctagtaatgttttgaacgactcgaatcgttccacccaaaatatcggcgagtgggcgaaaaaagaagcctgctgggatgcactgcggcgacaaccgtcttgtctctatgcggtgcagtccttgacctcaacagtgtctgagacggatgctgtcccagacacggaagaaagtgcgctcgtcgaagcccaacaaaccatcgtgaaaaccgaaaatcccatttctgcttctgctccggtgtcctcatccgtaccgcggcacaaagcatcagagcaaacagaagatgcacgcatagatgattggacaacagcaccagctggattccttcgtgagctacacactttcgctaaagagcaaggcatactcagtcctaaatcagaaacttcactagtggcgctcattgatgacatatcagctggcatcaacaccaacgctctgaattatcttctatcgcgggccaccgaatgcggattccaatacaatccgccaagcgaaaagccaacagcggccaaggaggcaataggggattctcctctgccgaaatcagaacccacacacagtttcccgacgagttttgatcacatgatcgattatcaaagagacttcctcgctgcgatcaccgccgacacttggcgcacaatcctcgaatgggctcgatatcgacatattttaaccaatgaggcactggctgacatcgcaaaaattgacaaacatattcgattaactgaagagcagacccgatatctctggacatggcggcaaaagatgatcgacaaaggattccccgctagccaattcgcaccacgaccaggtacgtattagtcgaaatatcctcttgcgtcgcgatcaagatattcagccaccactttggcgatttgctgtgccaaaagagggggcacggcattaccaacctgttgatattgcgcagttctgttccccataaagtagtaatcgtccgggaatgtctgcaaacgggcaacttcacgcacagtcagactgcggcattgcgtgcaatctggatggataaagtaatgaccatctttgcaaatatgcgaagtaattgtcgtcgagcatcgatccggcatctgcacgcggaaacgatcagcaaagataactttttcccccttagcgacgccttttgcattatcgtgatccggcaacagcgatttgggaaaatcatacagtttagccggcttattatgtttcgcggcaaacgctgaacagaatagataacgctctagatcagccgccatatggttgcgggcatgatggttcaccaataccgtacgatgcttgagatgtccgcggtaccagccacggtaaacattaatgacgcccttttctacacgactcgcatcctgcgaaggagggagggctccacttagtactggttgcaatacgtccgatagatcacggccctcatcagtggcgagaattgcttttgcagcacgacgtacatattcatcccaatcgcaatcaggtttccccttagaagtgaatccactccgtaccttaggaataccggccaacgcatcagaaaccgatacgccctgcctcttctgcaaggtacggggcttgccacgttcctcatcattacgaacaccaagaagaattacgcgatgacgagcctgaggaatgccataacattcagcccttacgatgaaatccttgggggtctcaggctcatcaaccactagagagtgcaacgtgtaaccggcatcctgcatatcttgttcgatatgtgcaaatacgccctgatgacggtgctgagcagaaaggatacctttcacattctccataacgaagattgtaggatgtagttcctcgatgaatcggaggtaacacttgtaaagcgtctgcttaacatcattatccaaggcctctttgttccgcgttctccgtgcacgtcccacaagagaatatgcttgacaaggtggtccgccgataagtacaagtgggccattgtagttatcaccgcaacgagccttcaacttgtccttggccatattcacaaaggtgtcatcaccttccaccaaagtaccttgaacagcttcttcatcagccgcagcccacttatccggatattccagctgcatggcttggaaattgtaagctgatggattatcaagatagttcaggtagcttttcggcaactgcccatcagacttcatgattttacgtacgaacgagcgcaaccgtaaagtgtcatgtgcgttcttttccatttccaccgacatacaaatctggaaaattggattaccggccggatccttgagcgacgaaaaaccctcgccaagccctccggggcctgcgaacaggtcaataatcggtataacgctcacgtcatcctcattccttcaatgaatactctctgtcagcggatggtccaaaaaagagcgtaccaggaatattcagcacgtgatgactaccgctcacatgttcctgactatctgcagtgtccacggaccgcgtcctttcgtagaccaccgcaagcaaccacggcaacgacgctaatgggccaagcgctggcaacttgacgccgccaaaaggctctcagcggcgtttgccggccaaaacctggcaggttgacgacagtggggacaccgatttgagctggcccggctgaccatcaactccgcaagcgtacggcggcggccattccaccgtcgccgtaggtggggtgggtcatgaaggcttggctggcggaggtgtcaccgcacatcaacgattcccacatggttaagcggctcatggagatggcttcaacgccgaggatggcgtcggcgatgtgcgcggcgtagagatcgcggtgcttggcgatcaggaagcgcatgagatcgaggcgcttggtcatgctggtcacgtttgaggaggccggggccgtgcggtactcgatcagcggctcgggggcgatgccgatatgggccgcgtcttttgcgggattctctgtatcccaggcactcccaaaacctccgacatgctcagtaccgccagtaaccccagcaccgcagatatcgttttccaccgtcaatccgcactccaacaacgacaggaagaagtcccagtcctcgaagccgccgcgcatcgactcgtcgtagccgccgcagcactcccacgcgacacggcgaatcatgcacgtggccgggcagcaattatgcgacacgaacgcggcggcattgccaccagtcggctggaccactgattccaggacaccgaaagtctgcagccagccggatgcggcgaccatcgttttgtcggcggacaacatcgacaacgtgcgctcaatgaaggccggccgcaaacggtcatcgccatccaacaccactacgaacggcgtttcggcggcggcgatgccacggttgcgcgcggcggaaggaccggcgtttgcctggccgatgaggtcgatggccacaccattcgcatccatcgccccgtgccggcaatcgtcgagagtggcgttcagcatctcgacggatgcgtggtcatcggacccatcgttcacgatgatgatccgttccggacgaaccgtctggggccaatgacgactcgactgcctcgtgaatcaacgggccctgattgtagctggtaattaccactgtcactgctgccatggcggcaagtctatcgggtccggacgtgggccatccaccggcgctgcgcgctgcctcccgccagtggggaggtggcgcgctatccccggctaacgctgatgcatgtgtgcgggcacgggtttggtgcggactttggtggtgaagtagtcggactcaatcttccacaccgtgacgctgcggacctgcgcatcagtgaattccacattcggcatatgcgcctgctgcgccatcagcgtctgcaagccgtggcggcattcatccagatcctcgaccagtgacgccgtgccattgccgacgatcgacttgaacgcctcaccccaattgcacgtggtgcggcccgccaccacctcgcagtcggtctgcatggtgaaagccacgggcagtcggccaccggcggcggcgcgaatcgcgtcgagcttgcggccgcgcggcgcggagtggaaccagagcgtcagcttgccagtcgcctcgtcgtaatcaaagccgaaattcagcggcacgatagtcaggccctcggcatccgcataggccacttcaacgatgtcgcaggcggcgatgatcgcggcgatccgctcgggatcggtcacctcgcggtccgcacggcgcatcatgcgatgctcgccggcgaccgtgtgctcatcctcacgcttggcgggcttgcgagcgcccgcgatattctccatgctcatgcctgatcatccccatccacaaccgcaatccagtcgccgtagccttcctcggccatgcgcgagcgcggcacgaagcgcagggcggcggaattcatgcagtagcgcaggccgccgcggtcggccgggccgtcggtgaacacgtggcccaagtgaatctgtgtgtccgacgtgcgcacttcgatgcggtcgcggcccggaatgcgatggtcctcatgctcggtcagcaagtcaccggcaatcgggcgggagaacgcgggccagccgcagccggaatcgaacttgtcttgcgacgagaacagcggttcgccactgacgatgtccacgtagatgccgggctcgaatttctcgtcatactcgttgacgaacgggcgctcggtagcggcgttctgcgtgaccgcgaactgctcaagcgtcagatcccagatgcgttccacgtacttctgacggcgttttacgttcgcgattgcggcgatcggtacatggcagtagccgccggggttgttcaccagatagtcctgatggtgtgcctcggccgggtagaagttgcgcagcggttcgaccagtacggccgggcgctgcggctggcggtcgaccagctgctccagagccgccacatacacggcgcgctgcgtctcgtccgtgtagaacatgccggtgcggtactgccggccgcggtcctcgccctgctggtccacggagaacgggtcgatgacctccaggaacagcaatgtcagcgtccgcaggctgacctgtgccgggtcaaactcgactttcacggtttcggccgcatcggtgccgcccgcgcatacctgctcgtaggtcggcgattcgacggtggattgcgcgtagccgaccgtggtgtccgtgacgccgtcgacgttctggaagtagcgctccagcccccagaagcagccgccggcgaagtatgcggtttgcgtatttccgtcattgtgttcgttacgttcgctcatacgccccacgttactacgtcgaggcggctcgcgatgcagtcaacgacacctctgcaccggcaaaaccgctttcgaggggctgatttgacccccgccggaggtctactcccgtttcaaggggctggtcggccgctagaccgcatgtaaaaacccaaccgcgccaacgccattccgccgattttggagcgtgaatacttcggcatcagcccctcgaaacgggagtagacctccgggagagaccaaatcagcccctcgaaacggagatagcgcttgccgcgccctccttgtcaggctttctccgttcaaagaggtacattcgggcttctgcagaatgctatcttcgttcaaagaggccccgaatacgggaaaccccgagtacaaacgttgtcattgcaacgctcatactcgagatttcagagttcaggcacctctttgaaggcagttagttgtccgcaaggggccaaatgtacctctctgaaagcagataccccgtctcaggctcgaatcggctaacctgcgtacccgtgtgcacaccttcacgaccgcagcgtgctgagcatgccggccacttcggcgggcgtcacgctgggcacgtaggcgcgcaccaccgcgagcccgatctgcggcaacgccgccgggtccgggtagcacacgtagaccggcgcctcggtgggctggaacttgcgcttgaagttgaacagcgagtggaagccgtaggcgggttccatccagtcggccacgatctgcagcgcgtgttggagcacctgcgtgccttcgctggccggtgccccgtcctccccggcgttgtcccgatcgggattcatgccggccaggggcgccgcggacaggctcatgaactccacggcgtgcgtgggatcggcttcgccctcgtcacgcagccgctcggccatgcgcgcgatcaggaactccatgatgccgttggggctgtcggtgcgatggcgcatgaaatccaacgtccagccgacgatgcgcccgtcgcgccaggtgggcaaccagctggtgacgcccagcacgcgcccgtccgcgtcgatggcgtaaagcagccgcacgcgcgggtcgcgcagttcctcgacgccgccgagcgtgaacttcatttccggcagcgccttgagctgcgcccactcctcggagatgtcctcgatctgttcgcgcacatcgagcgacgcttccaggaatgtggactgcacgtcggtcacgccgtcgcgcttggccttgttgatggcggtgcgcacgtcctgccatttcttgccggtcgtcttccagccgcgcgggtcgaccaccatttcgctgccgacctcgatggagttccagccggcttccagcaacgcgtcgcgctgttcccgatgcacgccgtagaacaccggcgacagcgaacgttccgcacagtgctgggcgaaaccattcagatcgtccatccattccgccggatcgccgaacggtccggtgcaggtcagcgcgatgccgttgagcacgcgatacgccacggccgatctgcccgtgggggacagccagtagctgttgccttcccacgtggtcatgaagctcatcgattcgccgccggtttcgaccagacgttcggcgcgcgcccgggcccgctcgttcgattcgctcacgtcgcccatccagtggatcaccacggccagcaccacgatccagaacaccaggccgacgccttggtacatgatcgaggccatcggagtgcgcggcacgaacgacagcttcatatggctcaggaagccgatgggcaggaagcgtcccggcagctcggccagcagcgacgaggccgtagcgcgtggcgagaaggtggcgggttgggcgatgccgtatatcaggtatatggcggcgcacgccagccaggccagcacgatggcgccgatgccgccgaccagcctgcaccagccgatgcggatcgggaagtgtttcatcgccgccagcagggcgatggcgaacagcagcgggggcaggacgttcgccacgcaggccacgatcgcgccgtgctgcagcagggaggccatgccgtccggcgcgaagctcagcggcacgaccagatagtaggcgacggcgatggccaccgtgaacaggttgatggccacggtgcagatggccgcgaaccgacgtccgcgatacaggccccacgccagcaccagggtcacggcggtgggcagcaacgagcgcagcaccgcgccgggcatcgaggcccgcaacagatcgaactgcaggaagcatccgccgtgcgtgtcaccggccaggcatttggccagcatgccgttgtcgacggaaaccgggctcatgagcaggccgatcgtgctgagcgggcccgcatggttatgggaggtgatggcgatgaccggccccagggccagtaccacggcgatggccgcgaatatgcgccgcgcctcgaaggaggtgctgcgcagccagtgccattcggcttcgacgtgcgcgggcggaccggccatcacacggccggcggcatggccgatcagcgcggcggcgagtatgcagtagccgctggggttgccgctgtagagcaacgtgaccaggatcgccacatagccgacgagtcggatgcgcctgcgccataggtggctgcagaacgcgctggccgccatgagcgcgccgaccggcaacaccagcgggctcaatgcgaaccgcatgcgggagacgaacagggagtcctggaacatccatccggccgccgcgcacagggtcaggcccgccagcacgccgccggccgcgcaggcgagcgcggtgacgacggtgcgcacacggccgagccatggttcggctatcgacagcatgacgagccacaggacggcgtcgaccatgagttggatgacgccgcgcgccaggaacagcgagcagatgagtttgccggcgttgaatgcggccatgctggtgctgagccgcagcggaaacgcgaatccggccatcgcggccaccagccacgccaccagattcagcgccaccagcgccgccgtggtggtgacggccagccggtggtcgtccgcccactgccgcacgtcaccggccagttcacgccagctttccgccgcatggctggaccttgccgtatgcggtttggtggcgcgggaggtcgtggcgggcttcgtccgcgagggttccgcgtcccgcaggggccgccgcgtctgcggcatggccgccggccgcgcgttcccatgctgttgttcttcgctcattgcaacacctccacttgtgggtattcctccaacgatttcgtcatttcgcccagcccggttcgcgcgccgaaccagtcgagaccggggttccagaccgcctgcaccgcatgccagtcatggtcggcgccgggcacgaccagttcggtggtctgcatgccggccgcg

SEQ ID NO: 260 - DNA, 30987 bp, Unknown
  R101_18m  MAG No. k141_55372
acatgtcctgcgaccgacgccagacacaacggcagcattctgcccaccatagggcgtgtctttaaccagaaagtaccctcaaatacgttcagcaagatatatgcacgcagaacagcccttccgcattatcttatttgacatagagcatgccccttccattccacagaatcaagcaaataaacgagcggagagactggacacaccgcaaaacaatggcccaacccctccgctcgtttgttatggaaggaagagggatgaataagtatgtttacttcactgacttgatgaagacgatcagcaccgcgccaatcagcgagcagaccgctgcaagcgggaagagtgcgtgatagcccaccgaggaaattagcgccgccgcaacatcccacgcaccatattcaggacaaatccagtccgttgttgtccttggctttgctcaccatatcagtcaaatcggggtcgtccacagacaccgcgttctgctgactgagcgtcaacgatagcgagccattataggagtcgccgtcttcgtccttgccggacacgcttatggcaatcgaattcatcagacgctttctgccgtagttcagatccacggtgatagtcggcatctccggctcttcatccgtgccgaaatcccagttgcgcacattatcgagcgcctgacggtactcatcttcagcatcgtccacgccggcatcctcgatttgctgaatcacccaggatttcagatgcggatactgcgcttcatgactgatccagtaattcacgaaatgctgagacaacgctttgatatcgatttggtacgacagctgcgtattgccggcagacttggcagacgatgtcttcgggaacagctggctgcgcacattcttatcttccagctccacgccgaaatattgttggatgaatttgctggcctcggccttcacctcggcagaccttttcgtgcccttggcccggtcgatgtcgttcgagtacccatcgtcgttcatcttgtccagctgatcgtagaacgtttgctccgcgccggtgatgtcccaagcaccgttcttgaccaacgcatccttgacgttcaatatcaagtccgccacatcactaccaacgccgttccttaagtcatcttcatattggtcggccgggtagtagatgtagtaggggtcgtcgtcatgccaaacgaatttctcggcgaatgcgcctttgtaccaagcgaaggtcgttgcatattcgtctgttttgctagtgaaggacgcggaggattcgttggtggttttgcccagcgaatacatgccagacatccgcacgtcaagagaatcgtcagtgatgctgtgggttctgagttcgtatttggtgctgcgcagagtggacagcgagttgatcgcgtcgaaggtgacgaccagcggattggtgggccggaagcccagcatcgctttgacggcggtgaagttggggatgatgaacgccaaggccgccaccagaatcgtcgcaagcaatgcgcagaaagcggcgatcagcttcttactggatttgcgctgcggtgccaggacggcggttgcatcagtcgcctgatatgcggcaggagcgggaatcggcaaagccggcaggggaacggttggtgccggctgtggggcagcggacgcggcgtaaaccgatggggcaaccggcgcggctggtatcgatggtggtaccgcagacgccggcacagcaggtgccggtatcgacgcaggcggtacggctggcgatgcggccggtactggtgccgtcgcaactggtgcgctgtctacagacgctccacatgccgggcaaaatcgtgccggcccatcaactctatttccgcagtggccgcagtacgccatcgtgtgcctctctccctcaaatcggcttgattgccatcgcttcaatgttactcttcagcattacgcctcagccagcccctacgcgtaacgatacgagacgcggcagccttaatgcggttgttttgacgcgatgccaacatcgagctctggccaacgttctggtactcggctacatcttgctgcgagccaagaagcaggccatcgctcgcgccgacgaggccgaatggcggcctagcctcgctttaagcctcaggccagcacctccatggggtgataggtggcggtgtggtggccggtgatggggttccatacccgttcggcgaatgcgcgcagacgggcgacgccctcgcacagctcgtcggcatctccggcgtaggagaggcgcacgaagccgcgcccctcctcgccgaaggcctcgccggggaccacagccacgcgctcttcgtccagcagacggtctgcgaattcaccggagtcaaggccagtcaggcgtacgtccacaaaggcgtagaacgcgccttgcggttcgatcagacgcaataccgggcatccggccagaccgtccagcacgatctggcgcttggcgcggtattcctcgcgcatggcggccacgttatcttgcgggccagccagtgctgccacgcctgcgtattgcgccaaggagttcaccgaggagtgcatgagttcggcgattttgccggtctgttcgatgaccgcttcgggtgccagcaggtagccgatgcgccagccggtcatcgcataggttttcgacaggctttccaccacaatggtgcgctctttcatgcccggcaccgcggcgatcgatggtgccacggctgcctctcccccaagcgtttccccgaacgtttccccaaacacgaacggatggtaaacctcgtcggagatggcccaaatattgtgctgcttgcatacttcggcaatacgcgccagttcggcggcagaggttaccgcgccggtcggattgcccggtgagttgatgattacggcgcgggtgcgcggggtgatcgccgcttcgatgtccgccgcgttcacgcgcatgccgtgctccggacgcagcgccacggtgaccgggcggccgccgcacagcatcacttcggcgtcataggaagtgaagaacggcgagggaataatcacttcatcgccggtgcccaccacggctttcagcgccagaaacaggccaatcgtggcaccgtcaacggcttgaatctcggtttcgggattataagtaagtcccttcacacaggcggagtaatcggccacggccttgcggtattcggggatgccaagcacgttggtgtaccgagtgcggccagcctgtgcggcctcgcaagcggctgccacgatatgtggcgcggccgtggcgctgggctcccccacggtcagtgaaatcgcgtcaggcacgcgctctacacggtcgaatacgtctcggatgccggagcgcgggatattcagggcttcggcggacaggctcgcgggctcggcggtcggcacagcaacccgaccggcagcaggcatagtagcaggcgcagcagcagatgcaacttcggacagagacatgttggaaaacttctgcatatcatccctcctcaatggaattatttcatcgttctcttatttcaaaaggaattattacatccaattaggactttaaacgtaaacattccaccacacaacagaaaacacaggaagaactactgaaattaccaggcaaaatcggaaagccatcgcattccggcaacaggtacagtgaacacagagcacaacgaacggagaagacatcatgaccgcgattgacgagaccgaccagcgcatcctcaccatgctggaggccgacggccgcgccacgctcgcgcaactggcccaggcgaccggactgtcagtctccgccgcccagtcgcgcgtgcagaagctggagaagcgcggcatcatcaagggatacaaggccatcatcgaccaagagcagcgcggcttgcccatcagcgcgttcgtcaacgtgaccccgctcgactactcagccgaatcctcgattccggacaagctgaacaatatcgacggcatcgtctcctgctattcggtggccggcgcccccagtttcgtgctggtggtgcgcgtggcttcccctaccgcacttgaagaactgctcaatctcatccaccgcacggtgccggtaagcaccgagaccacgatgattctgcagacctacttcgcacactgaccgcgaacccggtaacctgcgcgccgaagacctgcggccacacaccccacaaaccccacaggtcacaaaaaccatacgaccccacggtccagccacaccccacaaaccccacagaccgcacgatccccaacagacacatctgacatcacccaagtccgcctttatgtccactatatgaacgtgcctccggtgtgatgcggcttccatttcgacccgattcacgcatagacagacatccaacaatcgcccgaaaaatctaacaaacggaaacttgagccactccataaccacgccgaaagctttcccgttatccgagcgagactctatgcagcaagggcctgcgcgcatagaataaaaccgtcttaattccctaccaaatcgaggagaatcatgctcactgacgagtacatcaagcgtgtctacgaccaggtcgttgcccgtgacggcgatcagccggagttcctgcaggccgttcgcgaggtcttcgagaccctgcagccggttgtcgagaagcacccggagtacgagaaggccggtgtgctggagcgcatcgtcgagccggagcgcgccatcaagttccgcgtggcctgggttgacgacgagggcaaggttcaggtgaaccgcggctaccgcatccagttcaactccgccattggcccgtacaagggcggcctgcgcttccacccgaccgtgaccgagtccgtcgtcaagttccttggcttcgagcagattctcaagaactccctgaccacgctgccgatgggcggcggcaagggtggctccgacttcaacccgaagggcaagtccgacgccgaggtcatgcgcttctgccaggccttcatgaccgagctgagccgccacatcggccagttcaccgacgttcccgccggcgacatcaacgtcggtggccgtgagatcggctacctgttcggtcagtacaagcgcatccgcgacgagtactccggcgtcctgaccggtaagggtctggaattcggcggctccctggcccgcaccgaggccaccggttacggcgtgtgctactacacccaggaagccctgcgcgtgctgcgcaacgactccttcgagggcaagaccgtcgtgatctccggctccggcaacgtggccacctacgccgctcagaaggctgagcagttgggcgccaaggtcgtcaccgtctccgactccaacggctacatctacgacccgaacggcatcaacgtcgaggtcgtcaagcagatcaaggaagtcgagcgcggccgcatcaaggaatatgccgagcgcgttccgggctccgagtaccacgagggcagcaagggcgtgtggaccgtcaagggcgacatcgctctgccgtgcgccacccagaacgaggttgatggcgaatccgcacagaagctcgtggacaacggcgtgaccgtggtcgtcgagggtgcgaacatgccgtccaccccggaggccatcgaggtctaccagaagaacggcgtgctgtacggcccggccaaggctgccaacgccggtggcgtggccgtctccggcctggagatgagccagaacagctaccgtctgtcttggaccttcgaagaggtcgacgccaagctcaagtccatcatggaagagatcgtcgccaactccctggccgccgccaaggaatacggtcacgagggtgacctgatgctcggcgccaacgccgccggcttcgtcaaggtcgccaacgccatggttgcccagggcgtgctgtgacgcttgcctctgagcagtactaagcagtagcgtaatgcccttgcttcccgtgaggaggcaagggcattgctatatgtacaacgagcaacaagtgctatccccaaatacgtaagcccgataacaacttagcttccacctccataaccccggaactcaccaccgtcgatcagcacatggatcagcgcggctggaccatggccgacgtggtcatcaaagccatcaacggagtctcttcaccgcgcgtgatgcacctgaacaccgatttggtggtgcgtgattcggcgtaattgccacgtggctgtcggcaggactctagataccgcgtcacaatcacccagtaatgcatcacgcagtgtataactcttccgcggaaacgaacaccattcgttcatcatccatgtagcgggttcgcgtggactcactcaccggattcttggtgaacagcataagccacgcattacctgcctgatagccgcggactaagccagcacgctgatggagcttttcaatagcctccgtttcgttgaatgaattacgccatttgcattcaccgaacagaatcgttttatcgagcgaatccgcagcaatcacatcgatatcggtttgctcgtgagcaatcggatcattgccccaccatttgccgaactgagtggcaacaaaggggaggttgcccatagcgttgtttcgaataagccattgcaggcaaatcgtctcaaattgttgaccaacataggtatcaaacgctggtccaaaagcgagtctgctcgtaacctcctcgctgatattaccatccaaaatgctcatgttgcgccccacaaagcggaaccaatatgcaaagaagggatcgctcaccacatacattcccttgcgcgatttactcggatcttcaccaaacggcacttttcgctcaattaagcgcaaatcgaccagcgttttcagatatgctccaatcgaatcagatccgacacccgcatgttcagcgataagctttggcgaggaattaccacccgcaatagattgcaatatcgaataatacgatgccggttcacgaagctcctgacgcaacagcatcataggttcctcacgcagtacgcccaagttgtcgaacatcaagcgcagcacattggattcaaagccatcggcttcctgtatacgggccagataatatggcgtaccgccgaaagtcgcatagtattggaccagttcttgcggagatgtgttcgttaggaattttgccgcatccgcatagtcgaatggcaggagtcgaatctgtgctgtacgacgcccgtatagcgggcttttacgccccaatacgtcgttttccatgaatccctcgttactaccggatagaatcatcgtcacttttgtggcgaggaatccatggtcaattgctatctgcaacatggagggtaatgctggctcggcggcagctgcataagggaactcatcgaatacgaacaccatacgttcgtcagtctgtgcagcacgttcagcaacaaacgataacgcatcagaccacccgccaaacgacggggtggaatccggcataccaaagaacgacaatgccgctcttgagaaatcttcaagattcatcttggcgctttgctgtatggccgtgaagtacagcacgcgtttatctttgacaaattcgtcgatcaacgccgttttccctacacgccgtctaccgtacagcaccaccatttcgaacgaatcactggtaaacagcttttccagcacttgtaactcgtgctctcgtgcgacaaacattgcagccctccgatccgcttaccgcccaataataagagtatcatggttaatgtaatcacgattaccttaattatgatactgataattgttgccctaccgcgaggaggatcttccttccgctgtcaaaacgaaagcccaacagtccagactgacgagcagcaacatcggcagatcaaccgctgacgccagccagcctgacagcacaaatcagcctgattgcaggcatataggcactagttagcgaaaccggctcttcgcattttggtgcgtaggggccgtgcggtttgattcggtgtgtgattgaaaaagtgaatgaaaccgcacggcccctacacgccaaaaccggaagagcccataaagtcccctcagtagcgccaacctgccagtcctttggcggaaccacaccacatagaccttcctcaacggcgccaagctgccacacgctggcagaccaacaccgctgtgtgcattctctgcgtcggcggcagtccaaaacttggcccagcaacgacgcttgctgtgcccagcgtcggcagagggccaagaattggacgcaaacgacacagaacacaccctcagcgtcggcagaactccaagatctgtaccgctgacgacggtaagccctccacagcgtcgtcagagatacaaaacctgtcccaacaccgacgcctgccacccccagcgtcgccggagtcccaagtctcggcccagcaacgacgcctacgaaccccacacataagaaaccgcacctccgatcatcgaatctgaattacttcagtccaacaaccggggtgcggttcactgaggggagttctgccagtatagctatatcagtcgtcgccgagcgtgacgtgcacgccgccgaccagcgagctgaccacgttgtagatcagtgccgcaatggtggccagcagggtgaagatcaccacttcaacaatcgagaagatggtgacgccggagaccacggtggtaagggacaacacgttcttgagatcgaaaccgcctgcatcaagaccggtggaagacacaatctgcgtaatctggctgaatacaccgaccacatcaagcagcacccatacgatcgcggaggcaacgacctgaataatcgccacggcgatggacagcatgaacgtcaccttggccacggaccaagcatccacgcgggtcagcgacaagctcatgcggcgagccctgggggcgctacggcgaggtgccggacgcacgggagtggcggcacctgaagaaggcaacgtggattcttccggatcgctggacacggagcgtgccacgcggggagcgtgctcagtaccgatcagcggctcgacatgatcgttctgcgtattgccgactgccggcggtatgatccggggctcgttgtcttcgagattctcgctcatcgtttctccttaacaggcttggcggtagcctctgctgtatgcgaggctaccagcttttcaggacgctgctcacgcctcgtccgcgttgttcacattctcgccggattgtgcggtctcggcggtgccgttcgccgcggcatcgccactgtcctcgggctcgtccttctcctcgttacgggcgatggagagaatcgtgtcgcccttgtcaggcttggcgaaggtaacaccctgggtgttgcgcccggtgcgcttgacctcgtccacgttggaacgaatcaccttgccggacttcatgatggccatgacctgatcgtcttcggacaccacgagcgcgccgaccagggcaccacggccctcgaccagttgcacggccttgatgcccaagccgttacggccctgcagacggtattcgctgatggcggtgcgcttggcgaagccctcgttggtcaccacgaacaggtccttgtcggagtcgccagggaccacatccatggccagcaggctgtcgtcgttacggaacttcatgccctgcacgccggcggtctggcggcccatcggacgcagctgctcgtcgtcggcctggaacttgaggctcatgccgagcttggagaccaggatgatgtcatcctcggcgttgcacagcgcggcaccgatgagctcgtcggcgttctcgccattctcgtcggccatgaggcgcacggcgatcaggccgccctggcgcggggaatcgtactcggccagcggggtcttcttgaccttgccggaacgggtggcgagcaccaggtacttggccacctcgtagttcgggatggacagcacggtctggatggactcatcaggcgcgaactgcagcaggttggccacgtgctggcccttggagtcgcgcgaaccctcgggcagctcgtaggccttgatgcggtagacgcggcccttgttcgtgaagaacagcagccaattgtgcgtggaggtcaggaagaagtgatccaccacgtcgtcctcgcgcagcttggtgcccttgatacccttgccgccgcggtgctgggcgcggtattcgtcggccttggtgcgcttgatgaagccggagtgggtcacggtgaccaccacgttctcttcggcgatcaggtcctcgacgttcatctcgccggagaacggcaggatcttggtgcggcggtcgtcgccgtacttggccacgatctcgtcgagctcatcgccgatgatcttgcgctggcgttccggcttggcgaggatgtcgatgtagtcggcgatcttgcgctgcaattcctcatgctcggccacgatcttgtcgcggttcatgcgggtcagcgtgcgcagctgcatggccagaatggcgtccgcctgcacctggtcgatgtccagcagccccataaggcccgtacgtgcggtgtcggtgtcttcggaggcacggatgagggcgatgacctcgtccagcatgtcgagggccttgagatagccctgcaggatgtggtcgcgctcttcggcctcgcgcttcaggtacgcggtgcggcgggcgattacgtcgagctggtggttcacccagtggcggatgaaggcgtccaggctcagcgtgcgcggcacgccgtcgaccagcgccagcatgttggcgccgaaggtctgctgcagctgggagtgcttgtacaggttgttcaggaccaccttcggcacggcgtcgcgcttcaagaccagcacgaggcgctggccggtgcggccggaggtctcgtcgcgcatgtcggcaatgccctggatcttgccgtcgcgcacggcctcacgaatggagacgacgaggcggtccgggttgacctggtagggcagttcggtgaccaccaggcacatacggccgttgatctcctcagtgttgaccacggcacgcatggtgatcaggccacggccggtgcggtaggcctgttcgatgcccttgtggccgaggatggtggcgccggtggggaagtccggtcccttgatgatgcggatcaggttttccagcagttcctcgcggctggcgtccgggtggtcgagcgcccagtggacgccgtccgccacctcgcgcatgttatgcggcgggatgttggtggccatgccgacggcgatgccggcggaaccgttgacgagcaggttcgggaagcgggccggcagcacggtcggctcctgggtcttgccgtcgtagttgggcacgaagtcgacggtgtccttgtcgatgtcgcgcaccatttccatggccagcggggccatgcggcattcggtgtaacgcatggcggcggccgggtcatcgccgggggagccgaagttgccctggccgtcgacgagcatgttgcgcatcgaccaggactgggccatacgcaccaaggtgtcgtagatggcgaaatcgccgtgcgggtggtacttacccatcacgtcgccgaccacgcgggagcacttgttgtagccgcgatcggggcggtagccgccgtcgtacatcgcgtagatcacacggcgatgcacgggcttcatgccgtcgcgcacgtccggcagggcacgctcgacgatcacggagagggcatacgccagataggactcgcgcatctcctgctgcaggtccttgcgctggatgcgttcgccggtatccatcaggccgtagtcggtggtgtccgcctcctgcgggctcaacggctccatcgagccgtccggcgtgaactgctcgtcgccggtgttgttttcatctgccactgttgttcctttagttgtctaagtccgttgtgtacctccctctgacgagggaggttggaggattccgttacgcatcgatccaacgcacgttcttggcgttgcgctggatgaagaggcggcggggttcgacctcatcgcccatcagcatcgagaaggtctcgtcggccgcggcggcgtcctcgatgtgcacctgcttcagaatgcggtgctcggggtccatggtggtctcccacagctcctggtagctcatctcgcccaaacccttgtagcgctggatgccttcgcccttgggcagctggcgtccgttggccttgccttcggcgagcacgcggtcgcgctcggcgtcggtgtacacgaagtcgtgcgcacctttggtccacttgagtcggtacagcggcggcatggccacgtacacgtagccggcggtgatcatcgggcgcatgtagcggaagaacagcgtcaggttcagggtggcgatatgcgcaccgtccacatcggcatcggccatgatgatgaccttgtggtagcggaccttggagatgtcgaagtcctcgccatagccgccgccgaccgcggtgatcagcgattcgatggtgtcggacttcatcatgcggtccaagctggcacgttcggtgttgaggatcttgcctcgcagcggcaggatggcctgcgtgatcgggttgcggccctggatggcggaaccgcctgcggaatcgccctccacgatgaacagctcgcactcttccgggttggaggactggcagtccttgagcttgtcgggcatgccggcggactcgaagatggacttgcggcgggtgttctcgcgggctttcttggcggccagacgggcgcgggaggcctcgatggccttctggatgatgttcttggcctcgttcgggtgggcgtcgaaccagtcgccgagcttgtcggtcatcacgcgctgcacgaaggtcttggcttcggagttgccgagcttggtcttggtctggccttcgaactgcgggttggtgagcttgacggagatcacggcggtcaggccttcacgcacgtcgtcgccggagaggttctcgtccttgtccttgaggatgcccttgtcacgcgcgtaacggttgaccagcgaggtcagcgcggcgcggaagccctcctcgtgagtgccgccctcggtggtggaaatcgtgttcgcgaaggtgtgcacggcctcggagtaggcggtggtccactgcatggcgagttcggcggagatgccgagcttcaggtcttcggcctcgaagctgatgacgtcctcttccaccggcgtggccttgcgcaccttgaccaggtagtcgacatagtccttgatgccgttgaggtactggtaggtgacggtctggtgctttgcgccgggctcgtccgcggcgtcgccggccacctcgtcgccggcctggtcattctcacgctcgtcggtcaggctgatcttgaggcccttgttcaggaaggccatctgctggaaacgggaacgcagcgtctcgaagtcgtagatggtggtctcgaagatcttcgggtcggcccagaaagtcacggacgtaccggtggactcgccttcggtcatcggctcgccctgcttcaagggcgcggtggggtgctggtcgatgtacgtctgggtccagtggaagccctgacggcgcacttcgatgtccacgcgggtggagagtgcgttgaccacggagatacccacgccgtgcagaccgccggacactgcataaccgccgccgccgaacttgccgccggcgtgcagcttggtcatcacggtctccacaccggagacgccctcgccgggcacctcatcgaccgggatgcctcgaccatcgtccaccacgcggatgccgttgtccggcagaatggtgacctcgatatggctggcgtatccggccagcgcctcgtcgaccgagttatcgacgatctcatagaccaggtggtgcaaaccgcgcgggccggtggaaccgatgtacataccggggcggatacgcacggcctcgagtccttcgagcaccctcagatcggaggcctcataatgctcgggggccatggattcgtcaagttcgccttcggtcaattccgcattgttgatgcgttccgcagccgccttcagctgctcctctttgctggtttcgtctgccaacaggcttccttccgtgactacagggtcaacctccgtcatgaaggtcattcacggaggcgatatggcttacgaggcccgtaaagggctcttctggccatttgaccatactgcatgtgattttactcgtctaacccgacgagcgccatagcgaggcttctgcgaatttgtttggtatcttggctaccgccgccgagcccatttgcgcgtgtatccggcggccggtccggtcacgcgaatctcggcgatggtcaatcctttgagattgcgacggatggtatcggtaagttgggggataaggtaggtcagctgcgtggcccagaccgtggattcggcacggatggtcagtacgccgtccgtgaaatcggcgactgccgaatggctggcgatggcctgccccaccacttggtcccaatggttgcgcaattgcgcaagcttcatattcgccgtccagacgccgttgccggcgatggtggtcatcacgctgcccagttcagccggatcgcgccccggtttgccgaagttttcgatggcctcttcacggcggcgtctgtagtccttcaaggtcgccccgcgacgggagagccgctcgaatatttcggccggcagtttggtctcgtccaggttgagttggcgggcgatcggcgggttcatgactctttccgttctacggacgcgctgtccaccgcgggttttccgtcatacttacccaaactctcgttttcccgcgaatcggacaaattgcccagagttggcagtattacggaagcgggttcggccagtgtggccacgtcgatacgatgggccgattcatagtcgggcacatcgccttcagcggccacggtaatcagcacctgatcctgttttctggcgaaatcaagaatctgcgtgcgccggctgtcgtcaagctgggcgaacacatcatcgagaatcacaatcggctgcaatcccaaccggtcacgcacgatttcaaacaatgccattttcaaggccaacgccatcgtccacatctcgccgttcgaagcgaactcgcgggcgggaataccggccaactcaaggttcatgtcatcgcgctgcggaccgataaggttcacgccgcgagccatttcaccggggtagatgcgttgaaaatgctcgctgatctgcggatgtggatcgtcgaacatcagcgcttcgtcgaatgaaggcgcatatgtgagcgtcacctgctcgccggcaccggccaagtcggcgtaaatcgcggcaaatggctcggcaagcagaccgatcacatgagcgcgcatacgggtcaacgccacaccggcttcgatgaactggccggtccagatttccaaaccgctcagaaccgcatccatcggctggccattgttgacattggcattcaattgcttcaacaatgtggcacgctgtttggcgatgcgcgtgaactgttgcaacgtctgcatgtatccgggctcgagcagagccgcagcctgattcatcatgacgcggcgtgctcccggatcgccggacaccaatcgctgatcttcgggagtgaaggaaacgctgggaatcttgccaatgatatcgcgcagatacagcgacgaccccgagttgatgcgggctcggttggcaccacgcgcatgaatcgacgcttcatacgtagtggtttgaccggcatcatcagcgacgttcgcgcggatggtggccgtggtctgcccgcgttcgatcagcggcaacgtgctggacgtgcgatgactcgatccggtggacagcacttcgacggcttccaccagattagttttgcccaagccattcttgccgaacaggatattcacgcctggtacgaaatcgaccactacttgactccatgagcggtagtggtcgagtgcgagacgggagatgtgcattagcgaatcgttggaaattcagggatttcagttgttaaagcgcatcggcacgagcaggtatcggtagtccatggactcgtcggaatcagcttcctgctggccgttgaactcgaccggcttgaccggggtcgtcatcttgatgcgcacgaatggttcggtcacggcggacagaccctccttcaggtaggacgggttgaatgccacggtgatgtcgtcgccatccatgtcgatgtccagtgtttcgttggcctgggcttcgtcgaccgatccggcggacagcgccacttcctgaccggtgaaggtcatgcgaatcggagcattgcgttcggcgaccaaagccacacggctgatggcgtcgagcagatcctgcttgttgactacggcctgaatcgggtattcgtcggcgaacaggcggtcgaccgccgggaattcaccgtcgatgagctgggaggtggagacgcggccggcgttttcgaagccgagcagcgtcgggctatcggcatcgaaatcaaggcggatgttctggtgctcgtcaagagcacgggccacatccttgagcagggagccgcgaaccagcgtggtggtgtcgacgtccgggttctgcggagtccaagtgaaggtggcgcgggccaaacggaagcgatcggtggaggtcatgacgaccttgtcgccttggaattgcatgcgaacgccggtcagtaccgggcggttttcttcgcgggagacggcaacgcatgcctggttcactgcctgaacgaaagtcggggcatcgacttggccgagcatggccggtaccacaggcagatccgggtactcggtgtcgggcatgagctgcaaggtgaacttcgacttgccggacgtgatggtcagcgtggagccgtcggtgaccaggtacgttttctccgaacgcagcgatttggtgatatcggccagcagcttgccctgaaccagtatggaaccggcttcgtcaacgccggcttcgatgtggtggcgagcggaaatctcgtagttgaaggcggagaattgcagcgttccgtcaatggcttccagcttgacaccagcgagaatcgggttggagggacgtgcgtcgatgactcgggaggtccaggctacggcgtcggccagggctgcagtatcgatttcgactttcatgtgtgattgttcccttcgtcggattggctgagaaatattctagccgttaggtggcgaacttacgtacgatgggtgactggctgttactgtggcgatgatgcttttcacgtaactgagtaagtaatcgtcgtaataaggccggtggatagtgtggataagtaggggtgagccctacaaatgcaacggttcataagtccctgaaaattgtggacaaattctgcatggcttgtggataagtgggcgagttttccacagccagttcgtcgaatttgagttttccacatcgaggtcgcggttatgcacgagttttccacaacaaaacagtgggtaatccacgagttatccgccgagtttacccacatctgtgcacatctatgtggataactttttttggttttcgcactttcgcacggcgtgttgaagactgtttttcgtcgaggagaatcgattctggagaccgttttcggcacttttttcgtctcgctcgcccaaacccgcaaaatcggtcctcagaatcgattctctcgtttcatgggttttttgcgtgttccccttcgaaactcccctcagtcgtctgcgacgacagctctcctcacaaaggggagccatgaggaatctgatgtctcgaatccgttgcctcgacgtatccaccagaatccgcctgagcaaccaaaaacggcacttttcggactgactttccgaaaagtgccgtttttcgtctctcagaagcgttgtgtcagttggtgttgctttgcttgaggcgaaccgtgagctccataacgtagttatagatctcctgtttttgctgcattcggtcactgattcgagtgcaggcatgcattactgtggtgtgatcgcgcccgccaaagacctggccaatatccatcaggctcatactggtcatttcgcgagccagatacatggcgatctgacgaggaacagccacgtttttggttcgtgatttaccgacaagatcctcaaacgtcaggtggaagtacttcgccacctgactgatgatgtccgtgggcttgatttccacatcggtggtgaagaagtcctgcaacgtctgctcggccaaggcgcgggtcaccggctgattactcagcgaggccacggccgtaacacgggtaagcgcgccctcaagttcgcgaatgttctcggtgaagcgttcggcgatgaggtccaacacatcgctggggattttcgaaccgttcatcgaggcgatcatacgaagaattgcgattcgggtctccagatccggcggcttgacgtctacggtcaggccggattcgaagcgcgagatgagtcgagcctcgaaacccttcaaattcttgggtgccacatcggaagcaatgacaatacgcttatttgcctgatgcagtgcattgaacgtatggaagaactgatccaaggtggcttccttgccgccgaggaactggatatcgtcaataagcaacacatcaacctgtcggtatcgacggttgaattcagcaatctgaccctggctttggttcgggttttgcagcgcgtcgatgaattcgttcgtgaattcctcagacgtgacgtatcgaacctttagcccgggatccttgaccagtgcatagttgccgatggcgttcagcaagtgggttttgcccaggcccgatccgccatagatacacaacgggttgaaatcctgaccggaaccttcggccacggccagtgcgaccgtacgggcaaaacggttggaatcgccgggcacgaaggaatcaaacgtgaagttcttattgagatgagtctcgggatcgcgattcatcttctgctgaccgaccgggaactgcgactcggtggcgggcatcggttcccgcggtgcggctaccggctttgcaccataggattctttaccgaactcggcgacggtcggagaaatttccgaaggatatggctgcgccggctttgccgccgaaagcggttcgggctcggttttcggcacgaccttgaacgcgggaaacatattttcgccggttaccgtacgcaatgcctgaagcagggaatcgttcaaatcaccctgaatggcttgaagcgtatcgttgttgtccacacacagcacgatggtcgaaccgaagacgccttcaggaacaacgccttccaaccagcctttttctcgtgggctgagcgaagcgctgtgtttgagcaccgtcagcgtgtctgaccagatgtgggcggcctcaattacggggtcgccggaagcgttaaccatggtggccccttctatcggtgtggcgaaatctgtacaacagataatatttactctggtttagacaagttatccaccgtgtcgcgtgttgaaataactggattgtgaataacaaacatgtaatttgtggataacttttggccgtgaatggttggtattccgccgattataagagatttgagacgtgtctcgcaacgtgtcgaaatgtgaaaatactccgtccgttttgacttgagggtaggggtgagagtactttggtatagcttgactcacgtgagggcagcgcgaagcgttgccgaatagacctaggagcaatggattatgaagaggacgttccagccgaacaaccgtcgtcgccacatgaagcacggcttccgcctgcgcatgcgcacccgttctggccgtgcggtgatcaaccgtcgccgtgccaagggccgcaagtccctctccgcctgatcattccgatcagtgccacaggcatagtcgaggtggagcggcttcaaagccatcgtgatttcgtcaccgtgctgaaacgccggcgcaaagcaggtggcaaggatatcgtcgtgcactatttggtgcccgacgaccatcatgatgatgacgaccggacggtgcatcgccgtttgggattagctgtctccaaatcggtaggacatgcggtcacccgtaatacggtgaagcgtaggtttcgtgtattggccagagcccatgaggatctgctgcccgcgcattgcgatatcgttttgcgcgccaagcccagtgccgcgaccgcatcgttcgcttcgctagatcagcagatcgcgaaggcttttgccacagtggcgcataaggtggctgaggcatgacagcttctttcaaggcggtgatgattggtggggtgcgctggtatcaacagcacatctcggcaaacacaccgccttgttgtaagtattatccaacgtgctcgaattatgccattgaggcattggaacggtatggcgcgttcaaagggggagtgctcgccatgctgagattactgcgttgccggccgtggagtcgtgggggaatcgacgatgttccacaacggtattccattttttacagattttcgtggtcgaaggctcatgaagagccccgactgacaccattggccacaacccaaagagaggcccaacgatgaactcaaatgaatttctgcttgatagcgggttttggggatttctatataaaatcctgactcccgttgagtggttgcagacctggatcatgaagatcgtgcatgacttcttcgcgatgctgggcatgagcccgattggtgtctcatgggtgcttgccattattatcctggtgctggtggtgcaggcgtgtatcttcccgctgttctgcaagcagatgaagtcgatgcgcaagatgcaggcgttggcgccgaagatgaagcgcatccagaacaagtacaaaggcaagacggatcaggcttccaaggaggccatgagccgtgaaaccatgaaactgtatcaagacaatgacgccaatccggctggctcctgcttgcctatgctcattcagggcccggtgttcatgtccatgttctatacgctgtcggccattccctacattgccaacggtaaacgcggtgcgttgggcgcgttcgacgtagcaaccgccaagcaattcacccaaaccgatgtgttcggcattgtcagtgtgaccgataacttcacccgcgcatctactgcaggcaaggtggtcatcggtaccttcgtgttcctgatgtgcttctgcctgtggtttatgcagtacttcaacatgaagcgcaacatgcccgccgcatcgatgaacaaacaggccgagaccatgcagaaggctatgctgtggctcttcccggtgatgtacatcttctctggtgccaccatgccgttcgccgtgctggtctactggctgaccaacaacgtgtgcaacctctgccgcacattgtggcaggtgtacgcattcccgacccctggctctccggctgcggcggacaaggagaagcgcgatcatcgtaatgagaatgctcgccgcgcaaaggccggcctgccctctctggaagaagaagcattggccaaggccaaggaagaggctgagcgtaaggccactcagggctatcagcgtcaacagcccgtgcgtaagcgcaaaaagaagtgacgaccatgtcggtgcgcgttcgatgtttcacgtgaaacattcaacacgcaccgacattactttctctgttcgggggagcagggcttagacttggaattcaaacacgacatgaaggagtagcgtatggcacaggatgacgtgaagtcgatcgatcagctcaacgaagaggctgacatcgccgcggattaccttgaaggcctactggatatcgccgactatgagggcgacattgagatgggcgtgcgtaatgaccgccccaccgtgcaaatcgttgctgatgacgataccgacatcaaacatcttattggccataatggtgaagtcgttgatgctctgcagcaattgactcgtctggctgtacagcagaagaccggcgagcgttctcatctgattgtggatgtcgacggtttcctgaagcgcaagcgtcagcacctccgtgatatcgccctggatgccattgacgcagtgaaggattccggcgagccgtatgatttgaagccgatgaattccttcgaacgtaaagtcgttcacgatgtggttcgggaagaggggctgaagtctcgctcgcacggtgaggagcctcatcgttacgtgacggtgtatctcaagaacaaaatcgaggatgttgccgaagacgacgagcttgatcaggagtaataggtcgacgagtttttgagatgacaaggacgttcaacggatgtcgtctctaaacaaacaagagtgaccgtagggagaatggcgtcgtaatgagcgacgccttttccatgttgattgtttcacgtgaaacatggtgagggagatggctatgacggatcagctgcaggggtcacctgtacttgctgaggtcttgggtgatgcgttgccgaagttggagcgtttccatgccaagattgccgaagagggtgaacctcgtggattaatcggcccccgtgacgtcgatatcatttgggaacggcatattctgaattccgctgcgattgtgccgtacgttcggaatgtgacgaatggtattcgcttcaaaacagttgccgacgtcggcagtggtggtggttttcctggattggtggctgccgcgtgtttgtctgatcatgacttcacgctgattgaaccgatggagcggcgaatcgaatggttgcatgaatgtgttgacctgatgcaactgcagaacgttgagattatccgtggacgctccgatgccgtcatccagcaggtacggaagcgggaaattcatccgttcgctgttgtcacgtgtcgtgcggttgctcctatgaccaaactctctggctggacgttgccgttgctgaaaccgtcgggacagttgatcgcactgaagggacggtctgctcaggctgaaatcgacaaggctggcaaggagattgcaaaattcggtggtcgtcgtccacgcgtcgttgaggcggctgtcggaccggatcttgagcctacccacgtggtgattgtggataagcgatgagtggagtactgattgagttatccacatttccatatgtgcgtaaaagttatccacatttttacgggacgatgtgcagaatgatgaaaacactgatttttcaatgtttttcgtctgcgaatacataatctaacactcaacgtcattcacacttatccacacttatccacattgcatatcgcaattgtggataacgagcatcatgtccatacgaatgagaacactggaacttacgtctgtgcaaggaggagcgatgtccaccaaggatcatcagtcggaacctatagaatcggcttccgaaacgcttcagcgaatattcgatggtcacggttcagtgcttggcagccagatggctgatgaaagctcacgctacgatgtactcaagaaaaccgatttccccaaacctcaacgtacccgtcgtattgccgtggccaaccagaaggggggagtgggtaaaaccacatccacggtaaacaccgctgcggcgctggcgaacaagggcgcgcaggtgttggtcatcgatatggacccgcagggcaatgcctctacggcgttgggtgtatctcatgcatcgggagagccctcggtctatgacgttatcgaggggcgttccgatctgggtgatgttatcacggtctgtcctgattttcccacacttgatgttgtgcctgcatcaatcgatctcagcggtgccgagttggaagtggctgatctgcccaaccgaaacacattgttgaaggaggccttggacctctacctgcgtcaatcagataaacactatgattacgtgttcattgattgcccgcccagcttgggcctcttggtcatcaacgccatgtgtgcagtgaccgagatgctgattcctatccaggctgagtattatgcattggagggtcttggccagctgatcaacacgattggtttggtgcaggagcatttcaatccagtactgctggtgtccaccatgctcgtcacaatgttcgatcgccgaacgctattgagccgtgaagtatataacgaggtcaagggacactatcccagcattgtgctgaataccaccatcccgcgttcagtcaagatctccgaagcgccgagtttctcccaatcggtgattgcctatgatcctcgtggcataggtgccatatcgtatggtgaagcagctttggaaatcgcacagcgttcgcaacaagtccttgacaccattgatgcgaggaggaacaagtaatggcatcaaaatcacgactcggtaagggccttggcgctttgttccccacattgccaggggaggagccagtggcggagcagcccgcaatgattgaggaggattcgtctactccggcggccactgctgacataacccccgccaagaaggctactgcccagcaggaatcaaagcctgccgcgcctcagatggtatcgtccagcaaagcagccaagaaagccgccggtaaacgcgcatccatgcccgcattggacaccattactcatcctagcgacctgtttttcggtacggagaaacctcaaaccggtaaggtcgccgcacctcagcagggcggcaagccgtctgcgtctcagacggcacatcgtacatccgtcactgtcaaagatgtttcacgtgaaacatctcagactgcatcggcggcaaagaccgctgacacagataagaaggacgagctcaagccggtagccggtggttatctggctgaactcaaactgtctgatatcgggcccaatgcacatcagcctcgtaccatcttcgacgaggatgagttgaatgagctgtctgcttccattaaggaagttggtgtgctgcaaccgatagtcgtgcgcaagcgtccggcaagccagattgctgcggccaaagccgccaagcacgacgagacggaatccagcacaaatccgtttgccggtcatttggacagcccgtatgagctcattatgggtgaacgccgttggcgtgcttctcagttggctgggttggagacgattcccgccatcgtcaaaaccactgcggatgatgatatgctccgcgatgcattgctggaaaacttgcaccgtgtggccttgaatccgctggaagaggcggctgcctaccagcagatgattgaagagttcgggttgacacaagtacaactgtccaagtcggtgtccaagtctcgcccgcaaatcgccaataccttgcgactgctgaacctgccggcctctgtgcaaaagagagtggctgccggtgtgctatcgtccggtcatgcgcgtgcgctattgggcctgagcgatccggaggaaatggacaagctggcttctcgtattattgcggaaggtctttctgtacgcagcaccgaagaaatcgtcgccatgaagattgcgtcgggggagcagccgaagaagcccaagacgtccaagaccaatccttgggttggttccgccatccagcagagtttggaaaatcatttcgacaccaaggtgtcgattaagggcagcaccaagcatggtcgcatcgaaatcgtcttctcgtcaccagaggatatggatcgcatcctgcagctgctggtgccgagccaaggcgatgccgattccaaatgggtgtaacacgataagaacattcgtgttgtcgccggcatcgtcagtgacaacaccgatgcttagcgttgtcacttggcattgtatcggcttgtcactgtcgccggcattattgctgtgcagtgcgttgtacgcgcaagacgttatagcctctgcgtgattcctggcaggggcgtatgcctgcgttgtagcccctgtcgcaatagaaaacccctcaggctggaggatgacaaatcacacatcgtgattctccgtcgcctgaggggcctttctatgcctttgaccggtgcgtactatccaagggcggcatgctgtaacactgacctagcgctgctcctatgtcacaggcagcagtcagaacagcaagccatcatcaggtcgccgcaatcagtccgtaagataggcctgcgcatccagcgctgcacggcagcccatgcccgctgcgctgattgcctgacgataagtacgatccacgcaatcgcctgcagcaaagatgcctggcgcactggtcaccgtgctggcaccctgcaccacgacatacccatcattgtcacggtccacaacaccagctgcaaaatcagtggctggcgtatggccgatagccacgaatacggcgttggtgtccagcgtgctttcttctccggtcaccacgttacgtacggcaatgctgctgacactggccggtgccacagccggtcgtttgattgtcaagccaggaatggcaataggtgcaccggtgttctgtgtgggggaggaggtgccggtaatggaggtcaccactgtgttggtcagcagggtgatggtcggattggctttggctcggtccaccatgatctgcgaggcacggaagctatcgcgtcggtgaatcaaggtgaccgaagaaccgaaccgggtcaggaataatgcctcttcaaaagccgaatcgccaccgcctacgaccacgataggcttgttcctgaagaagaagccatcgcaggtggcgcagtacgagacgccatgtccggacagctcctgttcgccgggcaccccaagcttacggaatgacgaccctgtggcgatgatgagtgctgatgcctccaactgggagtcatcggagagcgttacacgataggtcggcttgaccgaatcactctcacacgcctcaatggaagagacatcgtctgtgatataggttgtaccgaagcgcttggcctgttccttcatgcgatccataagatccgggccaagaataccttccgggaatccggggaagttctccacctcagtggtgttgatcaactgtccacctggcgacaacgcaccagtgaccataacaggattaagacctgcacggccaagatagatggcggccgtgtagccagcgggaccagaaccgataatgatgacgttatgtttcacgtgaaacattgtcacacccccatacgatattccatgtcattcagccagacgcgaagaaagggcggcaccgtcgaatgtatgcgaacggtaccgcccttcttgggtcagttatcggtatagatgccgattagaagacctccaccttctcgatgtacagctggttctgcggcaggctacccgatggcacccacagcagcagatcctgcgtattgacggctttggtgaacttcacctcagtagtgccaccttcagcaaaggtgaattcggccacctgctcgccctgagtggggtctccagtggtatttgcgcgaatatagcccttaccaccggatgtgcggatggtgataaccatgcggtacgcatcctgcggctggtcaaggtgcatgtagtatgcgtacccggattggccgccaggattcgacaggaagttggcgctggaaatcgtaaacgccgtgttgttctcatggcgcggttgcggagcagcgctggaatccttatcgccggacttcttggccttggtcttcttggacgacgaatcagcagtctcggacttcttggacttgtctgatgccgagtccctggattcgctctgagtggcatcactcgactttgaggaatcgtcagtggcgccaccgttcgtcgcgttcttgctgccaccgaatggcacagcgtcagcattgatatcgggccagtcaccttcactggagttgctggaagcatcggcaggattgtctccggaggatcggaacgcatgcactgcccaaacagccgctgccactaccaatatcagagccacaatgatggcaacgaccttggtcgacagtttgccgaacagatgttcatcgggcagcttgctgtcatcctcgtcatccggcacatccttcggtgtgaagctcggaggaatggcgcttacttcggcaatgcgggcctgctcctcttccaaggcacgcagcgattcctcaccgggggccacagcacggccgctgacatcgaacacgggaatacgactggtcgtctctcccacggtggcatcggaaataccgccggtaacaataggcaccgtcaaccgagtattatcacccggaccgccgatgggggccggattcatttcgctgtaccagtcaccggtgtcttcaccggaaagattctcgtgctcccaggcgtcagaaaggttgaagtcaaacagacggcgggcgtcagattgagactggttgccgtcagcagtactggacccatcaggcagaggagccggtgacatcgcgtgcggagcggggacggcggccggctgaaccggcagggaaggggtaatagacaattccggaagactgctgctgttaatcaacgtgctgggaataggcacgatatcggtctcgttggcgggcttcagtatcgccttggtaatcgagcaatcgctttccacgctcggcaaagcgatatcagcatcgctcagttcagagagcggcttccaattacccaacaaggcgtcgagttctacaagggcagccatcggcaacgtgtgctcgtcgggcttgcttaaggccaatccacgcttgcaaatcacgcggaattcgccaggggtgtcttgcggcaaggcgcgcagattgaatgtgggtgtcgcttggcttggcgtgcgtgtcagcagggcatagagcaatgccgcaagctggcgaatcgcataccgttcaggaccgtccgtacgcagatcggtagcggacgtgtcggccagcatcgtggcacatggtgcatcggcaatctgcacaccggaggtagtcactcgaacggtgtcggttgtgatgacgatgctgctgggagtatccgcaatgacctcgcgcagcacgttggcgcattctccgataatcgaccggatggcgctgtagctgagcggcttgtcggtatccaccatgtagtcagtcaggcattggccgctgtccaccggcatgacaatgagaagtacgtcggattccatacggtatttcagtacgggaatcacacgatcagggcgagtggcggcgatgcgaccagcgagctcatcgattgcggcgaaagcgctgcgattggtaatgatgaacagctggcaatcctttgccaacacacggtcgttggctttccatgcctgaatgccaggctcctcacgcaacgatgataccaaggtgtatcggttgagaatcgtgtctccgagttgcggtttcatagtgcgttcggctccgtgtgattggtgttcgagactggtcttagatattctacgtgtggggctatccttgacgggctccgtctcaggattgatttgcgtatcgtcgactttttccggctgggctgtcacagcaacgtcctcactggccggagtcttgtgtagacgggccagtatcgagtgataggcgctgatgagttccggggtgcgtaccacccacaacacagccacatatactacggccagcacgatggtgagcaccacgcagatggccagcgcagaccaccagctcatgtgcccgcctaccgatcgaatatccgcgccgaacagtgcgactaccggtcgtttgatcagccagaccacaactccggaagccagtgccgccacaatggccttggcatatgtcctcgtgatctcccgaccgccaagattgccttcgaacttgcggcgcaacatcatcaacgtcagcggcaacgccagtaatccgccgagtgtcaccgagcaggcgatgccgagtacccaatgctcaggaggaagtaccatcatgccgatcatcatgaataccgaggtgaacccatactgcatcaccgcggacaggaaggggtgcaggccgtcctcaaaggcatagaacgtgcgctggatcaacaggaacgccgatcccaaaggagtgcccacagatagggcgataagcgcgtaggaaatcagcatggtctcgtccatcgagacggacggaagcaatgcgcggatgatcggttcggggaacacgaccatggcggcggcgaagaatatgatcagcagccctacgttgttcagcgcgctcaccagatcgtgccgtgcctcatccagattcgcagctgcgatggaacgggagatcttggggaacatagccgtggataccgatacggcgatgagcgaatagggcaggatgaacagggtgtacgcattctgataggtcgcgttgcctgccacgctgaacaggctggcacccgtcagttcgtgggcgcgctgtggtgcggatgtggcgatacgggtaaggataatgccgcagatctcgctggtgaccaccacgcccaaagagcctaacgccacgggacccatagacctgagtccaaagccgccaagcccgaagctgggtttgtacttgaacccgatacgggccagtggcaggaacagtatcagcgcttggaaggccacgcccaaagtccaggtgcctgcggtaagcgcgattttgtcggcggtccagaattcgaggggctgttcattggccttgctgaacagcagaataaaaccagtaaaaccggcgcaactaataatgttggcaccggttgagctccacgcatacgtgaggaaatggtctttggcggccaggatctgacccaataccgtatacaggccgtagaagaacacctgaggcatacaccacagggtgaacgaggtggtcagggctatcatctggtgatcgtcgctacccacgtacaggcgggcaagcagagggctggccgccgccatcaccacggtcatggccaacaggatgccgatggccaacgtaaccagacgattcagtcgttcttgggcgtctttttctttcaacgtgcgcacgatctggggcaccagcacggcgttgaagatgccgccggacaccagcgtgaacacggattggggaatcatggaaccggcctgataggcgttggccgccaatccagtggtgccgatggccgcagcgagaagaatcgtgcggagctgaccggtcacacgggaagcagcggttcccgtggccatgatcagggaattacgacctacggttgaactcattcgtcggggtccttcttccgatggaactgccgccacaggccgataatgcacagtagcacggcgaagccgatgataatgaaaccgctggcatcactgacgcgcatcacactggtgatcgcggtatcctgcgtgttgccgaagctgttgccttcccggtcgctcagcgacacatgggccgtcgatgagccggaagtggaaacgcggatggtgaaggtcacctgagcgtcgctatgcg

SEQ ID NO: 261 - DNA, 13420 bp, Unknown
  R101_18m  MAG No. k141_55882
acctgcttgccctggttgaccatttcggtgatctgttccgtgcggggttgcggcagcgcataaatcgacgtcttgacgcgcttcaagaccgcaccggcgtcggacaggtcctgcttgatggaagcgattttgggaatggaaagcgtgccgtcggagaagttcatgccggacagcagctcttcgatattgaagtccaccagcgtgccctgcgcggcactgtcgattttgggcagggcgttggtcgcggcgtcggcggccgcatccagcatgccgcgcaccgcctttacgtccgaaccgtaatatggcacgtattcggcggcctgccatagcgcgccctgggtttcgtcgtgcgccgtgacgatgtgactgccagcgctgtccatctgctcaagcgcctgcttgaagtcgccctgcccgacggattgctgtgcttcagccgcatattcgcccgcctgctgcgcctcgccgatcacccgttgtaccgactgccagaatagccagccggaaacgcgcaccgtcagcagaatagcgaccagtattgcaataacaacagtgccgatatgtttgcgcttagccataggaccaatgtacctgccactctgaccagtattatttacggattagcatcgtggcctgggcctcattctggctcatcggtatgttattggcgatgcgtagcggtggttatgcaagtgtcttttgattgatatcggcgcatgacaggtgaataacgtgtagcgggaaagcacgtctatggtcatattggcgttctcggcacagcaataaccgcggtattttttaaggtttgccaattcttccatctggtatgtgccgaacatggtgctgtcatgcgattgcttgacggcatattgcctggcttgaacgatacatcccattatcgcttgcggttgacgttgcgtaaacgtctatcctgacggcaacgccgcgaaacacgcacggcgggtagaggataatcggcttcaagggggatgatcgatcatgaacgagaacgacaacacggcgaacgccgtcaacggttccggcgcgttcgatgtggagggcaatccgctggatacgggccggttgtggcccattgatcaggcggcattgatcagcggcgtgacgacgcgcacgttgcgctactgcgacgagaccggtctggtcaagaccgcccgcacccgggcggcacagaatcaaaccgcgaccgtgatgaacgccatgccgctgtccggctcgttcggggccattcgctccgcgctggtcggcgatccgcgtttcgccgacccgtgtggtgaggcgctctacggcagcaaggcatgcgccgacttcgtcaacgaagccaagaacatccacgcacggcaaatcgccgaacggttcgcggcggaacaggatgtacggaatcagccgaaatgacagggcgtccggctccgattgcgcgacgaaccctgcgaccacgtcaccggcttaatcatccaagctgcgcgaagcggcgcaaaagatgatgagtcggcataagcggcgtagggttcagtctgcgtgttttgcacagtgagttacaggtcctgaacgttcatacgggccagctcggcgcgacgattgatcttgtcacgctgatacaagtagatgccggccagcacgatggtggatacgttgttggacaggaacgcgatgaatgcggaaagcacgacgttccacatgttgccatacgcaccgatgtccgccctggcgaagacggtaatcgccgccacaagcgacagcagcaatgtgatggcgggcaataccagaccgggccacttgctgtccatcttcgaaagcctgatctgcaatatgatgaagccgatgcagatggcgatgagaaacacgaaaaacactacggcaaatattgtggcgccaatcatgattactctccttgcttgagctgcttgcgatattcgctgatgaggattttggcggtgtcgaagtcgagcttgtcgtcgaccgcgagccgtttgatgagcgcgatatacggctcgttctcgatctgctcgcccaacttgattttctggatgagccggtcgagccgaagccgaacggtggggtaggagacgtcgtactgcgcggcgacctccttcatggagcctgatgcgagcagaaaccgtttgatgaacgtcatatcctcgtcatcgaggttcgacatccacggcgggatcatcgtcgtatccatacctgcctccttcaattcacggcgggtttaataaaattaagtataccataaataatattaaaatcaaatagatatctgtttaaagtttttcgtagattagtttgaggtcgtgatgtaagaatgcgtacgcggacgcgaaggaccggcacatgtcggcacgcatgtagaagcatcggtcaatcggatatgcatcgacagcaccctaaggcattgacggatagccgattcctgtcatgcgatcgcttgacagcatgttgtctgattgactctttgagtgccataattgagatggcatgcgtacgcgtcggactttatggaatgcggggacgatatggttgcggacgatgaggtgcgggcctcccatggtgggcgtcggaatcaaggtctgctgtggtttttcggcgcttccgccacattgggcgtggccgccgtcacggccatcacgtgcgccgtcatccggtacggctggaatgacggggagttctggaagctggtggtgccggcggccgtggcgttggtggcggccatcgtgtgggcggcgctcggcttcatgcgtcgcgccgggcggacgcctgacgttccggccgacgcgaacgataccagcccggccgaatccaggttcgattcggcggccgcccagattctggcgatcgtcgccatcaacgtgtggggcgtcatgttcatcgtcttcgatacgttccagattgacccgtggcggtacgtgacatgggtcgtgcccgtgatgttcctgctttatctggcggtcttgggcatcggcagggcttgtttccgcaaacgacagaaggatattcgcttcccggaggaaccaagtatgacgagcagccgtccatcatacttggcataggcgggcagttggacgatgccgggcaggtcctcgttgtcgctggtctggttgagggcatattgggtgccggtcatggaacgctactggaatctgtcaccctagggtgtcactttccgtgtttacctcgacctgccatgcccctggcgcgaaggttgagaaaaacggcgtcaactttcacgacagggggctacctcatgacttggcaaaatgccggcacaccgattcaggcgctcggactggtgaaacggacagggttcgatgctcgaaccgcctcccgacccgcaaacacgcagactgttctcaataatgtttcgttggatattgatggagcgggcttgacggcgatcgtcggtccgtccggcgcaggcaagacctcgctgctgtatgtgctgtccggattggacaggcccgattccgggcgggtgaccatcggcggtaccgacgtctacgcactgaatgaggaacggcgttcgcggttcattcgcgggcatatcggtttcgtgttccagcaatacaatctcgtgccgtatctgacggtcgaggagaacgtgatgttgccgctctcgctcgcccatcgcaaggccgactacgtgcaggtcacgcagctgctgtcccggttcggtcttcgccagagggcgaagacgacggtaagcgccctgtccggtggcgaacagcagcgcgtcgccctgtgccgtgcgctgctcatgcgtccggcggtggtgttcgccgacgagccgaccggcgcgctcgacaccgcgaacagcgagcttgtgctgcaggtgctgcgcgagctggcggatgcgggctccagcgtggtcatggtcacgcatgacacggatgccgccgctttggccgaccacgtgatcttcctgcgcgacggtcaggtcacccacatcgctggcagactcaccgccgagcagattgccgatggcatacgccgcactttcgtaccggccgggtcgccgccgttggttgcggcggcgcggtctgtcggcccgatgatggtgaacgcccagcctatccaatccgtccaaccgggccgaccggtccagcgcgtggcgtatccgcagcagcggaaggaggctcatcgtggctaggtatgtgctgcgtgtgttccgcgacaatgtcacgggatgggtacccacgattctggtggtcgcagtggtgaccacgctggtgggcatatgcatgaaccaattcgtgtggacctcgtctccgtcgttcacattggccgcgcggcaggcgggtcttgatccggccgagttcggcatggtgtcggtcacgatctatgtggtggtgtcattactcgcgttcttctcgttgacggtggtcggctcggccacggtcaaccgtattcacagcacgttcgcgcaatggcggcttatgggcgccagcccgagtcaggtgcttgccagcatgtggatgctcgtgggtgtggcgagcctgttcggttccctgatcggctctctggctgcagtgccggccagcctgctggcggttcccgagttcaacgccatggctgcggaaagcttcgccgatggattcggctcgttcgcacctcctgcgttcacgccgtcgatggccgcgtggctcggatccctgctgttgggtgtggccacgtgcatgttgggcgcgtccatcccctcgctgcgcgcagcgaagatccgtcccatcgaggtgattcgcggcacgggagccatcgggatacggcacggttggcggtcttgggcgcactgggcacttggtttgattgtcatggcggcggcgctggcattggcgttctccggcatgggcacgccacgggcgctcgcgttcggccaggaggcggggcagacattcaacagcgcgctgtgggccggcatcatcgcctcgttcggcatgtacatccttgtcagcatgctgattccgattctattgggcatcggacgtgtcgtgtgtcgcctgtgcgggtccgcgaccggcgtgctcgccgcccgttccgccaaggcgaaggccgccagcaacacgaacacgattgccccgctcgcccttgccatgggactgtcggtcaccctgctgacctgcgcgcgatcctatggccggatactcgccttgggcggccatccgaagagcctgaactacgcggactcgctgctgctcataacgatgctgtgcatcgtgtccctggccaccagcatggcggtcatcgccctgtcgaaccgcagcatggtcgccgaccaggcattgctgcgcagcatcggcctgtccccacgtcgtgtgatccgcatgtatctctggcagagcctgcagctggccgccggcgcggtcattctctcgctcatcccggtcgccgtcagcgcaagcgttttcgccgcaagatccgcggcgctcgtcggcatccccgtggccgaaatcccatggccgggcgtaatcggcatgggcacggcctgctggctggcattgttcctcatccagttcacgcagattcgccccgcgctacaccgcagcgtggccgacacgatacgcacatgctgacatgcacgcaacatcatacaaaaagagccacaatgggagccatgaaaccgcaatccgcgcaggccaataaggtcacggtcctggccgtgccactggtcatcgccgtggtcgaatgtgcagcgatgctgtgggagcatgcgatcggagcgccggccgacaccatgtatacgtttgccaaagatccgctgggattggctctgctgctggcgatgaccatagccagcagtgcgatactgcttgtccgttactggctgccagccgttgccttggcgcttgaagcggtattgttaatagttgcctcgtactggcggttggactcaatcgtgatgattcagacgctcgtcgcctgctatgcgttcgcccggacagcgaggggacgcgggctgtgcgttggaggcatcggcatgatgctgtcgatgaccgcgtcggccatcatggtgcatccggacgttctcgcgaccgaatgggtgagtcgagtggtaacgttggcagccgtgggaggcggcgcgcttgcagtacgtggcaggcaacaggccaaggaagccgaacacaaagctgccgaggaatgccgtcgggcagccgagctggccttccaacgcgatgccgcaatacgccgttcgcgcatagccggtcaactacacgacagtgtgggccaggatctgaccgtaatcatcgcactgtctgagggtctggccggcaaaaccgatgacccacgcgtggaggatgcgctgcacggcatcaacgaaatcgcacgagagagtctgggcgacacgcgcaaagccgtccgcgcactgaccgagttcgatggagcggcgaacggtgacgatacgcacacccaagaatcagaccagcattcatgggatgacattcggccgattctcgcgcacgcacgccggctgggcatcgtcacggtgttcaccgagactggtacgcgcgccgatgacgaagctcaggctgatttgtgtttcgatgtgactcgcgaagccatcaccaacgccatacgtcacggacagaacgtggtgcatatcagcatcgcctggaaccacagcgagaacggcaccgtcgccgtgattatccgcaatgacggcagtcccgcgcgcaaggacgcgcgcaaggatgacggtactgggctcgtccgtctattccaccgcgtcgaatcggcaagcggcatcttcgaatacggtccaaacgaagacggcgaatgggtcgtcgaggcgaccatcccgtccaacggagtgaacgaaaaggaccacaccgcatgattcgtataatgctcgtagacgaccagcgtttcgcgcgacttggcttccaactcatgcttgacgatgcttccgacatcgtcgtcactgcccagtccgctgacggccgatccgccatcgagacgctcgaacagctcgccgttcagcatcgtccattgccgaatgtaatcctcatggatgtgcggatgcccggtatggacggcatcgaagccactcgccgcatcaccagacgctggcccaccatcagcattctcatccttaccacgtacgacgaggacgattacgcctttggcggtctcgacgccggagccagcggcttcctgctcaaggacgtcaccaagcacaacctcatcgacgcggttcacgccatcgccaacggtgacgcaatactcaccccacgaatcaccagacaagtgcttgaacgaggcgttccgcatcccaccagcagccagcgccagcaagaaatgcgcaaagctttcgacgcactcacccctcgccagcgtgaaatctgcgcactcatctccgaagggctcatcaacgaggaaatcgccaatcaactcaccgtcgaacctgcctccgtcaaacgtgccgtgacccgtatcctcgcaactttgggcctgcgcaatcgcactcaaatcgccatcggctggttcaaagcaggcatgtagacctgctatttgctcagcagctcattcaagcggattgttgttacgaatgcgactaccgcacgcccccccccaagacggattccatgttcgacaccccattcggcaaggtgggcttggcggattttagtggtggttgcaacacctgtgtgttttgccgctcttgatggcggtcttggattggtgcgatcgtatcatgctgtgttgatgagttcgagtattttctcggatggtttcctgtagccgagtgttttgcggggccggtcgttgagttcctcggcgaccgcgtcgaggtagtcctcggggtatgcgctcaggtcggtgcccttggggaagtattggcgcaggagcccgttggtgttctcgttggtgccgcgctgccagggtgaatgcgggtcgcggaaatacacctgcatgtccagcgtggtcgagatgcgtttgtgcagggtgagctcgcttccctggtcccaggtcagcgagttcctcaggagcttgggcaggtattgcattttccggatgacggcctgccggacgtgtttggcgtcgtgcccgtcgggcaggtgcaggaggatcgtgaaccgtgtcgagcgttccacgagcgtgccgatcgcgcttttgttggccgcgctgcagatcaggtcgccttcccaatgaccgggtatcgcccggtcctcgacttcggcgggccgctcgctgatcatgatcatgggctcgcggaaacgggcctgcgcgaacccgcctgcccgtgcggccggcgttgggcgcgcccgctcctcagggccttgatgacgtcctttttcagttcgcctttggcctggacgtagatggcctggtagatcgtctccgcgcacacatgcatagcatcattatccgggaaatcggcgcgcaggtgccccgcgatctgctcgggactccaatgcgcccgcaatcctgcacgaatgtatgcgagcaggccgggcaccgtatggatcttcgcgggcttgggtcgtctgggccgtccgcgctcatctgctggggccggtacggctcgtacatgccggtcgcgggattcgtgttgcgcaccagctcgcggctggcggtcgacgcgagacgattgagcgtgcgcgcgatcccgcgcacgctcatgccggccttccgccagtcggcgatgctgatgcgctcgtcctggctcagatacctcgaactgatcttttggggaatgtccacggtggaacgataccagtccaccgatggcttctcgttcctgccgttcgatcgtgtccttccgttgcgccacaccttgccggtgcgtttggacacgcccaccgcccgcgcggcctgcgtgaagttcatgcccgcctccagcagctcggcgtagcggcgccgccgcgccgcgcacatctcgccacgcgtcgcgtactccacgccctcgaacacccacctgtccacctggccctcccatcagtcagccaggcgttgcgacgatcactggaacccgcccttcgccattttttttgggggggggagaccggtggcggcaagtgtgcgatgggagtcggatgcatcgtccttgcggatgatgcgcaggttcattcctttggccgatggatagtttcggcaaatcgagggagcatggagcaaccgtcatgcgattgcctgacatgatgttacgtttgtggccgctgaagggtgaaatggcggcgacattgcaacgcgcgggtctgggcaaggcatcctacctttgccttcaggcccgcctttcgtgaagggtgattatgccagttatatcggctacgaatctctcgatcgggtacaagggttccccaatcgtcagcaacattaacctgcggttgagcacgggtaggatcatctgtctgcttggggcaaacggcgcgggcaaaaccacgttgatgaagacgctactcggacggataaagcccgtgagcggagaggtcacgtacacagggacgaatatcaatgagatgtccgcggcgatagaccatcccagtttctttccttacctgagtggtagagagaacgtcgaggtggtctccgcgttctggggtctggatgtggacccggaggcggcgttggacggtgtgggcatcaatcgcgcggtgtatgggcggaaggcgaaggactactcgacgggcatgaaagagcgtctggagctgtgcctcgcccttgtgccgcatccgaggttcctgttcctcgacgagccgcagaacggtctggaccccgatggcatagcctccttgtccgaaacgcttcgcgcctaccgggacaaggggaactgcgtcgtcatctccacgcatctgcttcatgagatccagggcgtcccggacgagtgcatcatgattcgtcacggccgggccgtgcaggtcacggatctgaccggggtgaacctcgcggatctgtatcaggggaggtagggtcttgaacgccgtttcccctgttcgcgcgttggtcgcctactactggaacacgtggtatttcctcgccgcggtgtttggggccgtctcgtcccttctgctgggtgcgtggatctcaagcgcggcgaacggaaccccgataaccggagggtattgcgtctatttcaccgccacccagccgttgatctgtctttcgctgctcttcgcatgcgatgccagggtcgcgaaggcgcactacggtggcctgccgcgccacgtgtattccgcgtggacgccatgctcgctcagggccgtgttccgggccctgatcctgacctccgtgaacctgattggcgtactgtgcttcgacgccatcatggtcctgacgggtaccggaatgcacccgcatctggcagctgtcctgtgcttcgtcgtgctgcagagccttgcgacctccctgatctactcgatcgtcgagatcgccgccgatcccagaaccgccggaatcgtctcggccatcctttgctatgcatggattctcctgccgggcgaccttcccgactatgcgacgccctacgtcgcgaacgccctacggaccgtcgggctgaacctgaacggcaccgtgatgtcgccggcggaagcggcgagtcgagcgtccgtcggccccgtgatggtcgtcgtcccgatcgtggtgcttttggttgcctatgtgctgttgagccggttccgtcgcgaaggagtggagaggaaatgaagtccctattgcgtattgagcgtgtggcggtgatccgctggtcgacgctcgccttcgtggccgtgctgctgtttccgttgttctttttgcgttacgggaacacgggtgcggtggtgcagtcggcgatggtgatggcgcttcccgtaaccgcggccggtctcgtcttctccaatgcaagggtgccctcctcgtaccgttccttcagcatccacgaccggctcctgcttcgcttcagcgtgaagtcgctgtcgctcggcgtcgtgatcaacgtctgcctgactttgctgtacgggcttgccgtcgggctcgtcgtcaacgagccgctttcgtcgcgtaccattctgatgcttgcgttcaccgccgtcgtcctttccctggcatgcttcgttctgcgactctatgccagtcctctcgtcgcctggaacgtcgtcgccttcttcatcgtcgccggacttacggtgagttccggcatgttcgaggacgcgccgatgctgtacgccgtcataccaaccacatgggtgttgaacggggtgaaattcgccggttacgtgattccggtcggcgtcgccatcgccgcgataagcgcatgtctgctgttcaaggcggtgaaacgtgtctgaccgaagccgtatacgggtgcactgtttcggatcgtaatcgtccggcagccagctttctcaccgtattccgttgcgggagtgagcctgccgctttccgctgatcccgccatacaaagtcgactccgcacgtcgcgagtcttcgccgaacactatcattggtggcgcagaggtcgtgtgggaatggccgtgacaggggaggggtattgggcaagcttcgggcgccgcgttcggcgcgtggccgtgtgatggcggcggccggcatggtgatggtggggtcgttgggtatccagacgtcgtcgtccctgtcggcgtcgttgttcggcgcgttgggaccaattccggtcagttcgatgcgcatgctggtcgccgcgatcgtcattctcgcactcacccgcccgaaactggctggccggtcgaaaggcgaatggctgggcatcgtaatctacgggcttgcgatggcggcgatgaacgtctgcctgtactcggccatcgaccgcattccgatgggcgtggccgtcaccctggaattcctcggaccctgcgtggtcgccctggccggttcgcatcactggcgcgagggcctgtgcgcggtggtcgcgctggtgggtgtgggcttgatctcgtttacgccgggcggctacttcaatccggccggctacctgttcgcgctgggctcggccgtgtgcttcggcctgtacacgctcttcgccgaccgggtcggcaaggcaggcaccgggctcgacgggctcgccctgtcggtcacggttgcggcgctggccacttcgccggtatccatcactcgcgcgccgcatgtgtcggccgcccagtggggcgtcatcgcagcctcggcggtgctgggagttgcgattccctacacgatggacacgttgtccgggcgtatcacgtcggcgcgcgtggtcggcacgctgttctccatcgaccccgccatgagcgtgattatcgccgcgctgatattgcgacagaccatcaccgcggtggccgtgatcggcgtcatcgtcgtctccctcgcgggtgccctgctggtgtggtcatccggcggcgatgccgtaaacggatgattcttgtcatacgattgcttgacagcatgttgtgaatgcttgagccccgctcataccattcaaatataatggtttttcgcatgattcgttagcgttgacggatcccccaataaggaggtaatcatgtcagatcctcgcgttgaaggcggaagattgtcggtcgcgcccgaggccgtatatacgggtgctctggtgatgttcttcagcaatctcgctatgccggacaccgatccgcagggcaggcccatagtgctgtggttcaacggtatcatcgccgtctgcgccctgatctggggattggcggagacgatgcgcgtccgtaaggaatacccgtggcggtgggcgcgcacgctgttctacgacgtcctgattctcgtcgggctgctcatccgtaattccgattggacccggctcgtcgtgctggtcgcactggtgctatacgcgattgttacggagaaaacggcggcggaaccgcgccggtcctgactgcaagacgatgatgaaccgtcagcgtcacaggattctcgcggtatgcgcacggtggtcgacatcgacacggccgccggcagcgggcgcatgattatttcacgtcgcagacggtgaaggcgaagctggtgagggtgccggtggatttgccgtcggcgaggagctgattgatgtcgggcaggtccttgttgtcgctggtctggttgagggcgtattgggtgccgtcgggcgcggtgaagcgcatgacgggatcgcctttgctgttgtgcgtgcagctgacggtgccgtggtcgacggtgaggggccatgtgtggccgagttggtcggcgctgatgtcctgtgggttgctggtcgcggtgattttcttgctgccgttggtagggtagttttcggggtgttcgatgccgtccatgcaggcggtcagtcccagggccatgatggcggcgaggccggtggcggtgatggtttggatggcgtgtgtcgtgttggtcatgctggtttcctttgtcgtgttcggtggtggtcggggtgcttgttcgtctgccgtcaatgctggtcggggtgttcctcgatgaggaccatgta

SEQ ID NO: 262 - DNA, 5780 bp, Unknown
  R101_18m  MAG No. k141_57720
gccggctcaacgccgacaaggacggcgcgaacaagccgagcgtcgtcatcatggtcggtgtgaacggcaccggcaaaaccaccaccgcgggcaagctttcccgcctgcttgtttccgaaggcaagcaggtcatgctgggcgccgccgataccttccgcgcggcggccgccgaccagttggaaacctggggcgccaaggtcggcgttccggtcgtgcgttccgacaaggacggtgccgacccggcatccgtcgccttcgaggcatccgccaaggccaaggaagcgaacgcggacgtgctcatcatcgacaccgccggccgactgcagaacaagtcgaacctgatggacgagctcggcaagattcgccgcgtcaccgaaaagaacctgccggtggacgaggtgctgctcgtgctcgacgccaccaccggccaaaacggcatggcccaggccaaggtgttcgccgaagccatcggcattaccggtgtggtgctctccaagcttgacggttccgccaagggcggcatcgtgatcagcgtgcagaaggagctcggcgtgccggtcaagctcgtcggtctgggcgaaggtccggacgatttggcacctttcgatcctgaaggtttcgtggacggcattctcgcgtagacggtcgagctctcctcagcgaggggagccctgcgtccgtccacgttgtgggcgcgggaaacgcccgcaacgcaccaaacccagccccgaatcatattcgaaacatgattcggggctttcccgtatacgttggaatcatgccggaatcagcccacccgacatcaacctaactgtcaggtgcgcttaacaatcgcgtaacttggcgtaacgaaaccaaaacgcggccggctttaactgacaaactgttagcccccataagggggacggcattgtagagacaaataagacgccggccgcacaaagcccccggtgccctgaacgaaagagagggaggtagacatgggagcgattgattccggtaacaccgcatggatcctgacatccgcgtccttggttttcctcatgacgcctggtgtggcgttcttctacggcggtatggttcgtgccaaggccgttttgaacatgctgatgcttgaggcggccgcgctgtcggtcaccatgattatttggactttgtggggttggtccatcgcatacgccggttccgacatcggcggtattttcggcgacccggccagcggcttcctgctcaaggattccatggtcgcgcaggacggcgtgttcaccgccaccggtctgaacggcaacaactacccggtttccgtggacgttgccttccaggtcgctttcgcgatgattaccgtcggcctgatctgcggcgccatcgccgagcgtgtgaagtacagcacctggatgatcttcgtggcgctgtgggttaccttcgactacgctcctatggcccacatggtctggaacggtggtctgctgtctgctgacggcgccatctccaaggctatcggcgcggccgcccacgatttcgcaggtggtaccgtggtgcacatcaacgccgcagtcgccgccctgattatcgtgctcatcatcggcaagcgtaagggcttcggcacgcagccgttccgcccgcacaacgtgccgttcgtgatgctcggcgccttcctgctgtggttcggctggttcggcttcaacgctggttccgccttcgccgccaacggcaccgctggctacgcttgggtctccacttccgccgccactgccgctgccatgctctcctggggcttcaccgagaagattcgctccggccactacaccgctatgggtgccgcctcgggtatggtcgccggcctggttgccatcaccccggccgccgatgtggtttccccgctgtgggccatcgtgatgggtgccatcgctggtgttctgacctgcctggcctgcggtctcaagttcaagttcggctacgatgactccctcgacgtcgtcggcgtgcatggcgttggtggtttcaccggtactgtcctcgtcggcttcttcggcgaaggcaccggcctgctggctggcggcgactggaagcagcttgtcgttcagctggtcatcgctctcgtcgccatcctctactccgcggtgatcaccgcgatcatcgccttcgccctggagaagaccatcggttggcgcgtcaccgaagctcaggaagtcggcggcattgatcttgccgaccagggcgaacgtgcttacgattttgctggtactgccagctctgttctcaaggaggtgaggtgagatgaagctcatcaccgctatcatccagccccataagctcgacgacgtcaaggaggccctcgcggccgccggcgtgcacggtctgaccgtgtccgaggccaacggctacggccgtcagcgcggccacaccgaggtctaccgtggcgctgagtacaccgtggacctgattccgaagattcgcgttgaagtgctgtccgatgacgcggatgccgagacgctggtcggtgtgatcatcaagtccgccggcaccggcaccatcggtgacggcaaggtgtgggtcgctccgctggactccgtggcccgcgtgcgtactggtgagaccggttccgccgcgatctgataacacagacgtccatgcctagaaggggatggactgcatgggaaaggtccccgcacgccgcgaattgacgccgtgcggggacctttttggcaatgaaagatgaagcaatgacttcagcagtagatggcttgaaacaacgattcatggatatgagccagccggatgacgatggtgtctaccggaatggtgcgaccaagcgtaaagcccgcacggaactggccatgcaatgcctcacggagctgtggaatgcggcctgcaaggatgtctctttccccgtgcccgactccggcatcggcttcgccgcggtaggctcgctggcacgtggtcaactgggccccagctccgacctcgacttggtcatcatctacgagcctcgcacgttgaacgaccagcagctcaacgagttggccaacaaactctggtacccgctatgggacagcggtctggacctcgaccactccatccgcacgcgcgcccaatgcgaggaagtcaccgaccatgaccttcccgccgccatgggctggctggacgtgaagcccatcgccggcgacactgctctgattaccaccaccgccacatccatcctcgaacgctggcgcaaggccgcccgcaagcgcctgcccgaactgctcgactccgccaaagcccgactcgacgaattcggccgcctccaatacgtcaatcagcccgacatcaaggagacccgtgggggtttgcgcgattcggtgctcgtctccgcgctcgccgtctcatggctggccgaccgcccgcacggcatctacgacgaagccgtggaacgtctgctcgacgtacgcgactgcatccatctggtggccggcaaggataccaacctgatgctgacgccctatcaggccaaagtggctgccatgcttggccttgccgatccgacttggcccgaaaacgagcgtgccgcctactcgatcgacgatctgcagacactgcttgcccgtatcggtcggcgcatctccttctcgcttgattccaccgcttcccgcgccgaacattcgctgacccacgaaaagccgcgattcgcgttcttccagatgttctctcagcgctctggcggcaagcgtgaagccccgcaattcgacgtggtggctcccggcgtggccaagcacgaaggcgaattggtgttggcacccggtgccgagcctgccaaggatgccaagctggcgttgcgtatggccgtggcggccggcgaattcggtttgcccatcaatccgtctaccttggttaatctgaagcactgcccgattcacgacaaccagtgggatgacgaatcgcgcgagctgtttattcgcctgcttgcatgcgggccgaatcttatggaagtgtgggagagcatcgacttcgtggacattccgggtcgatggatgccggaatggctcggcgtccgcaaccgtccgtccgcctcggccgcccaccggtacaccatcgatcggcatatggtggaggtcacgtcgcgtctgggtcgtgagacaccgtccgggggacggtatgatgacgatcatttcaaggcgttgctgttggccggtattacccatgacatcggcaagcgcgcgttcgtggccgatcacgccgccgagggtgcccgccatgtgccggtgattctcaagcgtatgggctacgcgccggacatcgtcgactgggccaccgtgctggtgcgtgagcatttgaccctatccgaatttgccacgggtaaggacccctatgatccggccgtggcggaggagttggccgaccgcttgcaccacgacaagatgctgttggatatgctgttcgacctgacccgggccgacggctcctcgctcggtgccaccgccggtgagaccatcaccaagcaatacggctggtccaagtggcgcgaacaaatcgtgcgcggcatgtattccgccgctcgcgccgcgatgtaaacggaatcgcccagcacttcgcgcggccgatacctacttcatccatgcgtccgagcgcacgcgcagcccgttggacaggctgcgcccgcccatgagcaccacgttgaacgcggcccagagcacggcggtacgcatcaggtcgctcgtcagcgccggcgtcaccatattggccagtatgagtatgagcgtcacatacaccacggcggtcagcgtgcaggtgcctgccagatagcggtagtcgcgcgcgccgataagaatgccgtcgattgccatcatccagccttgcagtgggaagaagatgcccatcgtcaccatgccaacggcaatcaacgtctgaatatttggcgtaggggagaagaagtgcccggcgaacaggccgactaccgcaaaagccgtgccgattaccgcgccggtgaccagccccgcacgcccggtcgcccgcgtcaaccgccgcgcctgctgcacgctgccagcgcccagcgttgtggccaccagcgtctggccggcgatgcccacggaatccagcatgttcatcgcaaaattccaagaggagttcacggcctgaaacccggccaacacggcagtacccatgcgcgcggcacaggcgaccgtagccaccatggccgcacgaatcgccaatgtacgaatgaacaatggcagtccgtcgcccccggctgccgcaataccggccaaacgaggccgcagactcgcaccgtccgcccgggaccacagaatggcggggattaccaggaacagccccatgaaccactgagctatcagcgtcgccactccggagccggcaatgccccaattcagcacaataacgaacaacacatcaagcaccgtgttcaccaccgcgccgcccaccgcagcgatcagcgtgatacgaaccttctgcaatcctcggaaaatgccgttcgccgcatataccatcagcatgcctggcgcacccagcacgattgcgcgcgtataggtcacggcttgttccaatacttcgccctgaccgcccagtgcccggcataatggctcggcagccgcgaacaatcccaatcccagtacggtgccgatgctcaaggccagccacaggccgtcaatgcctgcctgcagtccctcgcgacgacgacccgctcccagcagatgcgccacctgcgcagtggtcgagtaggccaggaatatgcatagtccgactgccgtgaggatgatggtggagccgattgacaggccggccaa

SEQ ID NO: 263 - DNA, 11874 bp, Unknown
  R101_18m  MAG No. k141_59203
gccttgtatacggcgaatccagcgatggccaccagcaccacaataatggccaccacaatgcagccgatgatggtctgctgcttacgttccttagccgcctgctcggcccgtgcctgctgggcggcctcctcggccgctcggcgctcagcgcgtgtggcacgcttggcctgacgcttcggatctgacatagctatccccttgcaatcgcttcaatgtttgggccccatcataatgaccgggcctgaggaggactgcgcccagagctgatctgaggtgaattccctgtaaaagtgtgacggaacgaacgtatcggatacacaacggccatgtgtgcggatggctgatgtgtgagattccgccccgctctaggcgaacggcatccagttgatcggcatgcccagaatcggcatcgcgcacaaggccacggtgatgatggcccatatggtgaacagcacggtgccgcgcccgccgcccttgggcgccggcgccactggagcaggtggagccccacccacttcggtggatggcgcgcccgccgggcgactgtgtttgagcccgcgcagtacgccgccccccagccgaatcatcatcgactgtggggcgaacacagtgaccagccagccgatggccatgaaaccgcccagcgccagcccggaagcggagaacggcacatcattgagcaacggcaccggaataccccaatcctcggtgaaataccaggagatggtgtgaacgggcagtgccagagccgcggtggccacggcggttcccgccatatagatgatgactagcagcagtatgcggggaatggccagcagcagggctttgaccagatgccagggaaaagtcgccacgcgaatccacgaatcggagtttttgcgctcgccgccgcgtttgccctcgcgctcaagctggggttcggtgttataggccagggtgagcagtagccacaacaacgcagtggccgcgatgatggccacgagcggagcatttgccgccagtgccgccagcggcgccgccagcaggatcaatggcagggtgccgcgctgcagatattcccctcgcttcacgtccaccggattgggcatgggaggattttggaccatggtttcggtgggggccgcttgggcggtttggtcgatgatgcgctgcaatgccgggcgaatggcggggtccaccgctgtgggctggttgcttgcgggatcccagctgctctgggcggtgccggacggggggaatgatgacggctgcggcgtggggagtacggtggtgcgctcggccagcggcgtggtcggggccggagtcgaatcggtgttggtcattggtgtggtggcgccggccattggtgtggtttggtccggcatcggtgtggtcgcgccggtgagtacctgtgtgccggcgtcgtcggtgaaatcggcagcagcgtcgggcaacagttgcgtggcctgctccgcaccggccggcggacgtggcggcatatcggctaagggcagcgtggcggtagcggcgccagccggcgagaatacggcggtttcgccatcgccgttatcgcccttattgccggagaacacggccatggtgggagcctcagcggcttcctcggccgcgcgccagatggttcggggattattgcggtcaacgccgccggccgcgccaaaagggggcatcgcctccgcggcttcggcaacgatcgcagccggttgtccagccacggctcccgcggcgaacggtcccgcctgctcgccctgccaagcgttgggattcaacgcatccaaggcgatggcattcagcaattgatccggcgtgcaacgatccctgcgatccgggtccagtgcagaacggaaggcagccaatgtgccggccggtagtccggaaagattcgcgttgcccgaggcctcgcgctcaagtaccgccatcatcggcttggtgccgaacacaggcgcgccggttgcggcaaaagcgagcacggacgccaccgaccaccaatcggtggcgtcgtcggattcggcaccgtcaataatctcgggtgcgatgaatccgggtgtacccatcactaggccggtgcgggtcacgtgactttcgccctcgcccatcgcgataccgaaatcgaccaataccggtccggcggccgacaccatcacattggtgggtttgatgtcgcgatggacgatgccggccgcatgtacggctttggtggcttcgatgagcttgcgggccaagcgttccagatcgtcgcccacataccggccattggcggccacatcatccttaagattcttgccctcgatgagttcagtgacgatgaacgccaacgtatcgtcgagttccatatccacgatgccgcacacacccggatgattgaccttcttcaaggccatggcctcgcgccgcaggcgctcgcgcggcgtgacatcgggcttgaggtcggggtcgtgcagggccgtggacgcagagccggagcctgccactgactcgtcggtcagggagtcgcgcagaatcttcatggcataggtggtgccgccgtcgtcgcgcacccgccacaccgaccccatagctcctgagccgagccgggagatcagcgtatacccaccaaccacttcgccgggctcaagattcaacgcgttcaaatcgctcatgccctccatcctaatgccttgccggtgcattattctggctctctcctgggaggccgagcttgatatttcttggctcccctctctgagaggggagccaagaataaatgccgtttacgtattgagaagtgccgtttacgccattaaggtcgattgccctgaccggatgtggtagcaaattatgcgctcgaaatgacaggataggtgcgtgggcaggtgcgccagtcgtgaatttgcgactctataaccatcggcatcaaggatgtgtcggcggtgacccaaaggtgagccagccgggcacattcaacagtggcacagcgatgcaagggcagtatcgtgagccgctgatcgaatcgataacgatatcagattcgaatgccgcgacttcgccggtcgtaccttcgaatacttctccgaagacggctacctgttcggcgtgatggcctcccagcaggtcgctggcgctcaggccaaggcctgaggtgtgtctccgataactgaatagctaaatagaatggacggcctgctgagtgctactcaacaggccgtccattgtgtatctgaatgcgaaaagtcattatatggaacggaatatatcgatactgtgcattgtgccgattactgattccgacgcaagtattcgcgcaggaagggcacggcaaaatcgacttcgcctcgttctgtttcgcggataacgaaggcgtcaaggaggcgtttgcggtaggtggcggcatagttaggcgttttgcccatgcgctgtgcaacattcacggtgggagagggaccatctgacgctgccatggcttcgagatactcacggtcgtttttggataagccttgcaactccgggatgcacacggcgttatcaaggtcaatacgtgcttcctcgatacctgccgtaacatcagcgtcgatgatggtatccgagtcccgcatgtctgcggcatcccagatatggtagccaaccagttgaatcatataggggtatccggctgtcacattggctgcagtgcttaattgagcgtcggtgatggacatgccggaggcgcggaatgttgtggcgaaagcatcacgcacttcatcaagaggaatatctgtgagcatgttcgttttcgcgcgacgtaggaacgtgatgacttcgtcattgaacaaatcagaaatcatctgtgggagaccggcgaacacgatggcgatattgcgtcgttccctgatttgatgctgtatggcagtggcgatggcaatcatgtcggatcgctcagccgcttgagtctcatcaatggtgataagcaacccagcatggcgcttctcaagcgcatccaaccgtccggcaatggcacttctcaacgtttcgggcatacgcttcggggatagttcggcttctccgaggccgatgcccgctccagcaaaagtcaacgatggtcggatagtgaggtggtcaagggcccctcgcccggttcgtaaggcatcaacaaggcgttcgcatagtccggcagaggccgtttcttcgatgacatcccatctgcgcgctttggcccggtctccgaacacagtgagcatcacggtttttccggttccacgagcgccggtgacaagcataatgcgccctggggcaccgactccgttatcgagacctttctcgaaatcgcggataactttgcctcggccgatgagcaggggcggttcccctcctgccgttggcttgaatgggttttcctttgccttcatgtggaccgcctcctcgctgaatcaacctaaaataaaaattatcaaaaatatcaaaaaaataaaaattatcaaaagttgggttgagccgactgaagaaaacagccgtggcgacaatgattctgccgcaatccgcggtgacaacaactgacgcggaccttcttggcagaatcgttgtttgtcccgcttcgccaatcaacgtcgctcaagttcggtgcgcagaccggctaccgtagcggtcagctcacgcacttcctcgcgcaataggtcgatttcgggattggctgatgttgcaatagcctcttgcgcggcttccttggccacttccttctcccgagcgtcctcgcgccgatccgtctccagattgacctgatccacgatccacgaggccagcgtggccgtcacaataccgatcaacgcgatgccggtgaacatcagcaccaccgcaatgatcttgccttggaaggtgaccggcgagaagtcgccatatcccacggtggtcacggtcacgaacgcccaccacaacgccgtgccgaagtcggtgatcgtggatccggacgccccgcgctccacggaatacacggccagcgcgcccacgtacatgagcattcccaccgcgccgaccgcgtatacggtgatgcgcccgcgcaccgccatgccggaggtgcggttcagcacgtgcagcacggtcagcaaacgcaacagtcgcaagggccggagcatcggcagcgcgatggtcagcagcgtgaacaggttgtgcttgaaccaccgccagcgatcgtcggccaaccacagcgagaccacataatcgacgacgaacaccacccagatcacgttgatgacggtttcacacagcgcgatatgcgtgcgggagagaatttcccacgaatacaccaccagaaacaccacggacagcaccatcagcggccagtccgtccacttcttccacgtcttcagtcccatattccgattgtagtggcgcgtccgctgcgccactgcggagcatgactccggacatcagtgttgtatacgttcgtatacatttcacgttgtgtacgaacgtatacagcggtatttttcatctcgtatttcccttatgactatcaccacagtgatataatcaagaatatgtaaggagagagaaggagccggccaatggagaccgcatcgatcgaactgtggcatggctcttcgcatgtcatcaagcatcctgaatacgggctggtcaagccgaacaacgattatggccgcggattctattgcacgcgcagcgtcgagctggccaaggaatgggcgtgcgcggggctggatgacggtttcgcgaatcggtacacgttgaccacggacgggctcctcttcctggacctgtcccagccgccctacaccatcctgaactggctggccatgctggtcgaaaaccgtcgtttccagccgaccaccgccgtcgccgcgcaaggcatcgaatatctgaaacaagtgtttctgccggatgccagtcaggctgacgtcatcgtcggatatcgtgccgacgattcgtatttctcgttcgcccgcgcttttgtcaataacgcgatttccatcgaccaactcgctgaggcgatgcggttgggcgagctcggcaagcagatcgtactcgccagtcctcaggcattcgcggcactgcggttccaaggctgcgaaatcgcccgcgcttcgacctaccacggattgcgtaacgagcgcgaccgcacagctcgcgaagcctaccgccgcaaaagtgcagaagccgatctcgacggcctgttcatgcgcgacatcatccgcgagaaagtgaccaacgatgatccccgcctatgatgagacatacttgccggacgccatggccaacttggccggcgccttcgattatgcgctgaacgattgcgggttgccggtcggcctattcatggacttcttcgccacctccgaggcggccgcgcttttcgggcgaggcacgcccaaatacgtgtgtggcatgtccggcgaggagctggtggccgaaatcatgcggcaaaccggttgggcgcgcattctcgatatgccgccagccgcactgcgcgccggctcaacacccgaatactgggccggatgggtactcgcatactgccaatggaccaggagagtgcggttctcggacattctcgatgtgctgtcgctcgacgatatcgtgcgactgtacccgactctgcacgaagccgacgaaagccgattcgtcgacgtgtacgacgagcgggccgcccataatcgcaccgagggcgactcccggctgcacacgatccgcgtgcgcgccggactcagccaatccgggctggcccgccgctccggcgttaccctgcgctccatccaaatgtacgagcagcgccgcaaagaccttggcaaagctgccgtctccaccgtgctcgctttggcccgcacgcttggctgccgcatcgaagatctgttggagccgtaaagacgcggagtagtatcgcgccgcatcgattctgataactgaacaactacttttaaggcccggccggatgctcgtttggacatccggccgggtcttctggctccacacggggtgccgaggtatccgttctccgcttcgaggggctgatttggccttccgtagaggtttactcccgtttcgaggggctggtggcccgctagaacacgggtataaacggcttcgccccaccgtcattccgccattttggggatgcgcttacttgagtaccagcccctcgaaacggagatagatctccggaaagggtcaaaacagcccctcgaaactcaagatggcggttgcagggcggttgaggatcagtcgaagagcggttcaaacgcaaatgtgaacaatgccacatgtgattgggcgggtcgctgcacgccgattttcgggggtgcatgggaatggcggaatatcaacgaaaaaccctatatctaggtttgttatgtgacacgcgccactacatatagtgccttgatttcaaatcacaccgctgtaatatggccttcgcttcactgttcatcagaaccacatcaaggggagtcgccatgaccgtcaccgtgttcaccaagccgcattgcccgcagtgcgatgccaccaagcgccagctcaccaagctgggtgtgccgtttgaaaccgtggacctgacgcagaacccctccacccttgagcagctgcaggccgccggtttccagcaggctccggtggtcatcacgccggacaactcctggaccggctaccgccccgacctgattcgcgaagtcgcccagcaggtggccgccgacaaccgcgccgccgccacggtgtccgcgtgagtctgagccagcccgaattcgcggccgaaggcaagacgatcggcgcattggtctacttctcgtcggcctccgaaaacaccgcacggttcgtggccggatgccgtttgcaggacgaaggcatcaacgtctaccgcatcccgttgcgggccgccgacccggcgctaaacgtccgcgaaccgtacgtcatcatggtgcccacctatggcggcggcgtggtcaagaaagcagtgccgattcaggtcaaacgcttcctcaacgatccagccaaccgcgagtggattcgcggcgtcatcgcctcaggcaacaccaatttcggtgaggcctactgtgccgccggagacatcatcgccgccaaatgcaaggtgccctacctctaccgttacgaactcatgggcaccccggaagacactgccgccgtgcgaaacggcctcgtccgcttcttcaccgaacagtaaatcttgaccccctcgaggtattggctcccctctccgaggggagctgtcaacgaagttgactgaggggagcaactgtctgagtaaacacacttctgccatattccaaggatttccaatgactgacctcaccgccaccggcctgccgctcgacaatactgccgacaccgcagcggaacagtacgacccggcgcacgattaccacgcgctcaacgcgatgctcaacctctatgacgccgacggcaagatccagttcgacaaagacaaggccgccgaacgcgaatacgtgacagggcacgtggccaccaacagcaagcggttcgcctccaccgccgagcgtctcgaatacctgatcagcaaccagtactacaaccctgcggtcttcaaccagtactccgctgaattcctcgaccgcatctacgagcacgtggaatccgccggctttgagttcggcactttccttggtgcgttcaagttctacacgtcctacgcgctcaagacgttcgatggtcgcctctatcttgaggacttcccgcagcgttgcgccgctgtggccctggagctcgccgccggcaatgagcagcaggccatcgaatacgccgacgaaatgcttgccggccgcttccagcccgccaccccgaccttcctgaacctcggcaaggcccagcgtggcgaaccggtcagctgcttcctggtgcgcatcgaagacaacatggagtcgatttcgcgcggcatcaacgcggccctccagctctccaagcgcggcggtggcgtggccctgctgctgagcaacctgcgcgagctcggcgccccgatcaagcacatcgagaaccagtccagcggcgtgattccggtcatgaagctgctggaggactccttctcctatgccaaccagctcggcgcacgtcagggcgcgggcgcggtgtacctcaacgcccaccaccctgatatcctgcgcttcctggataccaagcgagagaacgcggacgagaagatccgcatcaagtcgctggctcttggcgtggtgattccggacatcacgttcgaactggccaaacagaaggcccagatggccctgttcagcccgtacgacgtggagcgcgtgtacggcaagccgttcgccgacatctccgttaccgagcattatgacgagatggtggccgacgaccgcatcaagaagacctacatcgacgcccgtaagttcttcaccaccatcgccgaactgcagttcgaatccggctacccgtacatcgtgttcgaggacacggtcaaccgcgcgaacccgatcgaaggtcgcgtgaccatgtccaacctgtgctcggaaatcctgcaggttcaggagccgagcgcatacaacgaggacctcacgtatgcgcatgtcggccgcgacatctcctgcaatctgggttcgctcaacatcgccaaggcgatggatggcggcttgggccacacggtggagacggcgatccgcgcactcacctcggtggccgagcacaccagcatcaacgcggtgccttcgattcgccgcgccaatgaggagggccacgccatcggtctcggccagatgaacctgcacggcttcctggcccgcgaaggcatccagtacggttctgaagagggcctcgacttcaccgacatgtacttcatgaccgtggcctaccacgcctaccgtgcctcgcacgcgctcgccgtggagcatggccgcacgttcgccagcttcgctacgagcgactacgccaagccggccggccagggcaactacttcgacaagtacaccgatggtcgtcgttcgctcactccgcgcaccgaacgggtccgtgcgctgttcgaacagtacggcatcgcgatcccgactgcggccgactgggaggccctgcgcgacgcgattctgaaggacggcatctacaaccagaacctgcaggccgtgccgcccaccggctcgatctcgtacatcaaccattccacgagctcgattcacccgatcgcctccaagatcgagattcgcaaggaaggcaagatcgggcgcgtgtactacccggccgcctacatgaccaacgacaacctcgggtactacaaggacgcctacgagatcggctggaaggccatcgtcgacacgtacgccgaggccacccagcacgtggatcagggactgtcgctgacgctgttcttcccggacaccgccaccacccgcgacctcaataaggcccagatctacgcctggcgcaagggcatcaaaaccctctactacatccgcatccgccagcaagccctggaaggcactgaagtccaaggctgcgtctcctgcatgctctgatcgttcgagggagcgtataccgcctttcttcggcactcgacgtaccttcgtacgccttcggcctcagacggcggtctccgcacgcattgaacaaccagagagccgttgttactcccctcactcggctaacgccgacagctcccctcagagaggggagctggccgcgaagcggactgaggggggctccaccatctaaggaaccaacaatgtcacgaaccatctatagagcactgctccggctgaccgcgccggaggagttcgaaaacaagtccaacgacgataacgacaacgacaacgacaacgagtaataaggaacactcatggcaccgatttccattccgcgcaaaccgctgaaactcatcgaccgcgtctccgcaatcaactggaaccgcctcgaagacgagaaagaccttgaggtctgggaccgcctgaccggcaacttctggctgcccgaaaaagtccccgtctccaacgacatccccagctggcagaagatgaccgaggacgagcacacgctcaccatgcgcgtcttcaccggcctgaccctgcttgacaccatccagggcacggtcggtgccgtgagcctgattccggacgcgctcaccccgcacgaggaggccgtgtacaccaacatcgccttcatggaatccgtgcacgccaaaagctactcgtccatcttctccaccctgtgctccaccgaacagatcgatgccgcattcgactggagcgagaacaacgagtttctgcagaagaaggcggaaatcgtgctcgactactacgagggcgacaacccgtacaagcgcaaggtggcctccaccctgctcgaatccttcctcttctactccggcttctatctgccgatgtacttctccgcgcacgccaagctgacgaacaccgccgacgtgattcgtctcatcatccgtgacgaggctgtgcatggctactacatcggctacaagtaccagaagggcatcgcccagctgagcgatgccgagcgcctggatctgcaggactacacgtacgacctgctcaacgagctgtacgacaacgaagtggagtacacccagtcgctgtacgaccgcgtgggcctgaccgatgacgtcgagaagttcctgcggtacaacggtaacaaggcgctgatgaacctcggctacccggctttgttcccggctgagatttgcgatgtgaaccccgcgatcctggccgccctgagcccgaacgccgacgaaaaccacgacttcttctccggctccggctcctcctacgtgatgggcaaagccgaagaaaccgatgacgacgactgggatttctaagggtttcgcggtccgcgaacccgcagcgccgccgcgttcgcacgacggcgctacgctggaggcatggaacaggagccgttggtcagcatcatcatcccggtatataaggtcgagaa

SEQ ID NO: 264 - DNA, 32141 bp, Unknown
  R101_18m  MAG No. k141_59868
gcaccaatcggcacgtggtgaccgttcttggcttccctcggtgaggggagccaaggatgactacttcttcctgcgcaactccgacggcagcacgaagtgcatgttttccttgatggtttcgacggacttcataccggtgaagcccaagttttgcagagcgtcaatcacaccggacaccagttcgtccggcacggaggcacctgaggagacccccacggactccagtccgacgaaccacgccggatcaagctcgctggcatcatccacgcgatacgctttgccgcgcttccccaagccctcctgcgccacctccatcagtcgcacggaattcgaggagttggccgatccgacaatcaccacgcaatcggactgctgggccaccagtttgaccgcagcctgacgattcgacgtggcatagcagatatccgaactcggcggctcttgaatccacgggaacttggccttcagcgcggcaatggtgccggcggtctcatccacgctcaacgtggtctgcgagagcagcaccagcttggtgtcgggcgcaaaatccaacgaatcgacatccgattcatgctcgatcaagtgcacatgttcggggttctcccccaccacgccgactgcttcatcgtggcccttgtgcccgatatagacgatttcatacccctcgcgcacgaaacgcagcacctcacggtgcaccttacccaccagagggcaggtggcatccaccacatgcatgccacgacgttcggcttccgccttcactaccggagatacgccatgggcggaaaacaccaccggaatacccgcttgggcagcagcatccggaatctccgccaattcctggacgaacaccgcgccttgcccggccaaatcctcgaccacatgcttgttgtgcacgatctgccggcgcacatataccgggggcagcccatcctcgcgcgttcgctttccggaagcctccgcggctttgagaatggtctgtacggtaagaatcgcacggtccacacccgcgcagaagcctcgcggatcagcgagcacaacgcttttggtcatcggaacctcctgaacgtcaatagtgttttccagtgtaaggcagggattacaggaatctgccgtcacaacttttccgcgtctcccacgaatcaccggtttccaaggaatccacgtgcttctcgcatgatggtgtgagactcgtcactccacgtattgctaccgtgtctgtacgaattgtttattatatgccggctatcgccaatccccgcctcgatagaggagacgcgctagactggggccagcgatagcaggagctaccggcccaccaacctcactacgggagtgattccatgacgagtaaaacaccacgcaccggaaatcagtattcgattcactatggcgattattccgccgtcatctgcgaactcggcgccaagattcgccgattcgattatcaaggcaaggaaattttctgcccgttcggagtcaacgacctgacccccacctgtaacggttatgtgctggccccgtggccaaaccgcatcgaaaacggcgaatacgatttcaatggcaagcattactgcgcgccggtcaacgaatatcatcccgcaccgcgcaacaacgcgaaccacggatacgcctaccactacatgtggaagcttgaatcgttgaccgatagcgccgtgacgctttcactgcgcttccccaacctggacggatacccgttcgatgtgaccgtgaccgtcacatacgaactcggcaacaacggcatgaccgtgaccgtcaatgcccgcaatgatggcgacgagccggcaccgtgggctctcggcctgcatccgtggctggccaacggcaagcagggcgcgacttccgccgagcgtgacgccgactccgccgcctgccacctgcagatcaaggccgccagtcatgtgacggtgaacgaggcgctgattcccaccggcaccgaaccggttaccggcatctacgacctgaacgatggcccgacgctcgaaggccgcgcctttgatgatgcctgggtcgacgtggagcgtgccgccgatggtacgaccaccaccacattcacccgcccggacggtattgaagtgaagctcattggcgatgagacgatcaatgcttggcagtgctacaccgccactggcgcgccgttcgccgagcatccgtatggtatcgccgtcgaaccgatgaccgccccggccaatgccttccgcactggtgaccacttggtgacgctcgcccccaatggcgactacaccactgtggtccgctacgaagtagtccagaagtagttccgttacgctggctcccctccagaggggagccaattttttatccttatgtgccgccgcgtcttgggacttatgcgatacgattgtgagcggtaacaatctgtttcacaaaggagtgtgcactatggctttgaagcctcgcactggtaaccaatatgtcatctcgtccggcgaatggagtgccgtcgtcaccgaactgggtgccagcctgcgcgagctgaagtggcgcggcgaagacctcatcgtccccttcgacccgaacaaggtcatcccctgctgcaacggctgggtgctggcaccgtacccgaaccgcgtgaccaatggtcagtattctttcgatggcgaagactaccagatgccgatcgacgagttcgaccgccaatcctccctgcacggctacgcctaccgctacatgtgggagctcgttgatttgcaggaatcacatgtgacgctctcctggcgctcccccgacatcgccggctacccgtttgatatcaccatcaccgccacttatgcacttgacgagaacggtctcacggaaaccttcaccgtgcacaacaacgacagcgtgaaggccccatgggcatttggcatccacccgtggctggccaacggcaagcacgccaccggtcaggccattaccgccgacaacgagtcctgccgtcttgagctgcactgcgatacccacgtgaccgtagacgaacacctgctgcccaccggtgaagagccggtttccggcatcttcgacctgcgcgataaccccacgctggagggacgtggcttcgacgatgcctggaccgatatcaccaaccgcggcgaagacggcagcacttccgccgtgttcacccgccccgacggcatcaaggtcacgctgaccggcgacaagaccatcaactcctggcaggtgtgcaccggcaacgaaatcggcgggaaggctcgtcaggccggcgtggccgtcgaaccgatgaccgcctacgccgacgccttccgcaccggcaaggatctggttgtgctcgagccgggcgatgactacaccaccgtggtcaccttccacgccgaacaaatctgaaaaaccgaataaccaagcctgacgatcatcgccacatggacacccgtgttgcatcacgtcgtacttatgtggcataattccgaaggcttatttttttactgcagcaaaggagtccatcatgggcatgcgcggacgtaagcgcaaggatcgtcgtaagaaggccgccaaccacggcaagcgtcctaacgcctgattcttcgcgtttcttatagaacgctcaaggcccgtctgatgatacatcagacgggccttgttgtatatgtgtcgttacttatcttcgccgcagcagtgatcaagcgtggccttgagccgggccatcagacattcgggtgccacatccgggcgcaagtaggcacgcaacgcggcaatcaacgcctgttcacgctcgtcgcagcaggtacgggggtcaaaacagtcgccctccgtaacgatatgcacgtctgtctggaccgacgcagcggccgagccggtatctactgaacgatgatgcaccgccgtgatatgcacttcggtctggcttaccgtgccatcggccgccgtacgggttatggagatatggcgagtacgctctaccggctgatcgttcatcagatctcctttcccgaaagcttgcttgactgttgtggcgtgtgggcgtgagtcgcatgactatgtctcactacggcttgcgtgtcgccattgctgccaacagttcgttcactactttcattatggccggaatcggcgattcgaccaacgttttcgctcaacttcgcggatggtgaaccagccgacgaaccagtcgcgtacccgcgctctttcgcatacgaggcgagctcacgcttgagttgcgtgcgggcgcgattcaggcggctcatcaccgtgccgattttcacgccctgctcatcggccacctgttggtaggacttgccgtcgatggcggcgtcgatgaacacctgccggcgttccggcgagagtttggcgagcgcggccatgatttcctcgggcgcgaaggcgtccaaatattcctcttcagcggacttgagcccgtccgacgtatgttcggcggcatcgtaaatgtcccaatcgtcgtattcgccagtggagtcgttggcacgctgcgggcgccgcttggccttggcatactggttgaagtaggcattgcgctcgatggtggtcatccacgcctcgaagttggagcccggctgaaatgagtcgaaggccttgaacccgcgttcgaaggtgtcctggaccagatcctgcgcgtcatcgggattgttggtcagcctcatcgcctgccggtacagtgcattgacggcgggcatggcgagctgttcaaatctggcgcgcttggctgccatggactcgcccgatccggctgactgcccggattgcatagttgcttcgcttgtcgtcacgtttcaccattctaatcaaatcatgtgcccatatcgtggtcgatgacgtgtgagtcacaacacgctgcaccccacctgtagaatggcgtatcggctagataatagggagtaacaattatggctttgactttggcttcggccgctgacctgctcaaggaacaccatctgctgcgtgaaatcatccaaggggatgtctggaccgacgacccggcccgtatcgcttcggcggatgaaccgttcgccggcatcacctacgacacccgcaaggtcacgccgggcaccctgctgtgctgcaagggccgattcaaggccgagtatctgaacggcatcgacgaagccggcctggccgcatacgtggccgaaaccgagtactcagccgcaaccgccgcccccggcctgatcgtcaacgacgcacgcaaggcgatgagcctgctgtccgccgcgttctacggatatccgcagaacgagctcacggtcatcggcgtcaccggcaccaagggcaagacgaccacctcgtacttcacgcaggcgcttatcaacgccgtctccggcggcaaggccgcattgttctcctcggtcgataattgccttgacggccacacctacgtcgaatccgatctgaccacgcccgaatcgatggacgccttccgcatgatgcgcgaggcggccgataacggcatggagtatctggtgatggaggtctcctcccaggcgtacaaggtggaccgcgtctatggcctgactttcgatgtggccgcgttcctcaacatctcccccgaccacatcagcccgatcgaacaccccacgttcgaggattacctgtattgcaagcgccagatcatcgccaacgcgaagtcgctggtactcggcgcggacagtctgcacgccgatctgttgcgggaggacgcggcggcagccggcatcggcgtgaccaccttcgccctgcatgacgcggataatgccggcaccagtgcggacgtcgtcgcctggcccgccgacacggcgcacgcctccttccacatcgccgacggagatcagacccttggcgactaccatctgtccatcgatggcgacttcaactacctcaacgcggcggcggccatcgccatcgcccatgcggctggcgtatcgctcgatgacgccggcgcactgcacgccatcgaatccgtacgtatcgccggccgtatggaacagttccgcgatccgcagtcgaacacgctcgccatcgtcgattatgcgcacaactacgcatccgtcaccgcgctgcttgacttcgtctacgagcgttggggcgaggaaaacccgcgtatcacgctggtgaccggatcggccggcaacaaggcctacgatcgtcgtaaggaaatcgtcgaggctgccgagaaccgtatcgcgaacttcattttcaccgccgaagatacggacaccgagccgttcatcgacatctgcatggaaatgcaaggctacatcacgaacaaggatgtggcctccacggtgatttccgaccgtccgacggccatcaccaacgccatttacgatgcccgtgcgcacgccgaccgattcaacatcctgctgatcatcggcaagggcaacgagcgttggatcaaggaccatcacaagcatgtgccgttcgacggcgacgatcacgtggtcgaacgcatgtttggcttgtgacgggattccggccaatcagatcctgatcggatcccgattggcccacatcagatcacgcgcaatacgaccaaaccagaaacacgacatacggatacgaacgaaaaaggatagctgaatcgtaatgatcacgttggagaaagttgacggagccacactggaagccgaagccgagaaggccggcatcacgttgcccatcgaacagaccaaggtttggtctggttttcaggcggatatcgacggacgcacaccatggggcgattatctgatcaagcgtgatggtgaattggtcgccgtgatctcctttatcgattttgagacgcacggttatcattatctgcgctcgatgcatgggccggcgtgggtcgccaagcccaccgaggctgaggagcgcgaggtcgtcgacgccatcgtggacaccgtcaagaaggccgacaagaacatcgcgttcctgcgtatcgacacctggttcgccgatggtacggagaaggtgctgtccacagtgccgtacgaccagaccgtggtcatcgacgtcaccggtggcgatgatgagattctggctcggatgaagcgtcgtggacgccgtgacgtgcgcaagtctctgcgcgagtgcccggccgaggttgccgatgagacggataaggcgctggccgatttctccgaatattacgatgtgatggtcgagaccggccagcgcgatggattcacgcctgctccgatgagcgactactccgatatgatcggcgcgttgggtgccgatcattgccgtgtgttcgccgcacgtattgaagaccgtgtggtggcatggtcgattgtcaccgtgaacggcacacatgcggtgcgctactatgccggcatgcgcaacgaggttatgcgtctgcatgtgaccgacaagctgctgtattccgaatgctgcatcctaggctcgcagggtattactgaatacgatctcatgggcatcggctccgacttcgcgccgtctctcaagggccttaacgagttcaagtgcaagttcaccgaggaaatcaccccggtggcccccgcccgcgacgtacccatcaagaaggtcttctacaagacgctgcagactgtacagggcgtgcgcaaggcattgcgctaataccgccccgctcccgctggcgggagctgtcgaacgaagcaagactgagggcggtctttcgatatggaccgccctctgtcacctgtggtaccagttcctgccagcgggaaccattcgtttatcgttcgagtttttgactcaccacggctgttacgccatcggctctcatggttacgccgtaaagcgcgtcggcaatcgacatggtgcgttgctggtgcgtaatgatgatgagctgcgcatgggcgcgtagctcattgaacgcattaatcaaacgggtcaggttcacgtcgtccaacgcagcctcgacctcgtccatcacatagaacgggctggggcgggcggtgaaaatcgcgaacagcagcgccagcgcggtcagcgaacgttcgccgccggacagaagactcagctgtttgacgcgcttgccggccgggctggcctcgaccagtacgccggtggtgagcatgtcttccgggttttccaggcgcagtcgtccggtgccgcctgggaacagcgtggcgaacatctgctcgaatgcctcggcggtatcgtcgaacgcggatttgaacacctggaccatcgtggaatcgagatccttgatgagctgcatcaaatcgtcacgtgatttgaccacatcgttgcgctgatcattgagatacttgttccgctcctcaagcgcttcgaattcctcggtggccaaagggttgatcttaccgagtgcggccagatcgcggcgagccttatcgagacgcttcttctgctcctgacggttatacggcacggtcttaaagcgggcggaatcgccgttggtgccggtctctcccccggtttctccctcttcggtcccagcctcagcttccgtctcatccaacggcacagggttgccctcatcatccagcacgggcaccggctgttcggggccgtaaccactaaccaattcctccaaagtgagaccgagttcgtcggacactttctgcatgagctgcccggattcggcggccaaccgttcgcggtttacatccaaggcatgttcgcgcccggtcagatcggtgaccttgggctcgatctggttgcgctgcgcgcgcagggccttgagttcctcgtcatggctggaagcggcggcctgcagctcgtctcgtttggcggccacgtcatgcagcgtatgctccaccatggcggccactgctcgcgcgtcatcggccacgccttgcaggtgtgcggcctgctcgcatctgcgatcgttcaacgcctcgatgcgggcgcggcgttcggcggcttctctggcgttgtcccgcagcagcccggcctgtcggctcagtgactcccctttgcggcttgcttcggtccacgcgattttcgcggcgacctcatgctcgcgagtcaggttcagttcgcgctccagcgtgcgttcacgttcatcaagttcgtcgaaatcggcatgttccgctgtggattgccgggccgatgccaaagcgcgattgagatcgtcgagcttgagctgatgctcgttgcgattctcttgggtctcggtgattttcctatccagctgctcaagctgacgggtgaacgatgcgacgcggtctgtggcggatttcagagatttctccgcctgttgggctttgagccgggcttcggtgcgtttggcggattcctggtcgacgagtcgggccgcttcatcgcgtttggctttggcctcggccacttgctcagccattccgccgtcttgggcggccaactgtttgacctgtgccaatgctttgtctcgacgggcggccagagacaggtccgattgagagatggaagagccgccgaccgccgccacgccgtgtgtgaaggtctcgccgttcttggtgacggcccgcatggcttcgccggatgccacgatgtgctgtgcttcgtcggcggtgccggccatggctacatcagccagcaggagacgcacggtgtgcacgacagcttcggcctgtgccgggttctttgcatccgggttcgcggtgacgagtgctgccagcgcgttgcccgattgcggggcggccgccgtgttctcggcgctactctcctccgactccgtgcctggctctgtggcgggatcgccggcaatgctcgcggtcagcaccacggctttgccgagcttatcttcccgagcgcgttcgagggcgtgcaacatgttgcctgcctcgggtaccacgatggcgctggcatactggtcgagcgcgtgggccacggcttcttcccagccttcggccacatggatgaagtcggtgagtcggccaagcgaggccacgtccgtgtcgcgttccaatgatccggaggcattgcggctgcctagcgtgtcggcaagcgcatcggccttggatttgagcgagatgatcttggactgtatctcgcgctgcttatcggcgagttcgttcagtcgttcgcggcattcggcgagcgttgcacgcgcggcgtccaatgcggcaccgtcatcgtcggcaatggagtccgcttcgctgcgcaatgcgtccagctgttgctgggcatcgtcgcgctgggaagtcagcgagtcgcgttgggaggcgtaatccttggcgcggctggtcgccagttgtacggcggattcctcgcgggcgatgagttcgcgcagtcgggcgatttgcgcatcgcgttcctgtgcggttttgcgcagttccgtcaaggtctggcggactgaggcaagctttttctcgtcgtcggcgcgttcctcggtggccttgtcaagtgcgatgcgcgcatcggccacggccttggtttgtgccgcggcctgagactccagttcctcggctcgtttgacgagcatgccgggatcctcaccgaagttggtgacgatctggccggtgagtgaccggctgcgctcttcggccaactgggcgagcgcgttcagtcgttcacgggtctgtgagaattcatgccagtattggttggccttggcgatggccggactggattcagagctcaacgcctcgacctgttcgatgcgtactttggcttgggcgagttcacgttgggcgacggccagctggttgcgcacatcgccaagctcttgacgtaccgtgtcgcggcggttcatcgagcgttgggcgtcttcggcatacagacgagcttgggcgtcgcgtacggatatctgaatcgcgtcggcgcgccgggagatgcgtgcctggcgtccgagggggccgagctggcggtgaatctcccccagcaaatcgtcaagtcgactcaggttcgtttcggtattggccaacttgcgcaacgcgcgttccttgcgcttgcggtgcttcaggatgccggcggcctcttcgatgaacgcacggtgaccggacgggtcggccttcagaatcgcatccaatcgtccctggcccacaatcacgtgcatctgctggccaagaccggtatcggagaggagttcctgaatgtcgagcagacggcattgcgagccgttgatcgcgtattcggagcctccgttgcggaagatggtgcgggatatggtgacttccgtgtaatcgatatcgagcgtgtgatcggaattatcgatggtcaggctcacctgtgcacggcccaatggcgggcgggaggacgtgcccgcgaaaatcacgtcctccatcgaagtgccgcgaaggtttttggcaccttgctcacccatcacccaggtcagggcgtcgacgatgttcgacttgcccgaaccgttggggccgacgaccgccgtgatgccgggctcgaagcgcagcgtggtggcggaggcgaaggatttgaatccgcggagggtgagttccttgagatacatggcgtgagactgttttccgtatgtcgggcgtccgggtatccgatatgccttggattcgggttaccgggcgtcggcggaatcgtcggtgcctgtgtcggcactggccgtgccggtgccggcgttaccgacgtcactggcctgttccttgccgagaccgaggacgtcgaacacgtcgaagtcgtccgggctcaccgaatcctcgaggttgtcggcggcctcatcctcggccttgtctgccggccgatccgaatcgtccgggtcgaccgccggctgatggacggccatggcctgcctcatcgtggggctggcatgctcctcaagcatcaggcgtgcgtcgccggcggtgacgaagctgccgcagataagcacgccgtggccgtagcccacgcccagctcgtcctcggcatcgaccatgttgacggcagcctgaatcgcgtcgggcaggttcgcttccttgatcacacggtcacggccgaacacgtccacggcaatcttctcgagctcatcggccggcatcacacgctcgcgccacgagttctcggtgaccaccacggagctcaggatcggctccagaacacccagatattcctcgacctgcttgtcgcgcatcatggcgaccacgccgaccagctgcttgaagtcgtagctttcctctatggccttgcgtagggcttcggcggcattcacgttgtgtccgccatccagaatgatggtcggtgaggtgcggatctgttcgatgcgtccgggaatcttgaccgagctcaacgcctcgcccaccaagtcgccgtccagcgggccattgaccggaatcaccacttcagaggcggcaagcgcggcaagcgcgttgtgggcctgatgctcgccgaacttggcgatcggcacgccctcgtaagtgccgttgggcgtggtcagggtggcgacctggccgccgactgcggccatacggtcggacacggtcatttcgtagccgtcgcgcacgagcatggcgtggttgcgttcggcggcttcggtgagaatcggcatgacggcttcctcatgcggctgaggcccgatgatggcggtgcagttcggcttgatgatgccggccttctcggtggcgatctgttcgacggtgtcacccagccactgcatgtggtccatgtccaccggaccgatgatggccgcatccgcgttgagcacgttggtggcgtcccacaggcctcccatgccgacctcgacgatggccacgtccacgggcgtgtcggcgaatttccagatggccatggcggtgagcacctcgaagaagctcatcttcggcttgccttgctcctccatcttggcgtccaccagggccacgagatccttggtctggtcccagatgtcgatgaaatcgtcgtcggacagctgctggccgtcgatggcgatacgctcgttgatcttctccagatgcggcgacgtgtacaggccggtgcgcatgccgtaggcgcggcagatggcctcggccatgcgtgcggtggagcctttgccgttggtaccggtgatatgaatcacgcggaacgactgctccgggtggcccaggatgtcgagcatcaggttcatccggtcgagatccagattggtggtgttatgctccggcgggcggctcatgatgtccagttcgacgtcccgcatgctctcgttgttccgattcggatgctcgaatgacatatcctcttctgacctctgctcgtgttgctgttgaaccgttcggagtgcgtatgccacttacgtgttcgtgccattctcgtcatgtctacgcatgcccgcatatattccgcttccgcatgcgcaggaagctcccctcgcacaggtttgccctgcatggttcgggattcttgccttcacgcgtggagtcacactcctcaattccctctatcctagccaccggggtggtttatcgtgcgcgcacagtgaaaccgtctcatatgtcgccgccgcgcgggcggccttttcctgcagcgcgcgcagtgaaaccgtctcatatagttgcaatgcggctcttgccgtcggcatcccattcttagtcggctgcaatccaaaacttgtatgtccggcgacgctgatgctattcagcgtcggtacagtgccagcttctggcggtacaccgacgctatgatgctcttgcgagtcggcagctggccaaaacctggattaatcccgactccatcgcctctcagtgtcgcctcctcgccaaggcatgccattctgccgtcgctgagaaatttcaacatcgtcaatcgaccatgtcttgccccggaaacgactctcacaaacgtcctctacatcatcttttgaactcgcagaggctcattcactgttatgactgctctcaccgtcggcagccgtccaagccctggatctatgccgccaataaattgcagcaaatcgtcggccacgatacaaccattggactcacgccgacgctagattccacactcagacagaagccagccaatatctgaaccagcaccgacggcgtacaaagcataagcactgttaaccgtcaattcgccgccctctaccagctacatccgtcttcgccgatgatatcttgttcgaatccccaaagcacgttgttcgaatgacattactgatggtggataagttttgtatgttatccactattccgaattagcggcctaataccttgaaattatcgggaatatctcactccaagacagccaagctccgaggctagaaccacaatggctgaaattcatacttacgctgcttcgttccggctacgctcgacgtcatgaagacacacaaagcagtggcctcgctcatatcagccgcgcagaatgagctgagatgcgtctattcaagaaatgaagcggaacagaccgctctacgccgccgtgcccagagtggcgagttgttgaaagtgtatgacggcattcccagtctttatgcaaataccgcatactgggatggtttgacgccgccggagcgaacgttgcatatggcccgcgctcttgcgcaagagcatcctcagtgggtttttggcggcttggtggcagtaagtgcttatggattcgaacatcaatggcatttgcatgatggctgcataaccatcgtgacttccgatcatggatctcgtcaatgccatcagcgcttacgacatgtctatatgcccgatatgaacaatccgaagacacattacgaggcctccggcctatccctgatatcaccggctagaaccttggtcgaggccgctatagaccttgattttcggtttgcgttgccgatctttgattcggcccttgccaagggaataaccaaggaagagatagccgccgactgcgttcaatggagaatcgattatgcccgagtattccgcctgctgcgctatgcaaacgaaaggagcgagaatggtggagaatccctcgcgcgaggcaccatcatcgaggatcgcttcctcacgccgcgtattcaggtaacggtgaccgacccgcagacgaataccgagcaccgcgttgatttcgtatggaagctcgatgacgggcgcgtgatagtggccgaatacgacggcacacaaaaatacgtggacccagccatgaccgataaccgcagcattcaggaggtggtggccaaggaacgagcacgcgacgagggactgaaacgagccggtgccaccgaaatcgtccatttcacatacgccgacgtcatcgaacgcactccgctgcgggtaaaactgctcaaagccagagtgccccagatggaggcatccgcagagcagcgggtcccgtgatgcgatgaaccttcatcgcatgggttcacatggattcagcccgcaaaatatgccaatatcaatcggcaagctccagcccatacccctccttccctaccgagaacaataaacgggcccgcattccagcccgatgcactcgccatatgggcatgtccggaagaccgtccaaattccgtacttggttttaccgtcagccgtcaatcgtggcacatcgcataaagccgactagtatgaggtgggaatcgatgattcgacaacaactacatacaggagagtggcaatgggtgaagtgatcaccgccaaggacaaggaatatgaggccgaggagcgcgctacggcgccgggcgcgaaccagtcgatgagcgaccgtgtgaacaaccgctcgctgcgcccgcagtcggctgcattcaaggagtttatgaagtccggctgggccgacgatgatccggagatcaagcctctcgaatcctccaagttcacgccagcccgccttgaggcgctgggcaaagccttcccgggcgagcgtctggtcattccggccggccagccgaaggtgcgcaacaatgattgcgattacatgttccgcccggacaccacgttcgcctactacaccggtctgggttccgattacgaggccggcgccgtgctggtcctgaacccggtcgaccccgactcccccgaagccgccgccggcaagacgcacactccggaactgttcgtggcacctcgcgccgacaactccaccgaggacttcttcatgtccgcccactacggcgaatactgggttggcccgcgtgctggcctcaaggagatgcaggcgatgaccggcatcgagacccacgacatcgcccagctggccgacgccctgtccaaggacgtgggtgccgaggccggcgccgtgcgtgtgcgcgtggtcagcgagaccgatcccgaaatcacctcgatggtcgagtccatccgcgaggccaacggtttcgccgatccggacaagaactccgcatccgacgacaagctgcacgagttcgccgccgaggcacgcatggtcaaagacggctacgaaatcaacgagatgcgcaaggccgtggacgccaccaagcacggcttcgaccgtctgctctccgcactgccggccgcgctcgacaagccgcgttccgagcgtatcctcgaaggcgcgttcaacgccgtgtcccgtgagctgggcaacgccatcggttacgactccatcgtggcctccggcccccacgccccgattctgcactggatgcgcaataccggtgtggtgaagaccggcgacatgctgctggtggatgccggcgttgaggtcgattccctgtacacggccgacatcacccgcaccttcccgaccaacggcaagttcaccgacttccagaagcgtctgtaccaggccgtgctggactcgcagcaggccggtttcgaagccgccaagccgggtgccacctattccgacatccaccacgcctgcatgcgtgtgatcgccgagcgtctgcacgattggggtctgctgccggtgagcgtcgaggagtcactgtccccgcaaggccagcagcaccgccgttggctcgcctgcggcgtggcccaccacctaggtcttgatgtgcatgattgcgcgcaggcccgctatgagtcctatcagggcgcgaagatcacgcccggcatgatcttcaccatcgagcccggtctgtacttccgcgaggatgatctgctgattccgccggaataccgcggcatcggcatccgtatcgaggacgacgtgctcatgaccgagaacggccccgaatggatttccgccggcatcccgaagcagatcgacgacgtcgaagcgtggatgcggagccgtaaagcaatcagtccggtggactgattgtaggcgacgccgaacgctgacaagcgcgaggaaaatgaaatcatgcgcgaagcgcaccatattaagcaggctgcccaagccaagtaacccttaagctccctcatcagagggagctcctttttttctactaaggaggcaatgtgcctactccggaatttgtgttggaattgcgtaagaagatcggccatgatctgctatggctcaatggcgtgaccggttgtgtactgaacgaacatggtcaactgctgttgggccgtcgttcggacacgggcgaatgggcgatggtctacggcatcaacgagccgggcgaacagccggcggacacggtggtgcgcgaaatcaaggaggagacgggcatcgatgccatcgtcaccgatttggtggccgtcacctcgtcaaacaaggtgctgacctacgccaatggcgacaacaccatgtacatggatcattcgttcctgtgcgccctgaagcccggcggcaatgccgagccgttcgtgggcgacgaggaaagcctcagcgtcggctggttcgatctggatgacctgcccactcccctggcggccagcacgagcgagcggctggagctgttccatacttacatcgagaacaaaaagcacggcgacgcccacgccctgttccagttcgatgggcagcagtactagcggatataaagttagctccctctgacgagggagctccaatgctatgcgattacgcctcttgggctaggagctcgtggaggtgggcgcggtgctgctgctgttcgcgcgggtcgggcacgggcagggaggccagcagcttcttggtgtacgggttctccgggtgctgcataatctggtcggcatcgccgtgctccacgatctggcccttatgcatcaccatgatgcggtcggcgagcatatcgaccaccgccaaatcatgggtgatgaacaggcacgcgaagccgatttccgcctgcagtcgcttgaacagctccaacaccttggcctgcaccgacacgtccaatgcagaagtcggctcatcggcgatcagcagcgacggcttcaacgccaaaccacgcgccaaagacgccctctggcgctggccgccggacagctcatgcgggaaacggttcatgtaggcgcgcggcagctggaccatctccagcaggtcgcccacatagttcttggcctcggccacggaaccgtacttgtggtgcacgagcagcggctcggccacattctccgcgatggtcatcagcgggttgaacgaggagcccggatcctggaacacgaaaccaatgtccgcgcgcttgggcttgaagtcacgctccttgacgccgttcatctcgatgccaagcacgttcagggagccgccggacaccttctgcaggccggcgatggcacggccggtggtggacttgccggaaccggactcgcccaccaggcccagcacttcggagcggtggatggtgaagttcgcgccgtccacggccttgaagtcgggctgcatgagatggcccgggtacgtgatggtcaggttcttggcctcaacggcgatcggctgttcgcgccaatcggccttgcgctcgatcggcttgccctcgcggtcgcgcacgaccagcttctgaccgatgcgcggcacggcacccagcagtcgcttggtgtagtcgtccttcggatggtagaagatctgctccacgtcgccctgctcgaccacgtggccgcggtacatgacgaccacctggtcggcgatgtccgcgatcacgcccatgttgtgggtgatgatgagcacggaggcgtcgaactcgtcacgggcgaggcgcagcaggtcgagaatttcggcctgcacggtcacgtcgagggcggtggtgggctcgtcggccagaatcaggccggggttcagcaccaacgccatggcgatgacgatgcgctgcttctggccgccggagaactggtgcgggtagtagtccacgcgggtttcggcatccgggatgccgactttcttcaggatgtcgatggccttggcgcgcagttccttcttgtccttcatgccgtgggcgcacaggccctcttcaatctgccagccgatggtgtacaccgggttcagcaccgaattgggctcctggaacaccatcgcggcctcggaaccacgcacttcgcgcagctgttcgccgctcagggagagcacgtccagcgaatcggagccatcgcgcttggacaggtagacggcaccggaggtggtggccgtctccggcagcagcttgatgatggagcgcgcggtcacggacttgccggaaccggattcgccgaccacgccgaccacggtcttgcgcggaatggtgaagttcacgtcctcgacggccttgatggaaccggcgtcggtcatgaaggagacggacaggtccttgatatcggcgagattcttgttgtcttcgctcatctctcactccttgccttccggcttgccttcgccggtccattcggaggcgacgatggtcgggtcatggtcggtgacggtggccggcgggtcgacgttcgcgtcgagttcggcgatcacctcgttgcgtgcggacggcttctcgtttgggtcgacggacgtgtcttcgatcgatccgaccacttcgccggcggacttgcgggcgcgcagacgcgggtcggccagatcgttgagcgattcgcccacgagcgtgatgccgagcacgataagcacgatggcgatgcccgggaacacggcggtccaccagatgccggcggtcacgtcggaaaccgaacggttcaggtcgtagccccattcggcggcggcggtcggctcgatgccgaagccgaggaagcccaggccggcgagggtcaggatggcttcggacgagttcagcgtcaggatcaccggcagcgtgcgggtggagttcttgaacaggtgcttggtcatgatgcgccaggtggaggcgccgaccacgcgcgcggactcgacatacgcggattccttgatgcggatcacttcggcgcgaattgtgcggaaatactgcgggatgtacaccacggtgatggagatgccggaggccaggatgccgctccacaggccggactggccgtgggagatcatgatggccatcagaatggcgagcagcagcgaggggaaggagtagacggcgtcggcgatcatcaccaggatgcggtccacccagccaccgtagtagccggacaccagaccaagcagcacgccggcgaagatggagagcagcacggccacgacgatggcgatgacggcggtgcgggcaccccacaccacacgggagaacacatcgaatccggcggcggtggtgccccagatgtgttcggcggagggcgcggcctgcgccgggaaggacgtgccgtcggcggccttgatctgggcgtggccgtagggggcgatcagcggggcgaagagggccacgagcaggaagaacgcggtgatcgcgagaccggtgatcagcatgcccttctgccagccgaccgccacgcgcagttccttgatgattggaatcttggtccagaacggcgtcttggtgctgacgttgagcttggtgaggcggtcgtcaccggggacggtgatcttgtcggaggatgcggtggtcatctcagtacctcactctcgggtcgataagcgcggcgatgacgtcgacgaggaagttgacgacggccacgatgatggcgataaggatcacgatgccctgcacggccacgaagtcacgggccttcaggtactgggacagcatgaagcccaggcccttccattcgaaggtggtttcggtcaggaccgcaccggcgagcatcagggcgatctgcatgcccatgacggtgatgatcgggatcagggccggccgccaggcgtgcttgttgagcaggcgcttttcggagacgccgcgcgagcgggcggcctcgacgtagccggaattgtaggtggagatgacgttggtgcgcaccagacggatgaacacgccggcggtcagcaggcctagggcgacggccggcagcacggcgtggcgcagcacgtcgacgagcacgttcatgtcgccgagctggatggcgtcgatgatgtagaagccggtcggcgataccagacgggtgaactgcatttcggagttcaggtcggagcggccggaggctggcaggatgttgagccagacggcgaagatgagcttcagcacgaggccgaggaagaacaccggggtggcgtagcacaggatggcgaagatgcggatgccggcgtcggcggcacggtcgcgtttgcgggcggcgagtcggcccaggccgatgccgacgatcagcgccacgatcagggcgaggaaggccagttcgaatgtggcggcgccgtagtgcgtaaggatgctgatcaccggctggttatcggtcagcgtcgtgccgaggtcgccgtgcagcaggccgccaagatagtcgacgtattgcacgatcagcgggcggtcatagccggccgcgtggatgcgctgctggagttcggcgggtgtcaggcggccgcccagggcggcggaaatcgggtcgccggtggcgcgcatcacgaagaacacgatggtgaccagaatgaaaacggtggggataatgaggaggaacctcgtcagcacgaagcggaagaaactacctgacagtcggttcttcttcgtcttggctttcgccggagtggtgctggaggtcgctgtggcgctgtctgacacgcgatgctccttggtgttggtaatcggtatataaagcaataaaggctcccctctccgaggggagctggcggcgaagccgactgaggggagtcatacgagttgggctcccctcagtctgccgtcgccagacagctcccccctcaaagaggggagctcatgctggatcagcccttggtgacggaggcgtagcggaagcggaaggaagcgtcgagggtgacacccttcacggaggtgccggtgacggcgacctgggcaccctgcagcagcgggatggtggagaggtcttcggtctcgagtttctggacctgcttgaggatgtcctcacgggcggaggcatccttctcgccggcctgcttgacgatcaggtcgttgacttccttgttggagtagccgttgtttacgaagttgccgtcgcggaagaacggggacaggtagttgtccgggtcggagtagtccgggaaccagccgagctggtagaccgggtacacaccgtcggaatcgtcggtgaccacgcggtccttggagtactgggtccattcggtggactgcagatcgaccttgaacaggccgccttcctcaagctgggacttcaaggccgcgtactcgtcggcggaggcggagccatagtggtcgctgttgtactggagcttgaggtcgaccggggtggtgacgccggcatcggcgaggaccttcttggccttctcggtgctcggcttgccgttgccgtcgccgtaggcggacttcagcgtgtcatcgtgaccggccaggccgtccgggatgaaggagtacatcggggtgtaggtgcccttgtagaccttggtggagagctcttcgcggtcgatgaggttggcgacggcctggcgcacggccttggccttgttagcgtcggcgtcgggctgggattcaccgtagggctgaatcttgaagttgaaggcgatgaagcgctcctcaccgcccgggcccttgacgaccttgaccttggagtccttggagaggtcctcgatgtcggtcgggctcagggagcggtaggccacgtcgacctggccctgctggacggccatcttcaggttggaggcgtcggcgaagtacttgacctgcacggcggagttcttggccggggtcaggcccttgtaggagtcgttcttagcgtaggcggcggactcgttgatcttgaaggcggtcagcgtgtacgggccggcgaaggccttcttggagacgatggtgtcggcgtcggtgagcttgtcggcgtcgaaggtatcctcatcgacgatcgggccggcggggctggacatgacctgcttcaaagtcacgtcgaaaggcacggaatccttgaacaccacggtggtgtcgtccttagcggtcacggattcgacgttggcgagcagggagctcgggccgttcgggtcgttgatcttcttgatgcggtcgtaggagaacttgacgtcggaagcggtcaggtcgttgccgttggcaaacttcaggccgtccttgagcttgacggtgaattcggtgccgtcatcgttccaggtaccgtcatcggcggcgatgtccgggctcagctcggaggtgttgtagtcctgggcatacaggaacgggaacacctggatctgcacggcgtaggagccgttgtcgtaggagccggcggggtccaggctggtgatcttatcggtggtgccgatggtgatggcgttgccggaatcggcgcctgcggtggtgtcatccttcacaccgccgcaggcggtcagggatgcgatggcggccacggagacggcggcggccagaatcttcttggaattcaacaggaatcctctctcataacttgtttccacgccatcactgcgggcgtggattaccgcctgactatggtgaggatgtgttactcctgcgtttccacagccatcgacttatgtttcgcttgtggcgaccatggccggttttatgcggtatcgagcagtattacggattcttgtattacgacgtgaataacgttcaaatggtgagatgaacatgctatcatgtcaccatttgaacatgcttgtagacgaatgctttccattcgtcaaccggtcggcctactgctacttgagcttgcggcccgcgcaccacacctgttcgaccgtccaatcggtcggatcggcaaggttgaaatcggcggcgaagccgggggcgatgaggccgataggcaccccggcgaccgggttcggccggtcgaagccgaacgccttggccggcgtcaatgtggcggcctcgaccgcgtccaccgggctcaagcccagttcgcacaccgcacggcgcacggcgacctccagcagcagagtggagccggcgatggcgccgttggagaccaaacgcgcatgcccgtcgaccacgttcacgtccagtgcacccaacttgtaggcaccgtccgggcagtcggtcgcggccattgcatcggttacgaaggccgtacgatgaggcgcgaaccggaaggagaggctcaccatcggatcctgcacgtgaaatccgtcgttgatgagctcgatggtgacgcgcggatcctccaccgcggccggaatcggaccgggctcgcggtggtgcaggccgttcatcgcgttgaacatgtgggtcatgatgcccgcgcccgcgtcgaagccggctttggcggtctcgtagtcggcgtcgcagtggcccacggccggcaccacgccggcagcggcgaactggcggatggcggagatgccgtggggtagttcgggggcgatggtgatctggcggatgcagccaatcttgccgttcgccgcgcctgaagcctcaagcatgtcgtcgacgatgtcgggtaccggatccttgagacattccgggtcatgtgcgcccttgcgggccagagccaggaacggaccttccagatgacagcctaggatgtcggggcggccggactccatcttggcgcggacggtgcggatgttccggcagatcacgtccacgggattggtgatcagcgagagcacctggcgcgtggtgccgtgcacggcgtggccggcccgcgccacatcgatgccatccgacccgtcgtcgaagctcttctcccatgcgccgtgcgcgtggatgtccacgtagccgggggtcagaatacggccttcggcgtcgatgaccgcgttgcgatcggccgggtcgagccccaccgtgcggcagtagtgctcgaaggcctcctcccccgtgccggccgccacgatgacgccggcggcatcggagacgacccaatatccgcgccgttcgccgcacgcatccaccttgcgcgcgttgcgaatcgccaccggagccggcttgccctccagtgccgcggtcacgcgcgagactatctcgttcctatcagacatgttgttctccttaccgctcatgcgctcccgccaacgggagctggctcgcgaaacgagactgagggtggtccaatcgggaagcaatacacatatgccgccgccgataaccaccctcagtctcattacattcgacagctcccctcacacaaagagggaagccagcacacgataactcagatgccctgccaggccggcttgtgggtgtaggcgtagcgatagtagtccttgtggcgcagacgagaggcggcctcctcatccacgataatcgtggcgtgcgggtgcatctgcagcgcggaagccgggcagaacgcggacacgccgccttccaccgtctcctcgatggcttcggccttgccggcaccgaacgccagcagcacgaggtgacgggccttcatgatcgtgccaataccctgcgtgatgcagtgggtgggcacttggttgatgtcgttgtcgaagaagcgcgcgttgtcgatgcgggtctgttcggccaaggtcttgacgcgagtgccggaggccaacgaggaaccgggctcgttgaagccgacgtggccgtcggtgccgatgccgaggatctgcacgtcgatgccgccagcggcttcgatggcacgatcataggccgggccggccagcgcgactttgtcgccgtcttcgagcggagtgccgttgagtacgtcgccgggcacatggaccttggccgggtccaggccaagcggttcgaccacggtgcgatggatggtcgcatgataggactcgggatgggtcagcggcagcccgatgtattcgtcaagcgcgaaaccacgcacgcccgaaacgtcaatggcctcgtccttgacgatcttggcgagcgcctgataggcggccagcgggctggagccagtggccaggcccagcacggcgtccggctttgctttgatcaggtcagccacacaacggccgtagatctcgccggcctcggcttcgttcttgacaatgatgatttccggcatcggtttcctccagttccgtgcggcccgcccgatgcgagtcgctgtaccgccgcccgtcttgcggataatggcaacatccttgtcacgtccgggtgccgcgcggcgttccaaccaccgttcggcgtagcgccgattggtgattcgctatttgttaatgatagtaacaattttggacctcatgaacactcacggtgtttcctgacgcttcacacaggtacactggaatttattagtgaagtttcataacagtttcaacgacgaaattgcgcttcaccgtctaagctgtgtatggaacaacaatcgccgtccactcgctcaccatcaggtaggaggaaacatgtcatatctcggtctcaacacaacgaccgacgaccatgcggccaaggcttcccccgccgatgtgcgccgcaagaaccgccaacttatcttcaggttgttgttccccaccaaccagtattcgcgcgccgagctcggccgacgcaccggattgagccgcgtggccgtttccgatgtggtcggtcggatgctggaggaaggattgctgcgcgagaccggtcaggcacccagcggcggcaaaggcaaacgaggcacactgctgagcatcgatatcgatcgactgcgcatcatcagcatcgacctgacgcaggagcacctgctgcacggcgcagtcaccaatctgctcggccagccgctgcgtcacgccgaagtcaccctgaacaccggctcattcgtttccgtggatgtgatcatcgagctcattgagaagatgctgggcatgtccgatggcgaggtcatcggcatcggagtcgcctcccccggcgtggtagacaacggcgtggtccgctcctccacgatgcgcggctggaacaatctcgacctgtccacgccgattgccgaacatttcggacttgaagtaaacgtcagcaacgacgccaccgcagccatgctcaccgaacgtttctttggccaaggcgggccgaatatgcttttcgtgcgcatcgaaagaggcatcggttcggcgattctgctctcggacacgccggtaatcggcgaactgcacgcggctggcgagctcggccatatttccatcgatcttgacgggccgctgtgcccttgcggcaagcacggttgcttggagacgatgatttccggaaccgcattgaagaagcaactcagcgcggcagacgtggagcagcatcagggtatccttgctcgggcgggccgctatcttggccaagccctggccatgcctgtgggccttttggatatggcagacgtatgcgtctatggccagccgaacatcatcaacgcgacgttcatcggcgcggcccagcaatatctggatgccgccacatcctcgtccttccacaaacacacggtgattcggcgctgcgaatgcggacctgacatcaccgtgcagggcgaggccatcgccgtggtcttccaacacttggccaaataaaagccggtcaccccggcaacgaaacgcgcaagaccaagcgcggcacagcacgacataaagcgatataggactgcgtgggagatggggcctcggagacaaatctgaggcctcatctcccatgccccggcactatgccaggctacgccgccatggcggcaccgatggctccgactggttggccgacaggtgccagacgcagccgggccggcaggtccagcgtttcgaggaatcggcattgcgattcgcgccggcgcagctcagccgtgatcacctcgaccaatggttcgccggttttggccatgccaccgcccaagatgatgagtcgcggatcaacggactgagccaggatttgtatggtgtcgccgatggcgcgcactaccatgtccagcacatcgacggccttggcctcccgctttttcgcgcgacgaatcaggtcgggcatcggcgggtcggcgttgggccacagacgccccacggatgcgcccgagcagactgtttccaagcatccgtattgcccgcaagggcacttgaggcgatgaggttcgactgggatatggccgatttcgccggccgcgccgctatagccatgcatcagcacgccgttttcgacgatgcccgcagccagtccggtgccgaagttcaggaacgcaatggtaccggccatgccgtccgcaccgcccaatacggtggccgcgccgacggcggcggcattgacgtcgttttccacatgggccggcacgcccgaacgctgcgagaccaacggccccatatccagcgagaccacgtcgagattcacgatattgcccacatgcccgctggccgaatccaccgtgcccggggtaccgacaccgatggccctcacctcgtcaaaacgctcacccgctgcctgatgtgctacagcgacgatgtcttcgatcacggcatcgttgccatgcctggcgggaatacgggcggaacccaataccgtgcccattgcgtcaaccagcacagcttcgatttttgttccgcccacgtcaacaccgattttgagattgttcatagtgttttcagacatcagtcctcccctgttcttcatcgaacgtttcgcttgatatcagtgtgcatccgactattgacaaccatcttaacaaattcccccaagacgacactcacatgcacgacacaccgaacgacatattgattgcgtcaatcaattaacagcgttaatatcttaatcaagttcagattcaaagacgagcggaacaactcgcaacggtgcagacaaggaggacttaagaccgatggcaacaaacaccacccatgccacttcccaagccagtgtctccgaatccaaccgctcccgcatcgtcaagcacctgtatcacaacggcatcagctcccgcgcgcaaatcgccaaggcactggaactcacccccgcggccatcaccaaaatcaccgcacgccttatcgaggccggcatgattgaagagaccggcgatttggaaggttccaagaaccgccgttccatcggtctcaaactcgacaccacgcggttccgcatcatcggcatcaaattcgcccgctcgctggtgcagatcggcgtgttcgacctgtgtggcaacaccctgagctttgaaaacctgcccacggtgtacgacaacaccatcaacgacaccatcgtcaccatccaccagcgcgtcgaacaactgcttgacaacgacccgtccattgtggccatcggcatggcggtgcccggcccctacctgcgtaacgtaggccgcaccgccgtggtgtccagcatgcagggctggcgcaaaatcaacttcatcgacgaattcgccaccgctttccgcgtgcctgtgttcatcgaacaggacgcccgcgccggagccctcgcacattatctcttcgacccgtcggtgcacgccgacggcaacctcgcctattatctggtcggcgaaggcgtgggcctcggcgtcatcgacaacggtcgtctcatcaacggcttcctcggtgccgccaccgaaatcggacacatctccatcgacgtcaacggccgcccctgcgattgcggcaacgtcggctgccttgaacgctactgctccacccccgccattcacgatacgctcatcgccgatggcaccgtggttcccggcgcggccgatatgacccacaccgaagccgcccgcgccctgttcgccaaagccggcgacggcgacgaagcgtcaatcgccattgtccgcgaagtcgcccgatacgtcggctacggatgcgtcaccatcttcaatggatacaatcctgagcacatcatcatcggcgacatcgtgtccgaagccggcccgatactgctcgatgaggtgcgcgccacggtggccgaacgggccatccccgaaatcaatgcctccacttccatcagcctatccaccctgtccgccgacgcggcggtctccggtgccgcagcagtggcggtgacccaattcctcgaacacccctcggtgttcttcgacgtctcctaaaccaagcgccgacatcacaagatgttccatacgaaacacccggtaaaagaaacaaaggaaaggaaaccaaccatgactaccccgatcgttctgagcctcggtgaactgctgtgggatatgctgccgagcggcaagcgagccggcggcgcccccgtcaacttcgcctaccacgcgatgaagaacggcaccgaaggctgggctatcagcgcggtcggcgaggatgagctcggcgacgaactgattgccaaggccaacgaggccggcatcaacaccgtcatccagcgcaacgcctggccgacctccaccgtcgaggtcgcgctgaagaacggcatcccggagtacaccatcgtcaagggcgtggcttgggaccacatcctgtacacccgccagctcatcgacgtggtctccaaggctgacgccgtctgcttcggcaccctggccctgcgctcccccgaatcgcacgccaccatcacggagctgctcaagcacaccaagccgggcgcgatgaagttcttcgacatcaacctgcgtggcgaccactactccaaggacctcatcgaggaactcctcaaggcggccaccgtcttcaagatcaacgacgaggaactcctgctgctgcgcgacatgttcgacatccgcggcacctccggcgaagacgcctcccgctggttcatcgaggaattcggccttgactacgtgattctgaccgccggctccgcctactccaccatcatctcccgcaagggcgaggtctccacgctggacactccgcacgtcgaggtgaacgacaccgtgggtgcgggtgactccttctccggcaccttcaccgcccgcatcctgctgggcgacacgctggcagaagcccaccgcaaggccgtcaacaccgccgcctacgtctgcacccaggccggtgcctggccgcagtacccggccgagatgcccgactatctggctgaaatcggcaagtaatccacccatccccttatccgccattcgtgcgacttcacgaatcgactgatcgcaaccggtgagattctccgaacaggaaatctcaccggtttttcatatggtgcgctcacactcatgctcttcacatcctttcgcgtgtcatgaactaaagcggtttagaataatgctgttcccttgatatgcatatccctcaaacaaagaagttgaatttatgacgaccaccgcgataccgaagtcggtctcggatttcatgcagcacatcacggacctgtgtggcaccgaacacgccgcctgggccgagaacttcaatgcctgctttgccgacaccctgaccaccacggtcaaacggcatgacgacggcaccacattcctgcttaccggcgatatcccggccatgtggctgcgtgattcgaccgcgcaattgcgcccgtatctggcccttgccgccgaagacagcgatattgcgaacctgatcgccggtctgatacggcaacagttccgctacatcatcatcgacccgtatgcgaatgccttcaacgaggaaccgaacggcgcctcctgggacaaggacgaccggtccgatttctccagcccttggctttgggagcgcaagtacgaggtggattcgctgtgctaccccatccagttggcttggatgctgtatgcgaacaccggcaacgccgatcacttcgatgccgaattcattgccggcgtcaagaagattcttgacgtcttcgagaccgagcagcatcatgaacgctccccgtatttcttcatccgcgacacggacatccccaccgaatcgctgagcaatgacggcaaggggtcgccggtggcgtacaccggcatgacctggtccggcttccgccccagcgacgacgcctgcacctaccactatctggtgccctcgaacatgttcgccgccgtggtgatgggctatctggaacgcatcttcggcggtgagattctggatgacgccgatatcgccgcccgtgccggcgagctgcgccgcaccatcaccgaaggcatcgaagcccacgccaaaacgacgaaccgcaatggcgagacgatttacgcgttcgagaccgacggcctgggtcacgtcaatatcatggacgacagcaatgtgccctccttgatggcggccccttacttggggtactgcgcaccggacgatccgac

SEQ ID NO: 265 - DNA, 3496 bp, Unknown
  R101_18m  MAG No. k141_60626
acgcgtacatcatccactggaacaccaaacgccgccagatacgactggagggacacaccccggaggaattccggaacatgtccctcacagcctaatcaggtacccttaataaaccacgtccaacaatcggggcgcagttcagacagagggagcctcattcaaatctcacacgatggtgagggtgatgacggtggggttgccgttggcatcgcgcaagcgaatcttgccgccgttggataggtccgtatcgccacttttcacggtacgtaccgtgccgaacaggccaccgagcaccttgtcggttttcacctcgaacccgagaccttcaagtgtcttggttacggcgctttcctgtttgccgacaaggccggacggtatcgtcgccatctccggacccttggaaatcaccacgtccacgctatcgccccacttcagctgggctccggcttcctgagacgcggaaatgacttgaccggcctcgaccttgtcatcgtactgttcggtgacattggccgtgagcttcaactcgccgagcgcggcttgcatctcatcctgggtcttaccgacgatgttaggcatggtcaccggcatcggtcccttgctcaaagtaatcgtcacctcatcgttgtgcttggccgtggtaccgggaccaggggagatcgtcaatgccacaccctgcggcgtgtccatcgaatactcatccttcgactcgtcatgcttgacattatcgaagccggccttcttgagcgcgttcaacgggtccttgccattggccgaattcgcgtcgagaatatccttcgggatggtggtcatccgcacgcccttggacaccaccaccgtaagctcctgattggctcgcttgcttatgcggctgttcacaacggccttggtcttgttcacggaagaagagatgatcttgccttccgccacgtcgtcgctgtattccttgtgcgtcttgtaggggatgccgagagccttcaacgtgctctcatacgtggcccaatccgcgccggccaacgagcattcggtgcttgcattcgcatcgcaggtcacgtcatccggcttgggcacactccaatagctgcccggtccggcaaaccaccaccagccggcggttccgccgattgcagccagtaccagcacgatcaccagtacgatgatgagcggttttttgctgcgctgcttctttggcccggtgccgttggaagcgacgtccggctcatcggaaagggcaagcgctcgggtgaaggcatcgccggcctgaggcagcacttgtgtctcgctgccggactgtgccatgatttgcgtcttatggggagccgaagcatcggctggcgtcgacgaatcaagtgccgtggtgggggcgaccggaggagccggaggattgacgtctgcggcgccaccggtatcgacggtattgcttgcgacatcatcggccaaaaacgctggtacggacggcttgaacgttgctgcaccggcaggtacgccggtcagcggggcctgctcggcgatattgcctaccagcgctgcagcggtggcatcggtatgatcacctccaatgggttcggcatgcaaacggtattgccacgcctccagcggcaatttggcggccaactggctcaattcctcagctgctgccgcgccatcggcggggcgggcatccacctgacgcgcggtcagatgggcgatgaacgccgccacggacggatcaatgccctgacagaccgtggccacggacggcacgtcctcatgaacatgcttgaagacaagcgtcaccggattatccgaatcgaacggcaccttgccggtcagcatctcccatgccatgatgcccaccgaatacaggtcgccttgcgcggtggcctgattgttctcgatcatttcgggagccagataagcggcggtgcccaataacatgccggtggagctcaatgtggcctggctggcggccttggccagaccgaaatcagtgatctgcacatggccgcgatcattgatcaaaatgttctcgggcttgatgtcacggtgaaccacgccggcgcgatgtgcggaagccagaccatccagcgtctccgcgaccacgcgcagtgtctcacgtacggagaatgtgccttgggcgttcatctcatgccgcagattgacgccatgcacatattccatgaccagaaaatcaagtccattgaactcgccggtgtcatacacctgaacgatgtgcgggttggcgatggacgcggccgaattggcctcgcggcggaaccgttcgacgaactgctcccgatgcgggcctttggcgagttgtgtgtgcatgaccttaatcgccacggtgcgccccagacgctcatcgatggcctcatacacggtggccataccaccctcggcgatattgcgcacgatgcggtagcgtccctcaatcatctgtgcgggctcgttctcactcatgttgtatcgtacggttcctttaatcacgactaaacatgttcagtgtacatggccccggttacgcggccggagcatcagcgcatagctttcacgggttttcaccggtgttcatggtctcatggtccggcggctcgcattgtggactatcgcaaggatttggggacgaatcgcgcacaagcctcggtcagacggcgttgcgcttcggaattcagctcaagaccggcaatcgccttacgggactcaccccatagggcagcgatgcgctcgcgggatcgatcaagagcaccggtcgacgtgaacagttcaatggtgcgggctacctggtcgtcgttgcgacaatcttcttcgaagatggcaatcagatcggccttatccgccgtatctgccgcagacagagcatcagccaacagcactgtgcgtttgccttctcggatgtctccgccaactggttttccggtattgcggcttgatccgacgacatccaacaggtcatccgccagttggaacgccagtccgagcggccggccgacggccaacgcgcaatgcctggcctgatccgggctctctcctgcggccagcagtgcaagcagcagtggggcgatggtggtgtaactggctgtcttccagcggaatacattcaatgaggcgttcgccagagcttcgggattggacagtggggtcatctcgacggccaagtccagtacctggccgatctccacctcgcgctgcatggtaagaaacgcctcgttcaaggcatcggtgttgggaagacggctggcggaccggtgtgtgatttcaatgcaggcggtggccagaatatcgccaagcatcaggcccaagccacggcctatggcaccgctgtgtacggcctgttccaaggcacggtgtgcggaaggcttgccccggcgcagatcggattcgtcgatgatgtcgtcatgcaccagtgcggccgtctgaaacacttcaatggcacaggctaggtcgatcatggcgtcacgccgatcaggcgtcacgtcgccggcaagaatatcgaaggcgtccaatgcgagcagcgcac

SEQ ID NO: 266 - DNA, 15764 bp, Unknown
  R101_18m  MAG No. k141_60879
atggcagaaaccttcaacgtcgttgtggaaattccgcgcggctccaagaacaagtacgaagtcgatcacgagaccggtcgcgtcttcctggaccgtaccctgttcaccgcaatgggttacccggatgactacggctacatcgacggcaccctgggcgaggacggcgatccgctggacgctctcgtgatgattccgaactccgtgttcccgggctgcgtggtcgagtgccgcgccgtgggcctgtaccacatggtcgacgaggccggcggcgacgacaaggtgctgtgcgtgcccgccgacgttcgtttcgatgacatcaaggacatcgacgacgtcaacgagtaccacaaggctgaaatcaagcacttcttcgagcagtacaaggctctggagccgggcaaggaagtcctgccgggcgactactggaccggtgctgacgccgccgagaaggaaatcatcgcggcacgcgaacgcctcgccaacgaaggcaagtgattcgattccgaatcgtcggcgggagacctctccggaggcctcccgcctttttgattcgacgtgcatcgcgtgatatagtgctggtgtatttttcagctaggcgtaggcggcgtgtaggaacgctggtcgaggcccatcgcacggtaatccggcgatgaaccttctgtcgcaccatgattccgataatcattcaaatcctgcttatttctgtttccgtagctatggatgcattcgccgtatccattggcaaaggtctggccgtatcccgcgtacgagtgcaagacgccgcgaaaagcgccctctggctcggcggattccagatgctgttccccattctcggctatttcgcggcatctacattcagcaaatacgtaacccaattcgatcattggatcatcttcgccctgttggtgttcatcggcggcaacatggttcacgaagccttcgaagaagatgaggaaaactccaaggagaccgcccagttcgattggaagcatatgcttcccctggccgtggcctgcagcatcgatgcgttcgccgtgggcgtgagcctgaccttcatgttcaccaaagcccatatggcattcgccatcctcagcatcggtgtggtcaccggactgttctccgctgcgggcctgtacattggccgcgcgttcggctcccgctggcaggagccggcgcagatcgccggcggcgtggtgctgattctacttggcgtcaaagtgctgttggagcatttgggcgttatcgcgttctgatttagtgtcataagccccttcaccagaaagggctattttgtttgatttcaccgttccaatgcccgacgtaggattgggatggaaattcgattatctgagaggcgtatcatgaccgagatcacccaggagggttggaagaacaaagccctgagcatgttgttggcccaactgacgtcctatgtactgctcatcgcagccacggtcattccctcccctggcaccgtccccatcatccctttgattatcgccgctctgacgttggccgcatttgtcgtattctggccgttccgcggcagcatactggatcgtatcgtcactttggtgtttggcgcgatttctctgattttcgtcatcgtacctttcccgaccggcaaggttccgccggatcagaccgctgcggatggctcggtacttccttggtattcatgggcactggccatgggcctgctgctggtggtgctggtggtcttctccttcgggcgccagatggctcgtgagaagcgcgaacatctcatccgcgccctgtcccacgccgtgacttcaggtgtggcggctctcgccgtggccggctggtgcttcctgcctgatttgggcgcgatgctcgccaagggcaccgttgcgggaaccgttgccctgatcatcctcatcgttttgggactggccttggccgtggcctccacgttgtgggtgcgtgacgccgatccggacccggatatccgctatccgtggatcggtaccggcctgatgccggtaatgctgatgggcgtgaccatcgccgcaaccgcactggtgctcggccgtgtcatcggttgatggacgtctgccgttccatattccgcaaacttgtaacccatgtgtccactacaagcgcgtagaataatgaaaaaccgcgcgaaagcggcataacgccgctgacgactcgtacagccacaccaagcaattgcgtaacacattgcaggataaagggggattagcgtgacggatcttacgttgatgactttcgccagcgaccccgccaccgttttgccatcactcgccctgctttctcatcgcgtccgcgtgctgccgatggatgcagccagcttggtgaagatgccggagaacaccattctgtttctggatgcacgcgatgatctggcgaccgccaaaaccttgtgccgtctcatccacgcttccggcctgtccacgccaatcgtgctggtgctgaccgaaggcggcttcaccgtggtcaactcccagtggggcattgcggatgtggtggtcgccaccgcttccccggctgaagtcgagggccgattgcgattggtctccgagcgcggcaacgctcccgcagccgcagcagccggttctcccgccgaatccaccaccacggtggaagatggccagattcgctccggcgacctcattgtggacaccaacggctataccgcctccctgcatggacgccccatcgatctggcatacaaggagttcgaactcctcaagtacttggtccagcaccccggccgcgtgttcacgcgcgcccagttgctgcaggaagtatggggctacgactactacggtggcactcgtacggtcgacgtgcatatccgtcgtctgcgcgccaagcttggcggcgaatacgaacacctcatcggcaccgtgcgcaacgtgggctaccgattcgacccgccggagacggataaggaaactgccgccgcacagcaggccgccaaagcatcctctgccgccatcggcaccgatgacgatacccccgatctcaacaccgccgcctgacagaccagcagcgccacaaaccatcaatcatcgacattacgccgcttaggtccatacgatgagagaaaccaaatccgcgcgtctcacgcgcatgcatgacgaatacgacattctgcgccaggtgattccggcacccgcttgcgcactgcatttctcgaatccgctcgaattgctgatcgccaccgtactcagcgcccagaccaccgacaagcgtgtcaacacggtcaccccggaactgttcgccacctaccccaccgcccgtgacttggcggccgcgaacccggcccaagtcgaagacatcattcatccgctggggttctaccgttcgaaaacccagcatctcatcggactggccacggcactggacgaacggttcggcggcgtggtgccgcgcacgatggatgaactgaccagcttgccgggagtcggccgcaaaaccgcgaacgtcgtgctcggcaacgcgttcgatatccccggattcccggtcgatacgcatgtgatgcgcgtaaccggacgactgcgttggcggtcggattggcggtccgcacaccctgatcccgtgaaaatcgagaaggaaatcaccgcctgttttccgcccgaagagtggacgaatctcagccaccgactgattttgttcggccgggccacctgccacgcacgtacccccgactgcgccaactgcccgctgtccgacacctgccctagctatgcgccgcccgccggcaagagcacgtccaagcgctaactcatacctcatcatggtgaattgcggattctaggctgaatccaccgctagactgaaaaccatgcagcacagcaagcggaacaatacatggtccaagtgggggatttttctcggagtcgccgtggcactcggcgcactcgtggttgcgggatggacgttcatgcaaaaccggttccagccgggatcatccctcgatgccgatgtgaccattggcatcgacgatatgccgcaatccttggatattcggtccgattcctctgcggcagccgagcgcctgctcgtcgacaatgtgtatgagacattagtgaccgtcgatcaagacaacaagattcagccgggactggcgacaagctggaagacttccgatgacggactgaccgtcaccctgacactgcaatcgggcgtcaccttctcgaacggtcatacgctggacgcctcggacgccgtgtggtcgttgcaacagaacgtgaccaacaaggtggcggacgtcgacgaattgggcgatctgacgtcggtcgccaatccgaacgccaccacggtggtcattacgcttgccaagcccaatccgacgctgctgcgagcgctgtccggcaaactcggcattgtctacgattccgagtcgtccagtgccgattatcaacgcaaggccataggttccggaccattcaccgtggccgatttccagcctggccattccctgaagctggcgcgcagcgatacctaccatggcaccaaagcggccagcaatatcgttgaatttatgcaatactccgacgccgatgcgctcagcaaggccctgaccgacggcagtctcgatatggcggcaccggtttcggcttcgacggccaccggtttgaacggcaaggatggcttgaccgtcaaggagggggccactacggataaggtgctgctggcctacaacaacggcatcgattcgctgctctccgacgaacaggcgcgtaaagccttccgctatcaaatcgacgcagccggcatcgcctccgcccaacccgacgcagccggagcattgggcggccccatcagcccgctggaacccggatacgaagatttgaccggactgtatccgcatgacgaaaaccaagctgggcagatgttctcctacttcggtgcgcaatatctgactacggtgaatctggtggtccccgaagaataccggtcgttggccgaaaccatcaagcagcagatcgagcggcagccgcgccccacggtgaaccttgaagtgctctccgatgaggattatgccaaacgaatcaaggacggcaaatgggaactgaccgtgatgagcatggacggcacggatgatgccggcatattcgccgaccccgattccatgttccattacgaccataccgaagcgcaacaggcctatgcggatgctcgcgccgccactaatgacgccgattatgaggcacgaatgaaggcgtacgcccggctgatcagcgaggatgcggccagtgattggctgtatacccgcaaatgcttcactgtggcgtccaccaaggtctccggctacccgacctcgatgatcaatcgccgcatgccgctggccgggttgacggtgaagtaggcaaccttcagtcacggacgggctacgcccgatagtccttggctcactatcgttcgatcgttcgtacctcgcctgcgaacagcctactgggctgtttactgtacagttcggcttgtcatgcaacgtgcataaactttggctttatgactgaaggcaaatccatcatcaacgccaacctcaccccgctgcccgacaaggtcggtgtggacggacttgaggacaagtggcgcgccgtctgggatgaagacggcacctacaaattccgcaatacccgcgaccgcaaggccgtctactccatcgacaccccgccgcccaccgtctccggttcgctgcacgtgggtcacgtgttctcttacacgcacaccgatgtgattgcgcgctacaagcgcatgcgcggctacgacgtgttctacccgatgggttgggatgacaacggcctgcctaccgagcgccgtgtgcagaactactatggcgtgcgcgtggacgtgtctctgccttacgacccggacttcaagccgccgttcgagggcactgatggcaagaagatcgacgccaaggatcaggtgccgatttcccgcaagaacttcatcgagctgtgcgagcgtctgactgctcaggatgagaagctgtttgaggccctgtggcgcaagctgggcctgtccatcgactggtcgcagacctaccacaccatcggccagcacccgcggcgcgtggctcagaaggccttcctgcgcaaccttgcccgcggcgaggcctaccagcaggacgcccccggcctgtgggacgtgaccttccagaccgcagtggctcaggccgagcttgagtcccgcgaatacccgggcttctaccacaaggtggctttccgctttgaggacggcaccccgatctacatcgagaccacccgccccgagctgctggccgcttgcacctcgctgatcgccaacccgaatgacgaacgttacaagcagtacttcggccaggaagtctactccccgctgttcaaggtcaaggtgccgattctggctcacccggccgccgaaatggacaagggtgccggcatcgccatgtgctgtacgttcggtgatgtgaccgacgttgagtggtggcgcgatctgaagctgcccacccgcccgatcattcagcgcaacggccgtatcgtgatggacaccccggattggatcaccgacccggccggccgtgaggtctttgccgaaaccgctggcaagaccacgttctccgcccgtaaggtcatcgtcgacaagctgcgcgagtccggcgatctggacggcgagccgaccccgaccaagcgtatgacgaacttctacgagaagggcgacaagccgctcgagatcgtcacctcccgccagtggtatttgaagaacggcggtaccgacgccaagctgaacgccgagcttatcgagcgcggcaaggaactcgagttccaccccgacttcatgcgcgtgcgctacgagaactgggtgcacggcctgaacggcgactggctgatttcccgccagcgcttcttcggtgtaccgttcccgctgtggtacccggtgaacgcttccggcgagccggattacgatcgcccgatcaccccgagcgaggatcgtctgccgatcgacccgaccatcgatgtgccggaaggctacgacgagtcccagcgtgatgtgcccggcggcttcaccgccgaaaaggacatcatggatacctgggccacctcttcggtgaccccgcagatcgtgacccactgggctgagccggatgaggcctccaaggccctgttcgcttccaccttcccgatggaccttcgcccgcagggtcaggacatcatccgcacctggctgttctcgactgtggaccgcgcgcacttggagaacaagtgtctgccgtgggcccatgccacgctgtccggctggattctggaccccgaccacaagaagatgtcgaagtccaagggcaacgtcgtggtgccgaacgagccgatcgagaagttcggcgcggacgccgtgcgttactgggccgccgccgctcgcctgggcctcgatgccacgtacgacatcggccagatgaagattggccgtcgactggccatcaagctgctgaacgccaccaagttcgcgctggccatcggccgtgaggacgagaaccatcacgtgggcgctgccgccgagacctcgtggaacccggccaatgtgaccgaaccgctggatcgcgccgctatggccaagctggctttggtggtgcgtcaggccaccgaggcgctggaatcctacgagcattccaaggcgctggaagtcatcgaatcctacttctggcagttctgcgacgactacatcgagctggtcaagaaccgcgcctatggcactccggacgagcacggcaatgtgccgtccgagaaggctgtgaagtccgcccgcaccgctctgggtctgggcttggacgccttcgcacgtctgctggccccgtacctgccgtacgccaccgaggaagtgtggagctggatgcacgccggttccggttccgtgcatcgcgccgcctggccggtcgtggacccgtatgtcgaggccgccaccggtgcttcccccgagctgctgacttgggccggcaaggccgtggagcagctgcgtaagatcaagtccgaggccaaggtctccatgaagaccccaatcctgtctgtggcactgtccgctgcttcggaaggtgtgaacgcgattcacgccgccttgggcgatatcgcgcaggccggtcgcgtggtcggcaagttcgacttggtggccaagcacgccgaggaatccgccgccgaagacgcgcccgaaaccgaggtcgccgtcgaagccagcgagctcggtgagccgccagccaagaagccaaagcactgagcgttgcgcacaacaacaaaagaggggaacctcctattgaggttcccctcttttgttttttgacgttcggatgacacgactgtgggacggcacgcaaatatcccgcattgtaagctggcggcccacaatagcgtgggccaccacgcgtgtcaaacgttttatatacgcggcgtcccacagaccgaatcaacagatccttggaatttagccattcttcaaactatagttagctctgacttacaagagggtgtgggacgccgcatcgaaaaagccagtttttgatgcggcgtcccacaccgataacgcactttacgcatattgggcacctgtcgcatgcagattttcccgcatacaccatcacaccgtcggaatcacgatgaggtatcgggtttcggcggttttttgttgcgtattggggctatcgagctgcgcgacggcctgcgccaagagcgtgccagcatcgctgatctccacggtctcattgatcagcgcgctcatgtcatgcttgagcagcgtgccgccagtgccaaagccgaacagtactggagcggtgtcaagattgttgccggaatcgccagtatcgctcgacttggctgagtcgttcgttcccgaaccatcgctcttggacgaatcgaacttacctccaccaccgatggccgaagtaagaccacccgcatagttcatcacatcgccagcagacatggacatggtgtcatcgaccagtgaggccttggaatgctgcgactgctgctgttgcgcggctttggcctgcttacgggcggcatcggccttacgcttggcttgggcggcccgggtcttgccgtagaacgattgcgattgcgaatcgaccaggccagtcagtgcctgagcctcggtcaccggaccggaagagacatcaccggacgagccatcgccatcgctgccggaagccgaggacgcgactccttcgaactgatcggagaatcgcaatacaatctggcgcaaggccgtggctttgcccgtatgctcggaggcggtggcaagcgtgctcatcgcggcatcgaccttggattgagcgtcggcgagttcatcgctaccgttggtttcggcgatggcttggctctcgtaagcggtggcgcccgaagacgtgccgccggtcagggcgctcaaattggccgtgtagacgtccgtgtatttcatcgaatacggaatcattgcggcggagagctggctctggccatcggcgtattgcttggagcctcgagtggcttcctccgaagcctcggcggtcagatcatccaccagtccggtggtgccttgctgctggatgcggcgaatcacctcatccaacgcatcgaccgcaccggcatgctgatgtgcggcactgacgttgttcaccgcgttggccaagtcgagtacggcttgcgccaaaggcgtatccccggacagttcgccggccgtgcccatcaacgccggcaactgggtggaggtaccaatcgatccagacaggtgcgtggtatatgagcccacatacgcggccatatagtcttcaaacgtccgcttatgggcggtttcgcgttcggccactacggacttgtccagcgcacgctcattatcgcgcagggtttgaagctgctcgatgagctgttgatgctccccggaaccggcgtcggtcagtgaatcgaccagtatggcggcagaggcgacgagttgggcgacatccgtatcggcagcaggctgtgcggcggcattcgcggcatcgggattagcaccaaccaccggactgctggaattggaaggcaatacggcgagcgccacggaactcatggagaagtctttggcgttcatatagcagctgaattccaagccggttgcggcttttccagctgcggcgactacggtattggaaccttgcgtggttaccgtaatggagttgtcagcggaaacatcatcggctacctgcgtaggcacggtaaaggcgacaaccgggatcgtacggttggcctccttggtttgcggcttaatatcgatatacacgccgatcagtccagatgcgccggcaacctcgtttgcctcgacgtttggaccgtcaagcgagtaggtgacgctgactttccatggcagggtggcggcggaagcggggatacgagaaaccttggacgtgccggaattactattggcggaatcggtatcagtggaaccgctattgccggaatcggcactggcgccattgccggcgccgcccttccctaccacataccaacggaccggctccccttcggcatcggcgacggcgtacatatcacttgccgtagcgagcaccggaccgtaatcaaccggagtcggacgagacatccaagcaccgccgagaatcgaagccacgcacaatgcgcaactgaccagtgcggcaccacatctcatctacgtatcccattcatacagtcggccactatgggcattccattcccgtattaatgtagtcgctgccggcaacttgccctatagacgaatatccgaaaggtgcccattcgctgcgggcgaatcaggcgaatacgtcgagtacgcccgggtcaccaccggcatcggctatgcgctggtggcgcttcttggcttcggtaaccacgaattcacggtacatttcggcaatttccggatcaagcccggcatcgatggcgatgcggtggaggcgttcgatctgatagtcctcacgcttggtgtcttcgggcgcgaatccggcgttggctttgagcacgccgacctgcgaggtggccttgaaccgctcggccagtaatgcgatggccgccgaatcgatgttatcgatggtttggcgcagcgttttgatgcgcgccaccgcttgtgcggtttccgggtgggccgccgcctgggcggagtcgatggtggtcctttgccagccgctgctcgtttcgctcatagatttgaggatactcccgattgcggctttgcacgatgcgcaaagtcagatatctcagatgtcatagtcgccgtaggggatatggctggcatccgcatcgccgaacatggccgcaccattgtccactcccaaaacaatcgaacccattgatacatctttcatctcatatatcgtcagcgtgcatgtgaacgttgacggcaatactacaactgcaatgtgatagttgatgtatttgcatcatatacggcaagggctgcgccccgtatcaatcggggtgcagcccttacactattgttcagcggtctggtcagttgccgttgaccgcgttgccggtgttggcctgctgcacgatggcggcgaggaagtcgcggttggtggcggtcttcttgaggcgcggcaccagcgtctggtaggcctgctcgggctccatgcctcccagcagacgacgcagacggtagatgaccggcagttcctgcggattggtgatgagctcctcgcggcgggtgccggaagcgttgatgtcgatggccgggaacagtcgcttgtccgccagctcgcgggacaggcgcagttccatgttgccggtgcccttgaactcctcgaaaatcacctcgtccatcttggagccggtttccaccagcgcagaggagatgatggtcagggagccgccgttttcgatgttgcgggccgcgccgaagaacttcttcggcgggtagagggcctgcgcgtccacaccaccggacaggatgcggccggaggcgggggcggcgatgttgtaagcgcgagccagtcgggtcatggaatcgagcagtacgaccacgtcctggccgagctccacaagacgcttggcgcgttcgatggccagttcggcaaccgtggtgtgatcggaggccggacggtcgaaggtggaggagatgacctcgccctggaccgtgcgctccatatcggtgacctcttcggggcgctcgtccacgagcaccaccataaggtggacctcggggttgttggcggcgatggagttggcgatgttctgcagggtgatggtcttaccggccttcggcggggagacaatcagaccacgctggcccttgccgatcggggaaacgatgtccatgatacggccggtgagcttgttcggggcggtttcctgcttcaaacgctcctgcgggtacagcggcgtgagcttggagaactgcggacggttgagcgcttcttcaacgctttggccgttgatggaatcgatggcctgcagtggcacgaacttctggcgttggttgcgacgatcgccttcgcgcggggcgcgaatcgaaccatggacggcatcgcccttgcgcaggccgtacttcttgacctggcccatggaaacgtacacgtcgttcgggccgggcaagtagccggaagtgcgcacaaaagcgtaggagtcgagcacgtcgacgatgccggccaccggcaccagatcctcctgcggctcttcgcggcggctatcacggtcattgcgatcgctacgattatcgcgatcatcatagcgacgatcatcatcggcgttgtcgcgatcacggccacgcatgcggcggttacggcgatcgttgcgatcattacggttatcgcgatcgttgcgatcgctacggtcgcggcggttacgacgcacaaactcgtgatcgtcgttctgctcgccgtcttcggacgtttcctcgtgcttctgcgtgggcagcgtggccaggatatcgtcgaggtcacgcacggtttcttcgctgttttccgcagtgcgacgacggcggcgaggctgctcatcctcatcatcacggactcggcgaatcagcggaacttccacgtcctcatggcgctcgcggcgacgctcggtatgcgctgcatctcccaaatcgagcgtggccagcagatcgccggcctcatcggccttcttgcgcggcttgcggcgagcgaaatcggactggtcgtcatcgcgacgatggcgggccgcacgcggttcggatgcggcatcatcggcggccttacgacgggtgcgtcgcggttcggtctcgtccttcttggcatcgtcggccacgggaagcggcaaatcgagctgcggttccgtggaggccggagccggagccggcgactgggtggccacgtcagcattgtctgtggtattggcctcagcggcatcggactgcggagccttgacgaccttggcggttttggcggccttgggagcgcgcacggtcacaccggccggcggctctccaccattgcgcgccgcctgcagggtggcgagcagctcgggcttgcgcatggtcgacgtgccgcgcaggcccatctgtttagcgagctctttgagctcaggcagcttcatatcctcaagattctggctatttgccactggttgccctttccataccgaacagacccatgcctatccaggcgttaagagtgattattgcggttgcaccgctcatgaatgttcgctgcgtctctgagttttcacgaacttcgtttactgtacaacgccaactcgaccaacgcaaaacggcccgccgaaaaccaaaaaagctccctctgtgacgagggagctcaacaaggtttattcacttttcttcgtggtaggacttttcggtgttgacggaccacacgttcttcttggacgtcttgccggtcttgatgttgccgacggcctccatggcggtggccatggagtggtccatgttgttgtagcggtgctggccgttgcggcccacgcagtagaggttgccgaagccgtcgaggtactcgatgagctcgtccatgtgctcgtaggtgtcgaagtaggcggggtacgccttcttgacgcgctcacgatgggagtcgatgacctcgtccgggccgttgatcacacgcatgcgggtgagctcggagatcgcgaacttggtgacgtcctcctcgctcatgttccagaacgagtcgccctcctcgcagaagtactcgaggccgacccacacggtgtcgtccacgttcttgaccaggtacgggctccagttgttgaagatctgcagacggccgaccttgtagcccgggtcctgcacgtagatccagcagtccggcacgatcggcggattgccgagggtggggatgttggtggtgttcttgagcttcaggtgcttgaccagcaggcccacggtcacgaagtcgcggtacggcaggccgttggccacctcggtcatatcggccggggcgggcttggaatcagcggcctcgggatcgtcgccggccgcgtcgatggcgttgaccaggtccttgaccggcatcgaggagatgaactggtcgccggaaagctcggtgcggttgccctcggaatcctcgtacaccacggaagacacggcgccatcggtctggcggacctcgaccaccctggcgtcggtcagcaccttgacgccggcggcctcgcaattggactcgacggtctcccacagctggccgggaccgtacttcggataccagaactcctcgatcagcgaggtctcgacctccgcgttggagcgcttcctggggctaagcttctggaaggcgttcttgagcacgcccatgatggacaggcccttgacgcgctgggcgccccagtcggcggagatctgggaggggtggcggccccacagcttctccgtgtagccctcgaagaacatcgaatacagcttgcggccgaaacgattgatgtagaagttctccaggttgtcttccggcagcttgtggaacatggacttcaggtagctgaagccggccaccatggtgagcttgaagcccatggccttcaacgtgttggggctcagcgaaatcgggtaatcgaagaagtggcggttccagaagatacgggacacgcggtggcgcttgagcatcaccttgtcctccgtctccggatcggggccgcccggctccatgtcgtggtcgcggccgagcttcttgtcatcataggagggtgcgccctgcaacggcagaacggtcttccaccaatccatgatgcgttcgtctttggagaagaaacggtggccgccgatatccatgcggttgccgttgtgcttcacggtgcgcgagataccgccgaattcgcgggtcccctccagcacggtcacgtcatagttttccgcgccgccatccttgacgagttcccatgcggcggtaagtccagccggaccgccgccgataatcactacggattgcttgtcggtcattatgctccttataaacgcaaaatcagagacagtttactagaagccccggaatcgcacaccgaaagatgagcgaatgcttacagaattctcccgatatacgaccgatgcgccgtcttccatcagcagaaaggcgacgcatccaatcgtgaggtaggggtattcggcaacgctgcgtcacgcacagcgcggcgaatcggtttggtcttgggctaattcgtcagcgacgaaccttccatagattcagcgagattcctgcaagtgcaagcagcatcatcttctatcagccgcaagcaaacaagacacacgatggcaaggttacgagtctgaacttttgctatgcgttgtatgaacaatgcgcgacgccccgccgtaagatgacggaatgccgcgcattgtcaatacaggctgtatcagac

SEQ ID NO: 267 - DNA, 3254 bp, Unknown
  R101_18m  MAG No. k141_61332
cagcgtggtgttccgctccacggtattgagaaccgtgggcaaggcgaccgtctgcaacgtgtacgcgccggttcggcacaatggcaagaccttgggcttggtcgtgcgtgagaccaatatggccacacgagaatccaacggtcgatatgagtcggaaagcattaacgcgggcaaacagctgtacgagatgattccgcgaggccagttcccctacaaggattcggtgatgagccagcgccatatcgctcgcgtggcggacggcttcatcatcctgaccatggacggcgtggttcgatacgcagccccgaacgccatcagctgctttaggcgtctcggcctgctgaccaccatgcctggccattacctcagcgaactcggcacacagctgttgaaggagaacgaccccgttccggaaaccctgccgttggtgctggcgggcaaagccgcggtcgactccgaactcaacgccaaccgttccgccgtctcgatacgctcgctgcccttatatgacaacaacggtcgtatcggagcgattctgctatgccgtgacgtcaccgagctgcgccgtcgtgagcaggagctgcagaccaaggacgctacgatttccgagattcaccatcgtgtcaagaacaacctgcaggccgtctccgcattgctgaggcttcaggctcgtaagaccaagtcggatgaggtcaagaaggaattgcaggaggcgcaacgccgcgtgcagaccattgccatggtgcatgagggattgagccagaccgccgacgaggtcgtcgacttcgacaaggtgattgccaacctgctgcgcatggccgtggacctagccacgatgaaagaccagcacatcgatatcaactacatgggcaagttcggcatgatgcccgctcaggatgccacgccgctgtccctcgtgctgaccgagctcatcaccaattcggtggagcatgggttcgaaggccgcaaggatggccatatcacgatttccgtgggccgctccggcccgaacctcaatgtggtggtcgaggatgacggttccggtctcggctccgaagaacagggaggattggctcgttcttccggttctggtttgggcacgcagatcatcaacacctttgtgaccaatgatttcggtggttccgtgcattgggagccgcgccgcggaggcggcacccgcgtggtgcttgatatgaagctcagggccgctcaggatgagtgatgcgaagcccaaaaataaggaaaccctcccaagtgggagggtttcctagtatgacgaagcgataatcaaaacatcagatttgcatctgcatggcctgagaacggcgggcgcgcatggcgcggcgcttcagcgcacgacgctcatcttcgctcaagccgccccacacgccgtaatcctgattggtgtccagagcgcacttcaggcatgcatcaatcaccttgcaggtgcggcacacggccttggcctcctcaatctgctgataggctgcaccggtgttgcccaccgggaagaagagttccggatccttgtcacgacatgcggccttggctcgccaatcaaaagcgctgctcattgcttgcctcccttaaaagccccgtggctggtgttgttccttaagtccagtaccaaggtaaccacgaaccgtggtgattttcaagaggtttcgccgagaaaaaaccgaagttttcacgaagcgcactgcaccagacatgccgatgtgccctcgatgagcacggcccggcccgcgttgtcggcatcgatatgactcatcgtatccaataggcgagcggggactccggccataaggtcagacgttcgttccccgcacgggaacacgattctggtattgcaatgctctggtatacgtatcgggcgaatcgtgctgacggcgaataccacgctgacggactcatcggccaacgcatgtgtgaaagacagcgcctgctcgtcggtgcggaatgggtcgaacaactcatcggcgtcgtcgacgaaccacacgatatgcggaggcggtggtgcatccgagctggcatacggcgtgcagcggccgttgcgaagccattgcgatccccatacccggcgatgcggggaactgacacgtaccgccaagccatcagccatgctggcgtgtcgagccaatgttttcagcaacgtggttttgccgcgcccctgcgggccgatgacaccgatattgccaccggtgagggataccgtcgcttctcgcaggttgatgccatcgtcggcaagtccaaatcgaatgcgttgcggtgcgtgattggccacagtccggtcttttacgtgccggggaagtggcgcggtaaacagggacggctgcggcgggctcccgacgaaccgcgatgcgaacgcgatctggcggcataccgcatcgatatcgcgcgccgttgcacagcggaatgccgtcacctgttcggaatcgttgcagaacgccgcaccgggcattgccggactgaggtcggcggcacgaccatcaccaagcagctcgcatgattgcagacggtcccgaacccgtaaacaaatgctgacggacatattcgccttcatatcggcactgacctgacccatcggattctgcgtacaggcgatcagatacatgcccagtgacctgccgagcgaggcaatacgcaccagacgattcacataatccgggagctggtccttcagggcatggaattcgtcaatgaccacgatcaggcgcggtggcggattgaccatatcacggatatcggaagcatggacagcggcggacagctgttcacggcgtgtcagttcggcttccagcgcacgcaacgcgcgtacggcatgcgccagatccagatcgcatacgctgcccacggtatgcggcaaccgttcgagtttgcggaacgcggaaccgcctttgaaatccaaaaacacgaaattcagatgctcaggcccgttcatcgaggcgagcgccagacaccagctttgcagcaacacggatttgccggaaccagtggtgccggccaccagagcatgcggcccctgacggttcagatcgagcctcagcggctcgcttccggtcatgccgatcggcaccgcaaggtcaaggggttcaagccaatggcccacaatggtgcgccatggcaggcgtgcgaagtgcagcagcgattctatcggctgcgacggcgcatgacggaggtctgcggcgcggtcatcggcgtcgtccgcgataccgacatcgatcgttgcctgttgcggggcgggagccttctcc

SEQ ID NO: 268 - DNA, 23699 bp, Unknown
  R101_18m  MAG No. k141_62047
atcacgacggctacgcacaccaggctcagcagctgaacccgcagcatgccggcgcccagcgtgatgatggtggcgtcctcgatgaagaatcccatcagtagacggtcggacaggctgagcaccacggtcatcaccagggcgaacagggacaggaacaggtaggaaaaacgcagaatgccgcgcagtcgaggcatattgcgggcgccgtagttgtagccgatcagcggctgcgcgccgaacgcgaatcccacgaaaaccagcaccgcgatcatgatgactttcagcgcgatgcccatcgcggctaccgcgtcggtaccgtaggggagcaggaacaggttgatcatgacgatgccgacgctctgcgtgaggttcgtgatcgccgaggggatgccgatggcgaggatgctcccgacctcccggaccgtgaccgccagacgccggcgcgcgcggtcgatgacggtccgcgggtcgatggacaggttgctgctgtgacgcagcgtgaaccagacgaaataggcgtcggtgcagatgttggcgatcacggtggcaccggccgaacccgcagcaccccagccgaatccgtggatgaacaggggattgagcgcgatgttgaccgccgtgccggccaccgaaccgatcatggactgcacggcgtggccttcggtgcgcagcaggttggacggcgtcatcgacacgatgatgaacggcgagccgacgatgatcagcgtgtagaagtcggaggcatactgccaagtgtcgtcagtggcgccgagcagcgcgagcatcgggtcgcggaacgccaggcccagcaccagaatcagcaggccggtggcgatggcggcatagaagcagaacgcgctgagtcgcttgccatcggcgaaccggtgttggccgaacaagcgcgagatgaccgaactgccgccgaggccgaagatgtcgccgagggcgatcatcacggtgaacactggcgcggtgagggagacgcccgccaccatatcggtgtttcccgtatgcgcgatgaaataggtgtcgaccatgttgtacaccaaggtgaccagcatgctgagcaccacgggcatcgccagcgagaaatacgccttcggaatcggcgccttttcgaagagttcgttatccatttccgtcccttggtgttttcgttcttcagtcactgcgcgggatgccgttcggcgtgcatcacaggcattgcagaggcaacagtgtggacaacgggcggggggagtatctcatgatgcggtgagggcgttgatgatgacgcatcgtgtattggtggccgtgtgcatcgtatgtgaacctgtgctggcacggcgtacacacgatgggaaaagaaagaatatatggaccccgttgtcccggttattgttcagttattactgtgttgaattattgcgttattcaattattgtggtgtgccggccgattgcggcctgcgggggattgccttcgtatgtgtcgtgcaatctcatgaatgggatcgttcgctagattcagcgagcgtccttgttggcggcgttgatgatgtcggcgaacatcttggagtcggcgtagccggcgcgggcgatggcgtccataccggagagggtgaaaccgcgaatcatggaatccatgaatgacataatgtgttccttgtcttgacttgcaaagccgtgggctttgcgatgtgttgttgtttacgttatgagacgggccgtgtgtgagcggcgagtcagggaagaggctcagcgagcgttcttatcggtgtcgttgatgatgtcgagaatcatctgggagttggcgtgaccggactgggccagggaagtggcaccgtacatagccagaccgcgaatcatggaatccttgagagacatcatgtttcctttcgttggtcaaaaccttgtggctttgagttttgtttatcggtttctttctgaaaccggtttcagaataacgcagtccgatgacaaacgcaaggggactattccgctctcggcgtttctggcggaatatcgccgttctatagataccgttcggtagttaagaggctgtctagtcgactttctgacggtcttgttctgggcgcatggttttcacgaaatggcctcatgtcgcggaaatcgtacgctgagtcgtcgtaagcgtacggtcttcacgaaatggggtctcatctcgtgaagaacgtacactgagtcgttctgggcgtacggttttcacgaaatggggcctatcttcaccggattttgggcacaccggccttgagcagcttggtctcaagattgatggggcgtagcagatcctcatagaacacatggacgatttcggtgacgccctgttcccggagatgccgatcacgtctgcggtcgtactccattttcgcctggaggcttgcgcgattcttgttgctggtgtcggcgtatttggccatgccgtcgtattctgccacgatgatgcggccgtctgcgagcttccaacagaaatcgacgcgatatggcattgcgggattgtcgggattcatgaactgcacctgcagcaggggaatgccgaaagacaattcggtgatctggccacgcatcaatgattcgccgccgttttcgctcaggggatccgcgtacttcagcagcttggtcacggagacctcgtcgcagacgctttgaatcatcagcgactgcacctcttcgatggtcgtcagggactttctcagagccgaatcgtatatgggcagcgcctgtgggaatgggaatgccgcgcagtcgagcagcgttcgcgccggagtcgtcaagagaatgccattatgcttccgcgtcggaatccgattgatatagatgcggttgagacgcgcctcgtctccgccgccgatgccggacttcgaggcgatgtgcactgtgccgtcgtgcagggaatagttgtgctgcagtccgtatacgcacgccgcactcaaccccgcaaatacccactgagggtggattgcggacagcgcacgtatgacctgcaatgactgttgctctctggtcatggtgttccaaagtattcggtcggcgtacaggttcttatacggtgacaccagctccccggcatgcaggcgacgtttcagggcgcgccgttgcgcatcactggtgccatagcagcagcgacgctcctgcttcgcctgctgcagcagtgcagaaacttccttgtgttctttcatatctcgacgctaagggtgattttgatcgttgcacaagctcaaccggcaaatgtggatactatgtcacgcgaattgttgctgtggataacttgaatcgacgtcgacggctttgccgacggtcttgtcggaggcgatattagcctaggacaccttgctgcgccgccttccataccgagaacagtcatcagtgacaccgagggcatcttcagcgtatgttcttcacgaaatcagctgccatttcgtgaaaaccgtacgctcagaatgactcagtgtacgttcttcacgagatgaggccccatttcgtgaaaaccgtacgttgacgacgattcagtgtacgttcttcacgaaattagggatgatttcgcggaaaccgtacactcaccgcaactcagcgtacggttttcgcgaagttattgatttggatataggttccccgtcatgaactacaatgaatcgcggcgaaaaacggggaaccgaagtcggagcgcggctgaacggatatgggtgtgactggatgactgccatggtgatgccggttctccttgacgtacgcaataacaacaactgacaacaacaggggagacaaggatggcgagaagtgcgggccgcacccgaccggtgatcaaggacgtggccagactggccggagtctcggcaccgaccgtctcccggtatctcaacggcaccgtcaatgtcaccgaagacaagcgtgaacgcatcgccaaggccatcaaggagctgggctatgagccgagcattgtggcgcgcgccctgtcgaaccgggagatggactccgtggtggtgttcgcggccaatccttccgccttctccacgtccgaaacgaaccatggggtcgaggccgccgcccgtaaacgtcggttcctgctcaatatcgtttctttggatgagtccgacatggactccgtcaaggctcgtgtgcgcatgggtttgtcgatcaggccggcgggcgtgatcgtctacgagtacgaccgggccggcatcgccgcactggaatacattcccaaagatatgccgatggtcgtggtgggtggcagcttcggcgacggcgaataccagatcatcaacgccgaaagggatggtggccgttggatgaccatgcatctgctggatctcggccatcgcaccgtgttccatgtggggcgcccggaaggaccgaccgataacacccgcaccaatgggtggcgtgacgcgctcaaggagcgcggcgtcacggtacctgacccaatcatcgtgcccgacgatgatttggaggagtcggtcaaggctgggcgcaccttgggccgtcgtggtgatgtgactgcgattttcgccggcaacgacgagaccgccatcgctgtgatccgaggtctaagggaggttggtcgccgcgtgcctgctgacgtgagcgtcgtaggctttgacgaccgcaacttcggtgccatgtggaatccggcgctgaccagttacacccagaacttcctggacatgggggagcggtccttccggatgctgttcgaacagattcaggccaagcgtgccggcgatgacgcgccgccctcgcaggtcgaagtggtgcaaggcaagccgtgtctgcgtgcctccgaacgcgcgtacggcgacggcgaaatcgcgtagtcgatggggcgtgcgtatcaatcgatagtgactgtagcgcattcatatcgtgacgaggagtctcccatgccgaactgtaagcgcttacctcaaatagttcataatgtgatttacgtcatactaatagatgttctgaatcatagtgttctgcaaggattccttgcggaaaatggctatttatcaacagttttcgaaaagtccgcatgatgggcgactgcgagcacactttatggtaatcgctttccgtagtgttattgttacagtgtgacttttgaacaatcggcaactctgaagactcagccccagacctcgggcactatctcagcggcagacgccgcgatgcaatcggcccgcgacgaacgcatccccggcaaactcatctgcgcgatcgtggccgtcggctcactcgcattcttcggcatcctgaccgaaaccgtgatgaatgtgctgttcccgcagctgatgggcgtgctccacatcagcgaggccaccatccaatggctcaccaccggctatctgctggtcgtgtcgattactgtgccgctcagcgcatggctgcgccgtcgcttccgccagcgcagcatcttcctggcggcaacgcgatgttctccacgctgcagcagttcacgggtgcggccggcaccactgtggtgggctaccgtgatctccgtgttccagtccggctcgggcaaggtgggttccgccggctatgccgccgccaccgtgaccggcgcatagattgactacgcgatcatggctgtggtcatcgttatcgtgttcgtcgccatgctccacgccctgcgtaaccggaagtagatggtaagtcgagtggcaccatgctaccgcgcaatggctgggcatggagttttggctaggaatcgttcgacaggcgttggcgcggccgctgagagcattcgcgtcgaaaggtttgccggagctcgttcggcgtggaatgggccgattcaccggtgattgttggtcaaacagccaatgctgacccttctgccaatggttagcgaggttcctatcataagcatttcggagagcgatctcgaaaaaggcgacatccttcacgaggatttgaccaaggtcaacattccactcgtataaagtaaggctgtaagcgcatcttggtggcaagcgtcaaggtatgtacggaatcgcggggcggaaagccactcctcaatccactgcggattggtaataacggatgattgtaacgcatgaatcacgaggcccccttacctcgtattgcaatgccccggtgacatgaaaaacggcggtcaacacggggcttgtacattaaggatacaggaagggtagttataagttgctgatatgccgtgttttttacgatagtcatcggcctctcccatacggcggaacaggaactgacggatgccgagatgccgtgattcggcgggaggacctgtactggcccagtccttctgctcggtagcggtaccgctacgccgactcttcccgacgctccagtgccgccgatatcagtgaatgcccagcctgatgttggtagagttaaggctattggcttggtctcgacggtgagacttctccaatggccaatatgcactgttgcaaaggagtatgcggtatgcaaccaatcaaagccattcaatacggctgcggcaaaatggcgaagtacacgattcgctatatgcacgagaaaggcattcaaatcgtcggtgccatcgacgtgaatccggaagtcgtgggcatggatgccggtgtgtttgcaggcatcggccccatcaatgtgccgattcgcgccgatgccgaggctgtactcaacgagtgcgacgcggatatcgcggtagtcacgctattcagcttcgagaacgaaatcgccaccatgtgcgagcagtgcttggcccgcggcatcagcgtgatcaccacctgcgaggaatgcatctacccgtggaccaccgatccggccaccacgaaccgtctcgacatcatcgccaaggaagccggtgccaccatggtcggctccggcatgcaggacatctactgggtgaacatggtctccaccgtcgccgccggatgccacagcatcaagaagatcaccggtgcggtgagctacaacgtcgaggattacggcctggctttggccaaagcgcacggctgcggtctgaccgccgaggagttcgaggccgagcttgcgcatcccgaaaccgtggtgccctcgtatgtatggaattccaatgaagcgctggcccagaagcttgggcttaccatcgcatcgcagacccaggccagtgtgccgtatttcagcgatgtcgacgtgtattccgagacgatggacgagacgattccggtcggcaaatgcatcggcatgtccgccgtggtaaccaccgaaacgaatcagggcatcacgttggaaactgcctgtatcggcaaggtgtacgggccggatgatggcgatatgtgcgattggaagatcgagggtgaaccggacgtggagttccacgtggtcaagccggcgaccgtcgaacatacgtgcgccacaatcgtcaaccgcattccggacgtgctcaacgcgccagccggatatgtgacggtcgatcagctcgatgaaatttcatatctcacgtatcccgccgcgctgtacgtggcatagacccatattttcagggatgaaggccggcactcataagggtgccggccggtatcaggcggccagagtcgacgtgcgtggcatcacctggaactggatatggtcatgggtgatgtcatcgggccgttcatgccgtaggttcgactcgatcagcgtcaccatgcgatcgataaccgtacgagccattgcggggacgtctatcgtcacagtgctaatgggtgggttggcgcagtcggagaaggggatgccgtcgaatcccatgagccgtacgtcgtcgggcacgcggatgccatgttcggtgagttcgcggagcgcgccgatcgctatggtgtcagacatgcacaggatgccacaatcgcccgggacaggcgtcaggaccgcaagcagcatcctgctcggcatcggcggcgacatcgccaacttcaaaagcgcggcccacctggccgcccacgccggcatcgctccggtcaccggccagtccggcaccagcatcaagaggcgagaaaccctccagacggggcaacaaacgcttatagactattgcgccttgtataaatgcgaactgccagtcaaccttaccgttgactggcagttcgcatttatcgctcccgctggcgggagctgtcatgcgaagcatgactgagggtggtccacagccgccaatccgtaacatcacccaacgcagcatttcacgatacggacgtttccgtatcgtattttcgtgtggccaaatagacatttcgggcgaaaaagttcgaaatacccccataactggccataaaaacaattgcttgagaatcactattgacttttatggcgactcggtatatggacacgcgaaacgaaaatgacatggagcaacggtactgtgtcaacagcaatgaacgaagaggcacgattcccttacgtgcccacaagcaattgaggtgattccggtgacattcaaagccccgctcgatctcacggtccacgctccggacggtatgtatgatcccgccaacgagcatgacgcctgtggtgtgggtatggtcaccactttgaacaagcgtcctgaacgcaaaatcgtcactgacgccattgaggtactggtcaatctcgaccaccgcggtgccgtgggtgccgaggagaacacaggtgacggcgccggcattctgatgagcatgccggatgagttcatgcgtgccaccgtgcccgccgaactgcccgaagccggccactacgccgcaggcatcgccttcctcgaccgcgacatcgaaacctccggtcagcaggaacaggccattgccaagatcgtgcgcgaggagggccttgaagttctcgcatggcgcgtggtgcccaccaacccggacggcctcggcctgcaggcccttgccgccatgccgggattcaagactctcgtggtcgcctctccggacggtgctctggccggcgtggacttggatcgcaagaccttccgcatccgcaagcgcgtcgagcatgaggtaggcgtctacttcgcttccctgtccgcccgtaccatcacgtacaagggcatgctcaccaccatgcagctcacccacttcttcgaggatctgaacgacgagcgcatgaaggccaccatcgccatcgtccactcccgcttctccaccaacaccttcccgagctggccgctggcccagccgttccgtctgctggcccacaatggcgagatcaacaccattcagggcaaccgcaactggctctccgcccgtgaaggtcgtctgagcagcgaactgctcggcgagttcgagccgctgctgcccatcaccactccgggctactccgattctggcaccttcgacgagtgcctcgaactactgcacctcgccggccgttccctgccgcacgccatctgcatgatgctgccgccggcttgggagaagaacccggatctcgatccggacgtgcgcgccttctacgagtacaacaacacgcttatcgagccgtgggatggcccggccgacatcgtcttcaccgacggcacccaggtcggcgccctgctcgaccgcaacggcttccgccccggccgctggcagctcaccgacgacggctacatcgtgctggcctccgaggccggcgttctgccggagatcgcgcaggagcacatcgtgtccaagggccgtcttgagcccggcaagatgttcctggtcgacaccgccgaaggccgcatcatccccgatgaagagatcaagaagaccctcgcctcccagcacccgtaccgcaagtgggtggaaggcaactcggtcgagatgagcgatctgccccgccgcgagcacgtgagccactccggacagtccgtccagcgccgtcagcgtgccttcggctacaccgaagaggatctgaagctgttgctcactccgatggccaacaccggcaaggaaccgctgggatccatgggtaacgatgcgcctatgcccgcactctccagccgcagccgcatgctgttcgactacttcacccagaagttcgcgcaggtcaccaacccgccgctggactgggagcgtgaggagatcgtcacctcgctcgaatccgccatcggccccgagcctaacctactggccgattccgagctgcacgccaagaagatcctcatcccgctgcccgtggtcaactctgatgagatggcccagctcaagcgccttgacaaggcccgcatcctcggcggctactatcgcccgtacgtggtcaagggcctctaccaggtcgccggcggcggcaaggccctcgaagagcgacttgacgagatctttgccgaaatcgacgaggccatcgccgacggcaagaacttcatcgtgctctccgaccgtgaatccaaccacacgtggggcccgatcccgtccctgctgctgacctccgccgtgcagcaccacctgctgcgccgccacacccgtacgcagatctccatggccgtcgaggccggcgacgtgcgcgagattcaccacgtcgcactgctgatcgcttatggtgccgcctgcgtgaacccgtacctggccttcgaatccgttgaggatttggcccgtaacggctacctcaaggtcgacgcggacaccgccgtgaagaacctcaccaaggcgctttccaccggtgtgctcaagatcatgtccaagatgggcgtctccaccatcatgagctaccgtggcgcacagctgttcgaggctgtgggcctgagccaagaagtcatcgacgaatacttcaccggcaccacctcccgtgtgggtggcgtgggccttgacgagatcgccgaagaagtggccatccgtcaccgcgtggcctacccgaaccagtggagcgcatccccgcaccgcaacctgcgcacgggcggcgactacaagtggcgtcgtaccggcgaggaccacctcaacgatcccgaggccatcttcctgctccagcagtcgacccaccgtggcgactaccagatgttcaagaagtattcgcaccacatcaacgacacgtcgaaccgactcatgaccctgcgtggcctgatgaagttcaacaacaaccgcaagccaatcgacatctccgaagtcgagccggcctccgagattgtcaagcgcttctccaccggtgccatgagctacggttccatctcacaggaagcgcacgagacgcttgccatcgccatgaattcgattggcgcacgctccaactccggtgagggcggcgaatccgacgatcgtatcaacgacccgcagcgctacagccgcatcaagcagatcgcgtccgctcgcttcggcgtgacctccgattacctcgtgcacgccaccgacctgcagatcaagctcgcccagggcgccaagcccggtgagggtggccacctgcccggtgccaaggtcccgccgtggatcgccaaggtccgtcacgccaccccgggcgtggagcttatctccccgccgccgcaccacgacatctactccatcgaggatctgaagcagctgatcaacgatgcgaagatggccaacccgaaggcacgtatccacgtcaagctcgtttccgagttcggcgtcggcaccatcgcggccggtgtggccaagtgccatgccgacgtggtgcttatctccggctatgacggcggtacgggtgcagccccgctcaacgccatcaagcacgccggcaccccgtgggagatcggcctgtccgaaacccagcagacgctgatcctgaacggcctgcgctcccgcatcgtcgtacagtgcgacggcgagctcaagaccggtcgtgacgtggtcatcgccgccctgcttggtgccgaggaattcggcttcgctactgcggccctgatcgtggaaggctgcgtcatgatgcgcgcctgccagaagaacacctgcccgcagggcattgccacccaggatcctgagctgcgcgcccgctttaagggcaagcccgagtacgtggtcaacttcttcatgttcatcgctgaggaggtgcgcgagatcctcgcccagctcggcttcaggactcttgaggaggccatcggccacgttgagtgtttggatcaggacgaggccatcaagcgctggaagtccggcggcatcgacctgaccaacgtgctcaagcaggccggcccggtacccggcacgatcctgcaccagaccatcgagcagaaccacgagctggagaaggcactggacaacaagctcatcgaacttgcccagccggccctcgaacacaaggaacccgtgcgcatcgaaatgccgattcgcaacgtcaaccgtacggtcggcaccatggtcggctacgagatcacccgccgttacggcgaggaaggtctgccggacgacaccatcgacatgaccctgcacggttccggaggccagtccatcggcgcgttcatcccgcgcggcgagaccatgcgcatctacggcgaagtcaacgactacgccggcaagggcctgtccggcggtcgcatgatcgtgcgcccggaagacaacgtcaccttcgacaagcacagtaacgtcatcgccggcaatgtcaccggtttcggcgccacgtccggccagatgttcgtggccggtcgcgccggcgaacgtttcggcgttcgtaacggcggtgccacgttcgtcgtcgaaggcgtgggcgaccacggttgcgagtacatgaccggcggcactgttgtggtgctcggccccaccggacgcaatttcggtgcaggcttctccggtggtaacacttatgtgcttgacctcgatatgaagaaggtcaacccgagtgccatcaagtccggtgcactgctcttcaagtcgcttgatgccgaaacctccaagctggtgtacgcactggtcaagcagcatgtcgaagagaccggttcccagttcgccgcggccctgctggaggactggaacgaaaccgtcaagcggttcacgcacgtagtgccgaagcagttcgtggccatgacgaaggccatggaagaagccaaggccaacaatgtagatttcaatgcgcccggcgcctgggaaaaggtgtacgagcaggttatggaaggagcgcgctgacatgggcgacccgagaggattcctgaaggtccgtacccgccgagagttggctgaacgccccgttgaggagcgtatcaaggactggttcgacgttcacgccgaaaccggcctgcaaccgtggacccaaacgcaggcggcccgctgcatggattgtggcaccccgttctgcatgaccggatgcccgctgggtaacctgattcccgagtggaacgacttggtccgtcagggcaagtgggaagacgcctacaaccgtctgtccatgaccaacaacttccccgaagtcaccggccgcatctgcccggccctgtgcgagcaggcctgcgtgctcggcatccaccagccgccgaccatgatcaagcttgacgagcagaccatcatcgaccaggcatgggatttggactacgtcaagccgctgccgccgcagcgtctgaccgaccagacggtcgccgtcgtcggctccggccctgccggcctcgccgccgcacagcagctcacccgcgccggccacaccgtcgtcgtctacgagaaggacgacgccatcggtggtctgatgcgttacggcatcccgaacttcaagcttgagaagggtctgcttgaccgccgtgtcaagcagatggaggccgaaggcacccgcttccgcaccaacgtggaaatcggcaaggacatcacgtgggatgacctgcgtgaccgttacgacgccgtcgtagtggccatcggctcccgcgtgccgcgcgatatgaagattccgggccgcgagctcgacggcatccacttcgccctcgacttcctgcccgacgccacgcgccgtatcttcggcgtcaagccggtgcacgacatcaccgccaaggacaagcacgtcatcgtcatcggcggtggcgacaccggttccgactgcctcggcacctcgatccgtcagggtgcgaaggacgtcaccgtgctacagatcatgccgaaagagccgtcaagccgtccggacaacagcccgtggccgaccttcgcccgcacctaccagaagacctcctccatggaagagggcggcgagtacatctactccaccgactccgtgaacttcgagggcaccgaagaggagaaggccaaggtcaccatcgacaactcgaccaccgccgaaggcttcgtggccgatgagcgtggtcatgtcaccggcttgaaggtcgtctccgtggctcccggcgaaaatggtccgttcactcgccagcctggcaccgagcgcgtgctgcccgccgatctggtcctcatctccgtgggcttcctgcatccggacaccgagaccatcctcgaccagctgcccgtcgaactcgacaagcgtggcaacatcgctcgcaatgacaagttcgccacctcccaggatggcgtgttcgtgtgcggcgatgccggccgtggccagagcctcgtggtctgggccatcgccgaaggccgctcctgcgccgcagccgtggacgagtacctctccaaggaaaagagcgagctgccggccccgatcaaggccagccagcgtccgatgatgctgcctcgctgaatactgttccaaacagaaacatgaaaatcccttcttcatgaggggatttttgcgtttctgggattaattactgccttgagtcttcagtaatgtttatatttcgagaatattgcatacatggttaacatgaagctcctatggtgtctttcgtcgccaaaaagacgacgccagaatatttgggagagattcatgaacacacgtcatgtcacttcactggtcgcggccggtgcggcaatcgtcatgctgctcagcggctgcggatcgaccggtacctccaattccagcaatgcttcagattccaatatcatttccgtgtacggcagtgagccggcacacccactattccccggcaacaccactgaggccggtggcggcaaggttgtagaccagctgttcgcaggtctggtgacctacgatgcgaagggcggcatccacaacgaggtagcagacagcatcacctccagcgacaacgccacgcattacgtcatcaagctcaagagcggatggaagttcaccgacggcactccggtgaccgcgcactccttcgtaaacgcatggaattacaccgccaacagtgccaacaagcaggccagcgccagcttcttcagcacaatcgaaggctatgatgatctgcaaaagccggacgtggaccccaaggccacgctgagcggcctgaccgtcgttgacgacaacaccatcgatgtcaagctcagccagcccgactcggcattcccggtcaaggccggcagccacgcctacatgccgttgcccgaatccgcgttcaaggacccgaagaagttcggtcagcacccagtgagcaacggcccatacaagttcgtgtcctggcagcacaaccacagcatcgaaatggtgaagaaccctgactacaagggcaatcgtgtcgccaagaacgatggcctgaacttcaagatctatacctcgcccgattcggcatacgccgacctacgcggtggcaacctggacttcacgaacacgattcctgacaccgcacttacctccttccaatccgacaagtcgctgaaggcatacaacgagcccggtggcaatacgctcaccttcaccattcctgaatggctggaacacttcggccagaacgaggaaggcaacctgcgtcgtcaggccatttccatgtccatcgaccgcaagaccgtcgccgagaagatcttccacggcaccgccacgcccgccgtcgacttccttgcagccccaatcagcgcctactccaaggaactcaagggaaatgaagtactgaagtacaacccgtccaaggccaaggaactgtgggccaaggccaacgccatctccccgtggagcggtgagttcggcattgcatacaatgctgatggcactgcgaagaactgggttgaggcaatctgcaactacatcaagaacacgctggatatcgatgccaagagcatcccgatgtccacttccgacgaattcctgtccaatgtggattcaggcaagatgacctccgcataccgcagcggttggggccctgattatccatccgcggacaactatctggtacagctgtacgattccagttcggccgacggcaagggcggcaacagcggcaactacaagaaccccgagttcgatgccatgatggacaaggctctttccgccccgtccaccgaggaagccgacaagtattatcagcaaggtgaggagattctgctgcaggaccttccggctatcccgttgtggaaccagaatgccaccgcagccagcacctccgcagtctccggcgtcgcattcgactacggcggcggcccagtgttcaccgcactgaccaagaagcagtaagcagtaagtaataaacagacagcgctagccccccgctggcgggggctgtcggcaaagccgactgggggtggtctcaaacagcagaccacccctatcttgttatatgagcgagctcccgtaagcgggagcaatcgagaacatacaggagcacattaactatggaattcaccgtatccggcactaccgtgcgattcgatgaacgaacaatgcagttcgcttttacgcgcgacggtgccgaatggaatacctgcgctgatttcaagccgaccctgcaatgcgcgcaaggcaccttcgcgttcgcggatgccacttccatcacccatgagcagcgtgaaaccggcacgggaaccggcattcgcagcatcttcaccggctttgggcacagcgcatactcctttgaaacctatgtatgggtggagcgtgcctcaggcgatgtgctcttcgaatggattccgctcaatgagcaaggcctgaacatcaccaatgtgacgtggcccgcagccatggacttcgattgcgccgacgaccatgacacgacactcatcacccatgagcaaggtgtgatgatccccaacacatggcctaccgccgtgagcaccaaagatatcgccttcgacggccgcttcgaaacggctggcggttacatgccgtggttcgcgcagctccgcgcagacggacacgggtatatcgccatctgcgaaactccatggaatgccggttacggcatcgaccatcccagcgatggcccgtacacccatatcaatacttggtttgagccaagcctcggcacaatgaattatcgccgcgtggtacgctaccagttcctcgaccacgccgatcacacggcggtgtgcaaggcctatcgttcgtacgtcaacgaacgaggtcgcctgcgtacgctcgccgaaaaggcggcgcgcaatccctccgtgcgtgacctgattggtcgttcatgggtgcacatcggcatcaaaaccaaagtacagcccgactcgtactactacgataaggaccaccccgagaaaaacgattcattggtcaccttcgcacagcgcgaaaagcaaatgcgaacattgcacagcatgggtgcaggccgactgtacatgcacttggatggttgggcacagcccggatacgacaacgcacaccccgactatctgccggcttgtcaggaggcaggcggctgggaaggcatgaagtcgctggtcgacgcctgccatgagcaaggcgatattttcggcacgcatgaccagtaccgcgattactacttcaccgcgcaaacctttgatgccaacaatgcgattcggctggcagacggtacgatgcccgaacacgcacgctgggcgggcggccaccagacctacctgtgcgccgagctcgcaccggactacgtacgccgcaatttcgccgaaatcgccgcacacggcatcaaactcgactgtgcatacttggatgtcttcacctgcaacgaaggcgacgaatgctcgaaccccgaacaccgcatgacccgccgcgaatgctttgaccgccgcgccgaatgcttcgaatatctgctctcgcacggcatcctctcctcgtccgaagaggtatcggactgggcagtgccaagcctgatattctgccattacgcgccatacgacttccagatgcgctcacccaacgagccgcgccaaggtgtgccggtgccgctgtataacctcgtctaccatgattgcgttatcgagccgtggatgatggagcgtgtggtggacggcgacgattacatgctgtacgccttgctcaacggcggagctccatacctgattcgcgatgccgcatacatcggcgttgacggcgacatggacgacgaacagcgcgctcgcacggaaaacgacatcgaacgctgccatacggtcgctgcattccatgagcgggtcggcatgcaggaactggttcgtcacgagttcgtggatgatgatccgctggtgcagcgttcggtattcgcggacggcactgcggtcacttgcgacttccatacgcaaacctatcgcatcaccgattgaccgcatcactgactgaaaaaacaatgacacacagtgggttccgatggactggtggcaaattaccgccgataagcgggtaatatagccaacagtgtcaccgtcgaaacaggagtagtgaaatgccgaatcgtgcagaacgccgtgcccaagccaaagcaggccgcaggggagtgccgtcgcagtatgaccagacccgtggccgtggccgttcgggaatgattgacgaataccagctgcagcagaagtcccagcgtctgcaggacggcaccgacggcaccgaatggaagcccagcggcggtacgattgcggacaccgaaaccctgctgaccactaacccgaactacacgaatccgaagatgttcaaggcaccgcattcgctgcgtcagtggttccgcgtgggcagctggacgctgatcgccatcgcgattatcgcgttcttcgtggttatgtggctgccaagccatccgatgtggctgatcatcaccgtctcctcggtgttcattgtgggtgtactgagcctgttctttacggctggcgattccaagcacaatccgaatttggatcagaacggcacggccgtctgatcttttgtccggtaaatccggcttgaaaagcaaaacgcacgacggaagttgtgcgttttcttgtatgcggtgccctaaagtaagaagtgcttgagtttctttctgacgcacgaaggagaggcagtccgatgaaagttgatattctaacccgcgaatacccgccgcacgtgtatggcggtgccggcgtacacgccgaggaactgtccaaggttttggccgagcgcattgacgtgaccgtgcgtgcgtttgatggcaagcgcaccgaggcggacattcctgctatcccgaatgctgccgatgctaagggcagcttgaaggtcgtcggctatgacacgccttctgagctggctgatgccaaccccgcattgaagaccttcggcgttgatttgcagatcgccaatgatgtggacgccgacatcatccacgcgcacacctggtacgcctgcctggccggctacctggccaagatgctgcacggtacgccgctggtcatcaccgcccactccttggaaccgttccgcccatggaagcgcgaacagctcggcggcggctacaacctgagctcctggggcgaaaaggaagcctacgagaacgccgaccgtgtgatcgccgtttccggtggcatgcgcaaggatattctgactgcttacccgaacctcgatccgaacaaggtggttgtggtgtacaacggcatcaccatggccgacttcgctaccccggcaccagacgatccgggttggaaggtgttcgagcgttaccacatcgaccgctcgaagcccaccctgctgttcgtgggccgcatcacccgtcagaagggtctgccatacctgctcaaggcactgcacctgatttccaaggacattcaggtggtgctgtgcgccggtgctcctgacaccccggaaatcgccgaagaggtcaagactgcgttcgccaagctggatgaggagcgcggcaacatcgtctggattgaagaaatgctgccgaagcctgagctgaatgctttggaacacggctgtgatgccttcatctgcccgagtatttatgagccgctcggcatcgtgaaccttgaggccatggcctgcggtctgccggtcgtcgcatccgccactggcggcattccggaagtcgtggtcgacggtgaaaccggctatctggttccgatcgaccagctgcacgacggcaccggcactcccaccgatccggacaagtttgtgcacgatatggccgccgctatcgacaagatcatggctgaccccgaactcgccaagaagatgggtcaggccggctacgaacgcgcccgcgacgtgttcagctgggagaccatcgccgacaagaccgtggaagtctaccagtccgtgctcgacgagcagaagaagtaagtagcgctgcaacgagtgccccccctcagtccggctgcgccggccagctcccctcaggtaccggtttcttggctcccctctctgcggggagctgtcaccgtaggtgactgaggggagtcctcagaccgcgaatcatagttagtatttcactcatgacaaacaccgtcctccaactcgacaacgtcgaattccggcgtaaccgtcgcgtcattatcaccgacgtgaacctcaccatcaacgcgggggagcgttgggtgctgttcggtccgaacggcatcggcaaatccaccgcggtcggcatgctggccacccgcacgttcccctcagagggccgcgtattcatcctcggccatcaactcggcaaatacgacgtattcaaactgcgcacccgcatcggtctcgcctctgccgacctgggccggcagttccccgagttcgaggacccgctggacgccgtggtcaccggcctgtccgccgtgaccgggcgctggcgcgacacctacacgcaagaggaatacgcccgcgcccgccagctgctgcgcgattttcgcgtctcctatctggaaggcaaggagatgtggcgactgtccgaaggtgaacgcacccgcgtattgatcgcccgtgcgctgatgggcgatcctgagctgctgatcatggatgagccgaccaccggccttgacctgggcggccgcgagcaggtgatgcgcacgctgagccgaatcggcgaagagaactccgagcgtgccgtggtgctggtcacccatcgcttggaggagattccggccggtttcgaccacatcgccattatgggacgcaagccgattcccgctgaggacgccaccgaagcgggcgtggattcaatgggtaatcccggtgctggcaccatcgtctacaccgggtcgttggagaatggcctgaccgacgaacgcttgtcggaattgttcggtatgcccatcgaagtccagcacacccacggccgctgggccgcctacgccgtgtgatgcttgtaggttttttaggcgggattttttttgtcccctctggagggggctgtcagcgtaagctgactggggggggggaagtccaaccagttacgaaggcaaccatgacagccaatagcaaactcgtattcatcgatatcgacggcaccctagccgacgaaaaccacgtcgtacccgaatctgccaaaatcgcttgcaaacaagcccaggccaacggccacaagctcttcatctgcaccgggcgttccgtgccgaaaatcgaacgcagcatcctcgacctcggtttcgatggcgtggtttccgtggcgggtgctcaggcgaatgtcggagacaggctgctgttccagcatctcgtccctcctgaagcggtcgatgcggcgatggcgtattttgccaagcatcatatcgagagctaccaatggcaaggtgcggatggcatgtacatctcggaaggctaccgtcaacatctggaatcgaaaggcaagacctggaatcgtggcgaattcgcgcgattctggcacctgttggatgaggtggaggtgccgactggctcgactttgggacagacgattcgtgtgagcaaagggtcatacttcacctcgccgaatcctgacgtgactttcgaggagactcaacgtaatttgagcccatggtttgagctcgtgcatggttcgtatgacaagatttccccgaacaatggcgagttgctgattaatggcatcgacaaaggtaccgctgtgcgcgacgtggcttctttgctgggctatgccattgccgacaccatcaccatcggagactccgacaacgacactgccatgctcaaggccgccggcacatccgtagccatgggcaacgccattcacggcatccaagccttctgtgaacttcaccaccaccgacattcaccagaacggcctggccaacgccttcaagacgttggaactggtgtgaggctatgtcgtttgctctcagacgaaggatcctttcgtgctgtagtatcgctattgaagcattaaaatctggaatgtcatttacagaagttacttattacctcaatcagctttatttcatgcatcaaggaacgtaccccttcgtctgctgcacacggaagctaccagatgaactcacaaactgcaacctatcctgtagtttccattcaatccaagctatcaacggtagtgttattgcaatagttccctcatggataaaaggcaaatgttttcgcttaccagaaagtctcttagtcttttccaataagaaactggaatatgaaacgcgctcggtaaaatcgttgaaggatgagcagcgccggatatgctcattcatccgtttttttgaagatttttcttcataccttattttgaatcaatacttgaatgacgagatggcaactcttcttcaaagaatcgctgatctgtttaggcagaggcttcagaacatcaatatcatggtcatccaagcaaatcgattcaaaataattagcaaggatgagtactacgaacttctttcactattgactaaaatgaaagaaattgtaggaaagcaaatacgtttgctttcaagcaatggatacctatttgaccagtttgaggcattcgtacgcagcaataacatagggtatccagtcaaaattcctacagaacggtgcggcaggtgctgttcaaaaatagatttctttgatttttcaaaaacgcattcttaccaactatgcatgagggcatgtcccatctgcggaatctattccatccaagtgggcagcgaaaagttcattcagcattattctgtgactaatgaagcagggaatacagcattctcgatagccactacagggtatgaattttactatttccgactgtatgataaaactcatggcactcttgcatatgagcaattcggagagtgtggtgagaacatcagaatgtacacggacagcctgtctcccgatgtacactcttataaggttgttctgtttggtggggatggggtcgcgtattcacatggaaaatttatcaaggagggggaatactgggtttatctgctttccgttgtaagcgacaatctcggcagttcgttgatgactttcgtgttgccgcttatcgtgctcgaccttaccggttccggtattcatctttcgatcatctcttcgttcgagacgctgccgttcttgctgctgggtctgcctttcggcgctattgtggacaggtgcgacgtcaggaaggtgctcatccgttccgatgccatcagattcggaggatacgcgttgctcgcggcggttctttcggctcggagcaacgcgaccgtgacgctgatagccatctatctcgtcaccttggtcatagggtgcaccaatgtgttcagctccgtttccgag

SEQ ID NO: 269 - DNA, 75029 bp, Unknown
  R101_18m  MAG No. k141_62528
gactataaagaagtagtacaaacacgctcttgagttctcaaaccaccaccacaccagcaagacaggaaaccaaccagaagaaggaacccgccgcgctgagcggcaacaggtgaataacttacacgcaaccacgccacaacgcaaatcgggcatgaaaaggcacgccagaatcgttgcaacgacggcgttctatcggcgtgtcgaaatcagcttgaatcacgccgttaccatcaggatacgccggctttttatgggctcacgtaacgaaatcagatgttcaccggcgtgtcgcaacaattcattccacgttcaactcccctcagtccgatcacgcggacagctcacccgcaattacggacgagcaaagctcgcgcccttatggctcgactatcgtctcgctttcgtctaaaaaacagtccaccggactgttttttaaacgacccagtatcaaagagggaagccaaaaggggattagaaggtcaggcgcatttggtgccagaccacgtcaccgtgagtggaatcggaaatgccctcgtcctcatatccgaatcgcgcatagaatccgaccaaccgatctttgcaggtgagcaccaggcctttacggccggctgcacgagtgtcttcaatgactttcctcatgagtgtactggcgcaaccgcgatgctgatacttcggcgcagtatccacgccgaaaatcatttgccagtcaccttgagggttgtgctgcgcggcatcctcgtacatgtcatcggtcaagtcacgccgatcggtcacaaaaccgttgatgaacgccatgacgatctcgccatcaatcaatagccagaaacattccggataggtctcgattcgggcgcgcagggacgagcggtcggcggcctcggcggccgggaagcattcgaattccatggcggccagcgcgtccagatcgtcgatggtggcgtggcggattaactggggatcagaatcagtcatgtttttgtctttctcttaacactccgttgtgagcaactcccccagtcacgcttcgcgtgctggctcccctcaccttgaggggagccggatggatgtcagattacgtggtattcgcgtagcagggtggcaatatcggtgccgtcgagtttcttgagcaccttcttgaccacggccttttcaatgaagttgagcttcatatcggtgaccggtgcaccgtcacgcaatttgacggtggcgttgagcaggttgcgcacgtcatagacactgccccacacttcaggcacgccgcggtccacgccgagcaacgtgtagacagcttccataccggtgcgcatcgagtactcggtggtgaagatcgtgtcacgcggggtctcggcgaactggccaaggaatgcgaagttcacggcaccatcgggcaccacgtccgggcggtcgccggccgcgcgcggcatgaagaacgcggtgatgtacggcatcatgaccggcacggtgttggcgtgatgcttggcgagcgcctcgatcttgtcggtcggcacgcccatgtggtaaagccactcctcgcaaatctcttcaccggtgcattcggtcatcggcttcttcacatagttgccgggcttgtccgggaacaggccgtagacccatacgcacagctggtccttgggctggtcgcggaactgctgctggcggttcagggtccaactcatgagccagttggagtcctgcacagtgacgatgccgccggtgacgaccttgccggagaacgggtcgcgcttgcaaatcttctggatgtacggcggaatctcgccgtccagggtggtgatggtggcgctcatccacttggtggcattcggatcggagcagaacttctccggatggccaaagctcgggtcctggtcggcgatacgcttccacatatcccagccgccgccgggcttcaggtctgggttccatgcggcgggcgagttctgggaacccatggtggagttctccacgcaaccgccgttggtgatgaacaccagatcgttctcggtcaggtcgatggaggatttatcaccctcgtgatccacgtcgatgcgcacggcaagcttcttggtgggcgtgctggcagggttgcgcttgaagaaaccggaggtggcctgaatcttttggatggtgtcctggcctacgccggtgtgctcgcgcttggggccggctcccccgccaatcgcgaattccacgttcacaaccttggtgttgtagcggaattcgacgccatgcgattccagatacttgaccatcggcagaatcatcgactcgtactggttgtagcgggtgaaacgcagcgcggaaaagtccggcagtccgccgatgtgatgaatgtagcgtttgatgtacagcttcatttccagcgcggagtgccagttctcgaaggcgaacatggtgcgccagtacagccagaagttggagttcagcacctcatcatcgaagaaatcggtgatcggcttgtcatacaggtcttcgtccggggtgaagaacagcttcatgatttccatcgaagccttgtcggacaggccgaacttgcccttgagccccgcgtccttgccgaggtccttggtggcgcggcacagcgagtagttcgggtcctccttgttgagccagtagtactcgtcgagtacgctgacgccctcggtttcgatggaggggatcgagcggaacagatcccacatgacctcgaaatgattgtccatctcgcggccgccacgcatcacatagccgaggccgggaatatcaagaccgtcacaggcaccgccgggtaccgggtccttctcaaggatgtggatgttctcgccaggcatctgaccatcacgcaccagataacaggctgcagacaatgccgccagtccggtaccgatgatgtatgcatgcttgttgtccacgtcggccggcttcttcgggcgtgcgaaagcctcataattgccgctgctgtagtacatattccgcctccttggggtagagttgacgcttcgtcaactcttcttgaatagacatcatgtcacattattgccgaacacgccataggcaacgttcggcgttctgccgtattcgccaataccttgcgtctacggttttcgaggcctgtgttggctgttggctcataactattgaaggcatacaggcatactgaggatgctgggtgcttcaccgaaccggatgattgataaggtcccgctcaatccatgccatgaccaaatcggcaagtcggtttacctccgcttcggtgagttcacggcctttgggcagatgatgccatttttcgatgcatccgcggcagcatgtggcggtagcatgctgagcggtgaataccggatggccgtgccatggcgtctgcctgccgtcgttcttcggttcggctgtgcctatgcggtctcgcaacatttctcgcgcatgacgatcgatggtcgccttgcctttggtgcgggcataggctcgttctttgtcggtcaaagcgaatttggcgcggaactgcgaatgagacagccgttccagcatcgcggcaatccattgtcgctcgtcatcgttgttaccagtatccgccatctccatgcccatacgttccacaatagtcgcgcacatcgtatggtggcacatgccttagctccctctgatgaaggagtccccagcaaagccaggtgagggagaggccaggggcgaaactcgccaatcaggcggcaggcaagcagctggggccaaacagaatcttgatctcagcaaacaacgaagtatcccgcttgacgcggaaacgatcgccaaacgtgagcacctgagcgttacccttctcatccagcaccgcaagatgtacttcgcagtaaccaggatgattagcgagcacctgaccgagttgcatcatgcgttggcgctccaacgccaccggcggcagcgtgatgaccaacggacgttcatcctcggcttccaaggtcggaatctgcatttccgtggctctcagagaaacggtttcgtcgcgcaactccacttggccacgaatctgtacgatggcgtccacggcgagttcggcggcggccgcttcatagaccttgccgaagaacatgcattggatggagctttccatgtcttcgatggtcacgatggcccaggggttgcccttcttggatacgcgccggtccacattggtgaccaaaccagccaacgtgacctgctgtccttcacccatcgttttggctcgatcaaccagatgcgcgatggacatttcacgcaaggacgcgagaatcgactgcataccggagagcggatggtcagacacatacaggcccaacatttcgcgttcgaagttaagcttggtcttcttgtcccattcctcaagatcgggtacggtcacggaagcgtcgcccatggcctccgctcccccatcctcggcatcggagaacaaatcgaactggccctccgcctgtttgcgcttcagactcaccaccgagtcgatggcggcctcgtgcacggtgaacagcgcgcgacggttcgggtcaatcgagtcgaaggcaccggccttgatcaacgattcgaccaatcgccggttcagcgcggtcaggggcacgcggcggatgaagtccatgaagttcacgaacttgccgcgcgggccttcgcgttcggcgatgatatcggccacggccttgtcacccacgttacggatggcaccaagaccgaatcggacgacgtcgccgactgccgagtactcgtacaccgattcgttgacgtccggcgagagcacctggatgcccatgcggcgggcctcgcccaagtacagtgcggtcttgtctttgttggtggcggcaccttgcaacagggcggccatgaattcgaccgggtagtgcgtcttcagatatgcggtccagtaggagatcagaccgtatgcggcggagtgcgctttgttgaaagcgtagccggagaacggcaccagaatatcccacacggcctgggaggcctcttcggagtatccatgctccttcataccggcgaagaacggcaccttctccttggccagcacttcaggcttcttcttacccatggctcgacgcagcacgtctgccttgcccagcgaatagccggcgaggattcgggcggcggactgcacctgctcctggtagatgatcagaccataggtctcgtcaagcacctgcttcagaggttcctcaagctcagggtggattggcgtgatcttctgcaggccattcttgcgcttggcgtagttggtgtgcgaatccatactcatcgggcccggtcggtacagagcgataagtgcggaaatatcgttgaagttatcgggcttcagggttttcagcagtgaacgcatgccgtcggaatcgagctggaacacgccgagcgtgtctcctcgggacatgagtttgtaggtttcggcgtcatcgagcggaatcttggtgtagtcgatggcgggtttgccgttggcctcgatgttcttcagggtgtcgtggatgatcgtcaagttggacaggccaaggaagtccatcttgaccaaccccaacgtttcgcacgtgtggtattcgaaggtggtggtgatggtgccatcggtgcgttccagcaacggcgaggtgtcggtgatgggcgcgctacccatgatggtggcgcaggcatgtacaccggtctgtcggatcaggccttcgatacccttggcttcttcggtgatgcgcttggcgtccgggtcggaatcgtagagttctcggaattccctggcctcggcgtagcgtttggctgtcgggtcgaagatgtcatgcaggctgatatccttgccgccggtggccgcgggaggcagcgccttggtgactttttcaccgaccgagaactcgtagcccatgatgcgggcggagtccttcaaggcctgcttggttttgatggtgccatagatcacgcactgggcgaccttatcggtgccgtatttttcgccgcagtattcgatgactcgcgcacgaccttcagggtcgaagtcgacatcgatatcaggaaggctcactcgctcagggttcaggaacctctcgaaaatcaggccatgcttgagcggatcgagctcggtaatgcccatggaataggcgaccatggcgcctgcggccgagccacggcccggacccaccataatgccgtggtccttggcccactgaatgtagtcggcgaccacgaggaagtatccgcagaactgcatctggcagatcacaccacattcgtagtcggcctgcttcaatacgtcgagcggcgggttgccgtcgtaacgcttctccagaccttcctcgacttttttaaggaacagggaggtctcatcccagccttcggggcaggggaatttcggcatgaacgcgccgtcttcgtggtcgtcgaacatcacgttgcagcgttcggcgatggcgagggtgttgtcgcaggcgtccggatggtccttgaacagttcgcgcatctcttcggcggttttgatgtagtagccggtgccgtcgaatttgaatcggtccggatcgtcaagacgggaaccggagttgatgcagagcatggcgtcctgtgcctgggcatcttcggcgtgtacgtagtgggaatcgttagtggccagcagtggtgcgttgagtttcttggctatggtcagcaggtcaccggtcacctgagtttcgatgggcagaccgtgatccatgagttcgatgaagaagttgtctttgccgaagatgtcctggaattcgccagcggcgcgcagggcctcatcgaactgaccgagacgcagacgggtctggatgatgcccgaggggcagccggaggatgcgatcacgcctttggaataggtggcgagcacctccttatccatacgcggataacgcatgacgcgaccttcgaggttggccacggacgaagctttgatgaggttgaccaggccttcgtcgttttcagcccacatggtcaagtgggtgataagaccaccaccggagacgtcgtcacggcgctgggcttcggtgccccaatgcacgcgggatttgtcttgacgtgcggtttccggggtcacgtaagcttcgatgccgatgatgggcttgacgccattggccacgcagttggtgtacatctcgtaggcgccatgcatgttgccatggtcggtgatgccgaccgcaggcatgccaagttcggccgcacgcttggccaaatcagggatcttcgacgcaccatcgagcagcgaatagtgcgtatggttatgcagttgcacaaagttgttcccgtaatcagccatgcgctccaccataccgtgtggtctgggcgggaaatatttatcgatacgtactataaggcgctattgctgtttttgtgggtggtggttcgtcgttgagccgttgagggagtaagtggagagcgctttccgggtaggatgttttcgaccaagataaacaaacaaccgcaaagcgcctgatgaacagcatattcaaccagctcctcaacgtcaaaggcgtggtggtcgagaccgtgcggatcgtcgattcgcccctgtgccccgagcccgtgctcgaggttcgtgtgcgcccgcgcaggggcatgctccgatgctcaccgctgtggcagacgtcgtcatggttacgaccaaggtggcggcgtgcgtcgttggcgtcatcgggatttcggctgctggcgggtcgaactggtcgccatgatgccgcgcgtggactgtcccgggtgcggggtcgtggtcgcgtccgtgccgtgggcggaaccgggcagccggttcacgcgcgacttcgagtccgagtgcgcgtggctgatgagcgaccaagccaagacggaattgaaccattgggtgttctgggcgtcccacaaccgtatccccgagatagtcgaactcgcgaggaggatcaggagacggcgcccggacatcctcaggaccatccaactcggctactccaacgccaggctcgaggcgtccgacaaccgcatcaaggtcaccatccgcatggcctacggcttccaccacgtcaccaacctcatagcactcgtcatgctccgttgcggcggactcgacgtccgacttccacaacccgcaatctaacccacgaaaacagcagaagcctcaaaagtaatgagtaaatatgatagtctggtcaagtatatatgtatccttgacggagatagttttggctcttgggttattgaccgtgaaaaacgatggaacgctcgaacatccaattcagatgccatatgtaagctactctgatatggtgcatcattttatcgatgatatatatgattttatcgaccataacaaggacatggagctgaaccgttacggtgacattctgaatcagaatggccttaaatggggaagcaagtctatgagcaccgcagatgtatcgaatctggatgcacagtgcatcatggcattgatcaccggagctgtccgggcagaacgattctgtgatggtgctttgcttggatttttcaaagatggcagtatccggaaatggctggagcgactgaaagaacttgataatggcagcggaaccgaggtgagataaaggcatggctgaaattaagagcgtaaatgaactgttgagcatgaatctgagtattccggactatcaaaggccgtacaagtgggatattcaaaacatcgacgatttattcctagacatcaccaatgcaattagtgatgcggacagatacagaactgagttcaaataccgtatcggaacgatcatcctgcacagaacaaagaatgacacctacgatgtggtggatgggcagcagagaatcatttctctggtgcttctaaagcaatgccttgaaccgggatttgagtgttcgattctccagatagatttcaccaacaaggtgagccagttcaacattcacaggaactatgcgtttatcagagagtggttctccctaaagagcgaagatgtaaaacgggactttatccatgcctttgagcatattttagaggtcgtcgttgtttgcgtagacaaagtaaccgaagcgttccagcttttcgattcacaaaatacaagaggtaaggcattagacccgcatgaccttctgaaagcgtaccacctccgtgaaatgaaaaagtatccctatgaaatggaacacgctgttacaaaatgggaagcaaaggatactgagaagatcaaagagctgtttgatctatatttgtttccaatcttgaattggagccgaggcattaaaagcaaaccgttcatagccaaggaaatcgacacctataaaggtatcgcagaaagctcaacctattcttacgcacgacgggcaagccgagctatgccgtatttccagattaccgagccatttatttccggcaacgacttctttgaaatggtcgagcattatatgtatctgctccaggatattaagtcggagatctgcaacaatccccgtttcaaggagattaagctggttatctgcggcggcaaggatgtagaaacaccggaagaaatggacaaagtaaagttcggctctgccggtttcggatacacgaagaatctgttttattgtgcgctgctttgctattacgacaagttccataacttcgatgaaatggcagtcaagaagctattttcctgggcgtttatgctccgtgtagatatgaagaccctggggtttgacagcgtaaacaagtacgctatcggtgacgaaaattccagatatacaaacacaatcggtattttctccaagatcagctttgcccggatgcaccacgaaatatccggattgcagataaaggtacggagaggaccggacagcccatccaataacttgttgtatgacacgatcaaagaaatcaatggatatggaggtgcggaatgagcaaattagtaactgaacttcatattattggtgaaaacggcaatatgttcgacacagatatggagtacataatccctctataccagagagcctatgcgtgggaggacaagcaactcacccagctgattgaggatattaacgatgttgcggaggactccaattactacattggctccttgatcgtttccaagcagttcggacgatatgaagtagtggatggccagcagcggcttacctcgctgtatttgctgctgaactgccttggaatcaaaacaaagcccacactcacatttgcgtgtagagaaaaatcgaactataccctaagaaacattgaagaactactgctcgaaaaccgcagcaagatcgatatggatcggattgaaccgggaatccaaaggggcatcaggatactatctcacgaattgacaaaggatcatttcgacagggaaagctttatggaaaagctggctaaaattatcgtctatcggattgaggttccggagaataccgatctgaaccgctattatgagataatgaacaccagaggtgagcaattagagcaacacgacattctaaaggccacgcttatgagctatttgagtgatgattctgagaagggcttgtttgcgaagatatgggatgcttgtagcgatatgaccggctatgtgcagatgcacttcatcagcaagaacaatgcggtaagagaggctattttcggctccgaatggaacagtatgccgcctaacagctggcagaaatacaaaaaggctataagtggaacgacacaggaaaccaccggacataaaatctgtgacctgatcgaaaagaacttcaaggttgaagatgatgaaggctatgtggatggtgatgtgcgtgttcgctttgaaagtgttattgagtttccatacttcctgctgcatacgctgaaggtctatgtgagtctttacggtgtcacccatgaaatagcaacttcaaaaatcgtggatgaactcttggatgataagaagctccttgatgcgttcaacagagttgtatcctgcggcataacggataccggcaggatcgcagacagcaaagaagattttgccagagggtttattatttgcctgctcagaaccagatacctgttcgataagtacatcataaagagagagtacgcaaatgacagcgctgatggcgaatggagcttgaagagcctgtatgtttccggacagcaatcgaagaagaaagcatattacgggaactccgagttcatccgttccggcgaacggacacgtacaaatgattggaccaagaccaatattatgatgcagtccgccttgcgtgtttcctacacttccccaaaggtaatgcactggattaccaaactcttgatatggctttcggaagctgattgcaagaatatcaaaaatgatgccattacaaagtttgataaagttgccgaaaacatcgctattgatgcagtaagggaaaacttctttcaggtttgttcgaacggcgtgtatgcgatgggtgtcaatactccgcatattgtctttaactacctggattacttgctgtggaatgacgaccggaacggaaagaagaagaaatacagcgactttgtttttgaatttagaaattccgtagagcattggtatccgcagaatccatctgagggaacattcgagcaatggaaggatggtgttgaccagtttggaaatctctgtatcattcagagaaatgtgaactccaaattttctaatatgtctccggaagcaaagaaaagtacatttaaggatatgatagtcaaggggagtattaaacttcgcattatgagtgaactgacagaaaaaaacggcgacaaaccagccagcctttactggaaggaaagggcgtacaaggcgcatgaagaagaaatgcttggccatttgaaaaaagcttgcaacattgagtaagcaaagaagccatagcgacaactccaggcgagagagtgacagctatggcttttctttacacttcagcgttgaaatgccaaaccttggcgggtatttctctgttgttgccgctgatcttaatgtggtcggtatagatgttcaatttccaatggttgtactcattggcgttgtatcttttacattcctgagttagatatgatttcagaacctcccactttaccatgaggatgttcctactcttcaagccctgagttctaaatagaagcgcaacacctaaacctcaactccctattgaacacatacacggatccgccgctacctgcccaagaggaccagtctcgacggcctgacggacgccgacctgcaggccatcgtccaggagatcaacgacaccccccatgaaggtcccggactgggaaacgcccaacgaggcttggtaccgcgagctcggcaagctaatgtcgaggacaagccacccaaagacgagcattgcacttacaaattgaatccgggccagccactcgccaacaacgtatcggtccattatatgtcagcaacattctgaactatcatgaaccatcaagtacaactaactactgagaaaatccaatcttgcgagaggaaattatgcggcggtgatgctatttctgatcatcgtgcgccattgaacgcggctaataggagaaacagtctggaattgtaaagacctcaggatcgtaagggcctctctgtccagggtcaacaaactacaaattctgcgatcctgtatcatacaatcaaagttaattcgttctaaaccataatgatcgaacaatctctgtaacaaaccgccccaccggctaagcatctctatcaggttgctcggcgacgccatattccacacagtcatatatcttttatccgaatacagaggtatgcactgtgaagctctgactatttccgccttctttatgcccgtttctttggaggcatccgctatatgccaaacatatgcgtatggcggatcatgcaggatacatcggattagctccaacatatcataaaggcgtttcttggaccctttatcgcattccagagccgcgctagcgaacccagatctcaccaccttcacaatgtataatccgaagctcatgtctttcggtatccactttgggccagctccgattggctttcatcaaaaggtttagaccgtcaataatctcattgatacagaactcagacacatccttcgtcaaatcactgagcactcgtatatgaatatcgcaatccgtcttctccgtgaatatatgattcacccaacgcgcgccagttatcttatactcagagaaacgaagcatacaatcatctatatttcttcgtgcactactcaactgagcgagcatctttaattcatctaatccaatgcggcaatgagtgcttccacaactaaattgtattgtcgatatcccatatttaggaaatacataacacaagcggtcagaccaagattgaaagcgagcgaaagtgccaggaggcaatgacctagcaccaacgtcacctccaacttcaagaggacagcagccaacccctctcccattctcatcctgcagatcaagaccattactctcatttagatagctttgaaacgcatagcacaaagacatcaaaatggcgatggccgcacggtcataagcagattgaaaatcagcagtcgcctttccgttcacatcggcctgcaacacgcagcaatcagcaacatattcattcgcgctgtcagaaggacgaagattaaactgacatagggccacaccaaaatgctccatatatgtcaggtgctcaaaatacttctctattgcaacaccgatttcgccataaagcgttcgcgcaagctcaatgggaattcttttaccttcatcccggattacgttcatggtcacggacacggctaatcaactccttcattaggcaatcagcagctgcagaatcaaacactgtccgagcatcgaccgaatccgattactgtgacctctccgcccgaatcaatttggccatcgaacatcatgccccaaacaatcatggcatcaggttgaacgcaggcacgtatctcatccacagcacgcgttactttctggagtttttcatgagccgaacaagcgaaagagatgcagacggcgttcatcatcttcaacgaatcatttgagaatgatgccattgcgcgcttcgcggcctcaactattccatccgtaccttctgcttggccagcgccggaccaagccagatcgttgccgcccatcgccgctttgatatcggaccaatcaacatgtatgtacgaagaattcatatcagatatatcatccaatacccgaaaaccagcgtttaactttttcgccatctgcaactcttgcttgtccattttgactccttatcgagagctatcaatactcctcacaatatgcacgacaagcaatcaacagtagatatctaccggaatattgaagatgaacaagctactaacgtttagctgaaaacgagtcagttaccgaggccccggcattgatcacgaaatgtgaataatcctgtgtccaatgagccctacaagccatcgccgtactacagcatatccagaatagcgatgttctagggcctcggcgtagagagcttgttgttgagcgtattcggtgcggagacgctgagaccagtctttgactgtttcacccgggcgcattttgtcggttttgtagtcgaagagggtgatggtcttggcggttggatcaaggaaatagccgtctatgatacctcggaccacgattgtgtcgtcacattgctcagcaacgttgccgctgtcattcttcgtgttgggcacgccaccagccatgccgctaccgttcaccttggcattaagccggttacgttcaatcaacatcgagaatggctcttcccggaacagagtatcccgatgagctcgtatttgcgccgatagcgggcaattttctccagtgacaaaccagagcaagccttccagctcgcgagtcagcacaatatgagccacttgcggcgtgatgacatgattcgcttccagacggtcaacaatgtttctcagctcggcttcgcactgctcacggaacggctcagtaccccaatcaaagagttccagtacattgtggaccgcagtacccacctccgaagcagatggctcaacgtcggataccttcttcataaagtcaggaataaagaacccactatgcgcttcccgcctttgcttccaatcatctagattgtcttccagcatggcaattggcgcagccgcgtcatcagacggcaatacagccagcgaatcagtgtcatcagatatagattccgcatcatcaatcatccagctgcgagccttggaggaactcactaccactggcatgcgcggaggctcatcaggcaatcgcaaaccagtcacatcaatacgtttattgatatagccatacccgtccgttcgctcattcatagtggtcgtcggctcaggcgcagcactgcagaatcgaatcgtaatggccctgcccgtcgccgccatagccggcgctgtttcctgtagtcccgcagcaagattccacgcacggacctcattagggcgaagaatcgcagacgaatcatcatccgcatctccagacgccagcaatgatcctagaatccaatagagataattggggctaccactattcttgaccaccgttcgtggatctatggtgcgtccatcgccgcttagcgagatgccttgagccatcgtacgcaaattcagattgccatcatcgttctttcctggacggtacgatcccgcgataatcaacttgcgttcggcacgagtcatcgccacatagagcaaacgaagttcctctgccgcctccaactccttggcccgcgaatcaatcactgcgcgctggaaagtatccactcgaacatggttacgttggtcaaccaacgataaggcaccttcgccatattcggcaacagccccatcctcattccttgtctgatgagcaatcgtgcgaacgacagcggttctcgatccggtcagcagattattgctggcacccatgagtatcacgacgggccattgcaatcccttggatttatgaatcgtcatgatatgcacggcgtttttggtaggcactgttgaagcttcttcaccggagccactcgcggaccacattgttacggcatcaaggaatggttgcaatccacgctcctgagctacagcaaatgcatcagccttttctacaagcaagcgcaggttcgcctgccgtcgctcaccttcaggcatattgcctgcgaaatcgaacaagccagaaacggcatagagatgccacaacgaatcagacagagagtgaactcgcgcataatcgcatgcggcatcatagattcgcaggaatgccgatatctttgcaagcaacacatcagaagaaagaacagccgattcatcagcttctcccccactctcagcaatccgccgcataacgtcaaatagccagcctctgttatgcagacgaatccgcgccaaatcatcatccgtgaaccccatagtccgtagcaccgcaaccaacggcacatcctgatgacgattggcgataatacgcaaccaatccaaggcgatctgtatctccggctgacgatacaggtctccaacgccctgtacttcgactggaatgccgacacgatatagtcggtcagccaggtcggcaaaatgagtagcgccacgagccagcaccgcgatatccccatatgaatactgcgcgcgaggcccctcgcagagctcctggacacggcgcactatcatgtccacctgtaattcgtccttgccggcgcgaactgtcggtgcagtgtcagtgccgttttcatcagccacaacatcagcactcaagtcaggtgccgcgttactcaccaacaattcaatggcttctgcatcgaatggtttaccggcttgctttgccgagccgatttgcaactgttccttcaggtaatcggtcgcacccatattcggcgtcatcagtcgggcaaataccgtattcacaaaagtgatgatttccggcaccgatcgatagttcacccacaattcccggcgatggctcgcatccgtaacactattgcagatatcgccgaactcctccggcgaggcatcacggaacccataaatgctttgcttcacatcaccgaccatggtaagtttggctgcatttcggctgatttcgcgaatgaatcgattctgcagggcgttattatcctggcattcatccacataaatatatcgccactgagcaccgatacgcttggccacgtcaggctgctgcatggcatccaatgcccagaaagccacatcactgaactccgctacggactcctgctgtttcacaagcgcatactgctggtcgaacgtggtgatgagcgcaatcaatccttcgagtcttcgcgcagcgacctcatcaagcgagtccacttgttcagcggtaaaggccagtttcgattgcaaatcagaaacgatccctttaatgccccgcaccgtttccgccaagcgacggcccagttcactgtctttgggtacggcgattgccgtactcttaagaatggcagttttgccgacagtaatgcgcttgggcagtacgtccaatggattggcatcgataacacgagcacgaactgcattccatgattcgctacgcaagtactgaggcaaatcgcatatcatccgcaatgatttgactaccgtatcttgctgcgcggtgtgcgcatcgtggcagctggcgagcgcctcatcaagacacgatcgcaattcggcaagaggatgttctgccatatcaatccagcctcgaaaataacggtccaaatattcattgccgtattcaccaccaacgacctgattcagcgacgcaatgttgaaccggtatggttcggcgagccggctaagccaaccgatgcggttgggcttggtgagtgccttgtcatacaggctcatcatggtggcgcgcaagtcaccatcatgccggggcccttgcatgttgtccaacacatccatgaaccgcgcgtgcattgagttgcgctcgtcataccacgattcgaataacgcgtcgagtgtttggcctctcagccggttcttcatggcatcatcagcaagaatctggaatcctggagccaccggcaatgtatcggcattgcgatccacgattcttttggagagcgcatcaatagtgctgatttgcacggttggcagatcgttcaaggcaacggagaatacggtttgcgcatggtggcaatcgtgcagaatcgtacgcgccagttcgctgtcgtctccacctaattgatagtccgtatccaagagcacgagtgaacccggctggcatccatgattgcgccgcgcatacagaatggcgtactgcaggttctgttccaagcgccggcgaatttctgcggctgcggcaacggtgaaagtaataattaacgattcgcggatggatgaatgcgcttcgtctgcattacggttcagcaagtccagcagaatatcctgcaagagttgagtggttttgccggtgcctgcggatgcgctgatgacgtaaggcatggtgtttgtcggaaaatcgtccgagagattatccgcatcttccgacctaggtaatgcatcaacatgttctaccatgccttgcctccttcagatgtattattcatatgaagagccgcttctttgagctccagcaatgtcactgctgtctccacctcgaatatgttgctattcaacacatcccacgccatgatgtcggccacatcgctgtaggcaagaccatcacggccgtcaaccaaagaacgataagggcgcaccggcagtttgccgtccaatatgttctggcaggcacccactattttcccgtgcacataatccgctatgccacgaaattcttccgcactcagttgttcgataccgatgccggtttcgtcggattctcctataagcacgccactgttcggcatatcaaagcctcgccatacgtttctgatgcgcatgttctgagcacttgaatcgtcacttggctcatcgaacagactcgttgatccatcgtctgcgctcggcaacatgttgtattggttattcagcgcgatgcgttctcgaatggttgcgctgggtttaatcgggagaaagaacatgcctgctactggcattccggagttgtgctgggcggcagaagcatacgtaaacagctgaagttcatggccgtagtacacatttgaagcgcggccgccatcattgcgagacggtttgccgaacaacgtacgggcagaagacttatagtccagcacaacaatgccggcgctctctcgcgaaatattggtatcgcgaattaccgtatcaatgcggtcgaccttgccattgatacgcaatgcaaccgggatttcctcgtccctcgccctaccgattaattgttcccctgaatatggcgactgccatgcaccggtcgttcctccaacgttgccaaatacttgctctacacacgtaggcgtaagcatcgtctgtgcggacgataatgcctcacgttgcgcagcagcatcgacggcaaaatccatcagcgtatcgaccagctgacgatgaatcatacgcatacgattactggaccgcagcacctccatacgcgggtcttcgttcagcaccgtccactgattgcagcctcgatccagtctggaatagtcggcgataagctcttgcatgtctgttgcagtgggctgaggtggtaagccgttcaaatctcgttcgttcttgtgtcgctcgatccaggcattgaccgcatgttccagcactgcatgatagaacgtgccttcaagcgcggcatcaaaagcgaacgcatttgccacgttaactttcaatccgtatttcaggaaatactcatacggattgcgatagtacgtttctattgccgaaaccgatgcattgaacacacgagtcgagatcgaaggatctgcaccatgagtgcgataaacgcgatgcacataatccggcctagtgaacaaccgatatgccagttcgcggtcaaggggacgatactctgtttcaacggtcggcacagcgcgtttgctcgctccgatgatttcgctcgtatccgatgtacccgtctcccattggctgatatatggcgagcatgcttgtgcagcgttacgcagactctttggataggtcatagacaactgctgcgttgcgctggcaacaacaccgttaaaccatagcggttcttgcccggacctacgttccaccgtaccggaaagtacattccacgcttccaaagtcttgccttgggaagtcaggaactgtgacaaatccagccgctcgccgtcatcgagcagaccggtctcatgcggaatcgcaggcaattgagattcactgcaacccagaacaatcacatatctgtatggatgtaaaggcgatgacatcggcaatacgtccacggcgctggcggagaccggacgcgaatcgattgactgcgcggcgagcgtcgaagctagatttctagcaaagattcctacatattcagcaaaataatcgttaccgagctgttgaaccatgtcgtcaaacgcattcatgatgacggtccaaactggcgcggatccttcaatggtttgggcgtattcggtaagaaaaccaaccatcccgcctagagcctcccgcacggttgcgctaggccgcggccgaaacacatcagcggcttgctgaatcagcgaacgaatcttctgcaaatgtgcagcgaacggtatgtctgtatcgatccataccgttgccggattgttggagttcagctgattttcaatgtcatcgattgccgttggagtcaagttcagataccggctgaagataccggaacgcagtatgcgcaggatggactggggttgaagttcgtaggtcgcggaatcaagcagtcccagaatcgcatcagcgaacggatggtcaagcatcgtactggacgcggcaatattaatcggtatcccctgatacgtgaattccgatgcaatttgggcttgatatgaaccaaggtctcgtgaggtgaccagcacatcaccgtatgaaatttctggattgtccgcgatgaacttcttgatggacgctgccgcatagcgcacttcggcagtagtatccggcatcgcacacactgatgtagaagcggatgaagcgaaaatactggacagcgtatttcggtttccatcatcgcgtctctgcaatgcttccagataatccggatcagaaccggcaccaaccatcaccgtcagatgcacgtattgcgcaagtgtatgaactatcctcatctccgaagcgttgaggtgtgcgaaaccgtacagatagaaccagcgattactcccatgccgctgtgcccatgcacatatggtttcatgggcggctccggggaatgtataccgtttacctaaccgttgctccaccagttgcagcaaagagccaagcaccgaaagtcgagcattcgactgatgagcggccagagcaagcacctcttcagcactgaccccatcattatgcaattcaacaatttgcttggtgaactggtcaatagcctcaaacgagtcaccaacctgattacgcaacgattcattatcattcagacacttcgctacgtaatttctcagcgacatcatgctgattgatgggcgaatgtaccttccataatcctggttgccgataatcgagctcatcatgcttgccagagaatggacacccacattcatccccggttccagacgttcgcggaattccggtcggaccatcgactgcagtacttgcttttccacatatgcgcgcaagcttgccggtgtcagaataacgaatcgcccacggcaactatccggaaaatctgcttccgtacatccggcaccatcagaaaggacatgatcaatcagggcatgaatgtcatcacaccctcgctcgggccgtatcaccatgacactcataccttaccctccccagtgagttgtatctgttctcagcatataactgacgcaacaaatatccgggacttcgcgcatgacactttgcactcttacgcaagcctagtgatttcgtagtatcacattgccgtctaagcacacacatattgttcaatcgcacgtcctattggccatttgaaagactcacactggagctgttgccgagtggtttgatcccaatccgaaccattagggacgacttcatctgtactcttttgcgcacaaggacttgcatccattacatcctgcaataaatcaccctgtccatgggattgtgctgctctgtattgcctttccgcctcgataaggtcattgccacattgggcaagagccttcctgcaggggttgacgcaatcaaaagcaccggctctaatgaggtaattgacattccctgcattgcaatgttccaatgaaacacgacgtataaaatcattaaaactgcgataggcactgcccttattacgggttgaaacgatttcttctgccaattgttccgaaatgccccgtatcgcattaaaaccgagctgaattccatatgccgatttctcatcgtcaccggtactggaatacgctgtcgcataatattgagattgattaatgtttggcattcttacatgaatacctaaacagtacatttcttcaaatatactttccagtttcgctctagcgccatcctcgttataactattcaacattgcggtcatgaattcgattgtgtataacgttttcacataggcgacacggtatgcgaacattgcacgagcaacagcatctgcgcggtcggcacctctgctatggcatatgtcaattagctccgcaaaagaggtaagcttctgctgcatcagttcgctcttcattccatccaagaatggaataccggccgtatagcccgcggacagtaagtcatacacacggctctcatccaacgaactgcaagaatcgtcccatacttgcggcacattgcaatccggtatgaatcgaagggcatcctgcaccacctgcaaaactctcgaacctgcaatacggagacgaggaagcccaagttcatcacagccttttgcatcaaacgcggtgctttctgcccccgaaggaaaacgaacaatggacgttacttcggcaaggggcttgttgcaaagagccaacacatcactgcgaacggaacagtcatatatacagtctttcaacccatccgcaatagacttcttggcgttatcctgcaaccaaacctcagccgaggatgcatcccagaaccgttgatatccgcatacatgcgacacatctttcactgccttggcatcgttaaaacggctgtatgcaattacagcagctgcataaccattcccatatcggtcacatagatattgcaatacccgcctggacagtccccgttccgtttgcaaaacagctgtaggaaagactgaatcttgaaaatcagtaaagggtaaatcgtattcgatgggatcaatctcactaatccccagcgcataggcgacaaggctgcgagccaatatccccttcccgggcccgaccaaatgcccctcttctcgcaatcgattcgtacaatatgcgacggccatcaagtattcttcagcatgggtttcacgaatcacagccatttcgtgttgagcacgattccacactgaatccggtatgcttccatacttcgtttgcagccatccttcaacttccccttgaagaatttcactcgacgctcggccatcagcaccaacatgctgcggcattaatgagccatcttccgctacacaaaatccggtatcgcaccgctctgctatgagcaacgtattgtcgcaggcttcaggcacatcggagaacagagaccgcataaccgcagatgaacgcaaataatactcctcgctttcaaacttgaaacgatgaggaccatccatcacatcacctgtttcaatgcatatacgcacatcatgttttagactgtcatcacgctttgcataatgcacatcactagttgcgactaacggcgcattaattcgtttcgccagttccactagatcattcctgatttggtgctcaatggacaaaccatgatccatgatttctataaagaaattatctcgaccgaaaatatcctgtagttcaccggccattcgcaacgcttcatcaaattgtccaagcaacaatcttgtcggaatggctccagacatgcagcccgacccacaaataagtccttttgcaaatgatgacaagacattgttatccatgcgaggataacgcgagaccagaccttcgagattcgccacggaagatgctttcatgagattgacaagaccttcatcggactctgcccatagcgtcaagtgagtaaacagcccaccaccgctgacatcataaggatcatgaggcacacaagtaacacttcttcgagtattcctctctttccacgaattatcccaagatatgcatctcgtatccgtgcggccagtttctggcgttacgtatgcttcaacacccaaaatcggcttaatgcctcgctgacgtcctgctttccagaactccatcaaaccgccgacactgccgtgatcagtcagaccaattgctggctgacctaatcgttgcgcttcactcatcagctcgctcacagtagagacaccatctgccagcgaatagtcactatgtacatgcaaattaacgaaatcccgcataagagcaccgcctccatagtcatggttgcttcgaattcgaatcggctgcatgttcagtttcctgccgcgctacaatcaacggtaattatctactggttcttgaagcagtctcgatactcagcgagaggaacatgatggccgtctcatcgcaacaagcaacaccttccactgcgcagattgtcatcgagattctcgaactgctggatgcgcatacagaccgcgagcacgggattactgccactgagatcagcaagcgcatcagcgtttcggaaaagaccgtacgagggcatctcaaggcgttgcgtgacatgcaaccattcggccgtcgggtggagcatctggagcgtcgagacctgctctctgctgaaagcgctgatccaaagccgggatggtacattgaaccggtgtttgatacggcccagatgcgtctgcttgcggacggcgcggtaatatcacggtctgacagcgaatatctgagcgaccttatcgccaaaatctatacgttcgcgggcaagtcgggccaattgcgcggtctgaggcagctcactacgccaaagaattacaacaccgagtttctcaacaatatcgaaatgctcaacgatgccatcgaacacgaacgagtaattcgattccgttactgcacctatgacattgatggcaatctggttcctcgccgcgacaatgcgggtgaaatcaaagaataccaagccgatccgtaccatctgatgtacaagaacaacaaatactatctgatttgccacatgcatcagcatgacagtctctcgtatctgcacgtagaacgtttccgcaacctttacgtcgaggagactgatcatgcgctcaatcgctcactggatagcttcagtccgattccgggaacgccgttcaacatcgaagagcatatggacgaacgcccttaccccatggacggcgcagcagtaccgattcacctgcgtattaccggcacgctggagcccttgtacgactggttcgacaacgccaaggtcactcaaatcagcgccaacgaatacgacgtgcatatcatggccaacgaattagcgaccttgtggtgggcattgcaatatgccgattcgcgcctcattgaagtccttgaaccacaatccttacgcattatgctgcgagatactggcgaatctttgctagaaaagtatcgagactagctagtcccgctatattctcaccaacgctcagctcttttgtcggcactcggcaatgagggcggcacagagcaaaatgacctgggcgacgaggttgaaccaaatgagcacgccgatcaacgcggcgaacggggcaagcatcggattccgggaggctccggctaatagtcgcgcaccgagaagctgcattgcggaaaccgtcagagatcccagtaacgcgccgagtatcgtgaatcgtccggctttgatgtgggagaccacgcgcagcagcaacatgaacaacgcgaaattcagcgcgacaccggtaccgaaaccggtcatctccaaaagcacgatgccgggcaacgaactgctggggatgccgccccattgcagcagtcggcgtacgatgccgccggacaccgtaccggccgcggtcgaaagaatgaacagtattgcgatggcgatggcggcaagcgtatcgcgtaaccttgcgacgacgatattgagctcgtcgccgcagtcgtcgaacatggcccgtacggcgtggcgcagcgagttcatccagccggtcaccgtccaccagaacatggccaacgtggccagaccggtccatgtcaatgtgcttgacatggtgtttagtgcggaagacgtcagaaacgagtcggccacaccgggaatgacttcacgcaccgcgtcgatcagcatctgctgccaatcaatgttgccgaccatgataaggccgaacacgctcaccgcaatccagacgccggcaaaaaaggcgaatagcagaccatatgccagaccattcgccagcagggggccgcgccgcgacacataccggtcgagcacgcgcccaggcagcgaacgcgcccacgcgtccgctcccctgtcaatcacactcttcaacccatgcatagttcaactgtagctgttgttaccattgtcccgaattcaatttgtaagtgcaacgctcgtcgggggggggggtgacgttttgttggacttcgttgtctgtatggtcgttcgcaacgatagcacgcgcgttcaggcgacgagcccgagttcgatgcgtttgtccatgatgctcatgccgtattcgagtttgatgcgcttgtccctgtaccagaccatgcactcgtccaacaacgtgacgaactcgtcgatcgagacaccttggaagcttcgcttgtggaagaactcctgcttgcctgccgaagcccccggcggctgcgttgtccggactgcggcccttcgcgcccatcgaccgcgtcaggccgtggctcccgcagacgcggatccattatgcacatctcggtaggaacaaaacaacgtcaatgaagaaacctgaagaatcgctggttgtcctgtcatctttagatgacaggacaaccagcgacaagagtaatcgcctcccgttgtctaaatgaaagtgcaacacccgttagattggagattgtccagataaccagtccgaagggatgtcgcacctatgggagaagtgtattcgcacctgtcggaagaggaacgccaggtcatccagatcgaggtaggcaacggcgccagcatacgcgggatcggcgcgatgctgggccgcagcccgtccagcatcagccgggagatcaagcgcaacacatggttcccgtccaacgagaacgagtcgtaccgcccgtaccggccgaaaagactgaaggcggggccatggaccggccgctactacatcgccgggcccgcgcagcgcaaggccgaccgcaggagatccaagccacgaaagccctaccggctgtcgcacgaccgcctgtgggcgcaggtggccgaatggctgggccgcggctggtcgccgctgcccgtcagcggcaggccgcacgtcctgtggccggacgatgcgctcatgcgcgtgtgcccggagaccatctaccgatgggtctactccagcaggccgcttcgggaacgctgggcgcggtgcctgccgcgagggcacaggcggcgccgcaggcacggcggcaggaggacgtcgcgcttcccgatccccggccgagtgcccatctccgaacgcccgccggaggccgacggcaggagcgcgttcggccattgggaggccgacagcgtcatcggagtgggatgcaacctgcacaccgaggtggagaggaggaccaggttcctcatggcccgcgtcgttccggacaagaccgccggcgagagcgtcggggcgcagctggacatgttctcgccgctgccggccggcgcgcgcgtcggcgtcacgcacgacaacggcaccgagttcgcccaccacgaaaggctgcgcgacgggctgggcatggccacgtacttcgccgacccgtactccagccggcggcggggaagcaacgagaaccgcaacggcatgatccgccggtatctgcccaaacgctgcgagatacggatggacatggcaaaggaggtcagggagatcgtcgacgagatcaacaaccgccccatgcgcgtgctcggctaccgcacgcccgccgaggcgttcgccgacgaactgttagaattgcaggaccaacaagggtgttgcacttctaaatagacatcggggtaggctccgcccgcaagtcacagtggtacaattttcaggtttgagactgtagcaagttgagtcgctttatcagtaagtctgtatttggaggtatcgatggtccatcgtccgcttatcggcgtggtcccgttgtgggacgacacactgaatagcctgtggatgctgcccggctatttcgacggcatcatcgaagccggcggcatcccggtgatgctgccgctgaccgacgacgagactacaatcgaacagctggtcagccaatgcgatgggttcctggtcaccggcggccacgacgtggatccagaacggtatggcgaggcggccggccccaagacggtcaaactatgcaaggcccgcgaccggatggaggagcgcctgatcccctccgtcatcgcggcggacaagccattgctgggcatctgccgcggcatccagagcctcaacgtcgccttgggtggcacgttgtggcaggatctgccggacgaacatcccagcccggtcgtgcatcatggcgacaagccgccgtatgacccggtggtccacgaagtgtcgatcacgcccgattcgccgttggcccgcgcgttgtggccgctgggagacaacggcccgagtgaggcggaggccgatgaggtcgattccttcggcaggccgtatcatccgcgcgcctatacgctgggcgtcaacagttatcaccatcaggcgattcgcacgctgggccagggactggaaccgatggccactgcgccggacagcatcgtggaggcggtctggatgccggccaagcgtttcgtctgggccgtccaatggcatcctgagttctctcaccgcgccgatagcaaccaacgtcgcatcctcagcgccttcatcgacgcctgctgacgcaagctcccgccaatctcgacgaaacgtcttccaagaaatggcttgcccgcatccgcagccccctaccacgacatgagcgcccttgacaacgtcaccctcggcatgcgcttcacccgtgacagcaaacaggtcaggcagcgcaaggccaaggccatgctctcccggctcggactcggccatgtcgcgggagacaagatcatgaccctctccggcggtgaacagcagcgcgtcgccctcgcacgatgcatattgaagcccggggatttgatcctcgccgacgagcccaccggcgcgctcgaccgcgatctcgcccaacatgtcttcgacgaaatgctccgcctccagcacgaatacggcaagaccctcatcatcgtcacccacgatcttggcatcgccgcacaatgcgacaacaccatcgagctacaggcggtttgacggagatattccggcagctttggtctaccgaagtcacgtgttgcccttcaatctcctcggaaatctaggtggcccatttttcaaagaatgcgatcggacgtaacgccccgtaaggagacctgcaatatgaaacgttgaatcgtcatctaaagatgacgttttcgtagatcttccggaatcgccagtcatctgcgatccggatatggcaccggtccggctcgatcgagcccggacgaccatggagaaaacgaacgatcgaatccgaacgcgggtaaagagcctgcgcgacaccattgataaagccaaatttaagaaaacagatcagtatgcataagttttacatgccttcagcctcgtcaaccggcagcgggccccagaatccagtcacagccaggcagagcgtacaacatactgcgtagtacatggcgcgaatcccaatgaccaccatcgattgatgacggccacgaatactcgtactcagccttactgctttggctcatttctgttcacttcacgctggagtaccgagacacgttgagcggaaataccggtaattcacgtacggttaccgaccattggcctgaacggtactcagcatccgcagtcacttggggtatggtcatgacggagagccatcatgaccgatctctcattattctgggatgaatccggcgaggctggaactgaatctaaatattaaaacgcatgatgcacacgttgcggaattagtccaccagaacttcggcatgctcggcaggttcagcgggttcgatgtgacgggcacgcatggcatcgagggcggcggccaggtcggccgggtactgggaccggaccgtggtccagacgcgggtgcgaggatggcggaattcgagcttcatggcgtgcagccactgccggtcaagtcccaaagcttcagacagcaccggattggcaccatacatggggtcgccgcacagaggatgcccaatcgaggagaaatgcacgcgaatctgatgggtacgtccggtctccagattcacggataccagtgtggcctcatggccgaaacgctccaacacatcccaatgcgtaacggccggtttgccggccggagtcacgcagaagcggaaatcggacactttggcgcgcccgatcggtgcctcaatggtcgctttgttctctttaagaccaccctgcacgagcgcatgataggttttctttacctcatgctcggcgaactgccgacgcatctcggtgtacgcaaggtcggacttgcacaccaacatcaagccggaagtgcctacatcaaggcgagaaacaatgccttcacgcccggccgcgccataggaagcgatatgcacgccacgatcacgcaacgatcccaataccgtgggaccggtccagccaaccgaggcatgcgccgccacgcctacaggcttatcgactacgacgacatcatcatcttcgtagacaacagccatatcagttgcgataggctcaggcccggcctgttcctccgccaaatcaaattcgacggtctcccccgcctgcaacgtgctggaccgcgcaacttcacgccctaaaacgcgcgcctgtccggagtcaaccagatcggcggctttagatcgtgaaatacccagcattttggccacggctacgtcgaaacgcttacccaccaatgcatcgggagcagggaccattcgactcattacttggcgtccgcctccggctcagactgtagggattcgtcggattgctcgataagatccttgtgggagaacggctcccccataagaatcagaatcaccaggaccacaccggcgactaccagatagatatccgccacattgccaacggaccagccatagttaaggaaatccaccactttgccgttgaggaagccgtcagcgtacataacacggtcaatcaggttgcccagagcgcctgcaaacgcgaaagaaagcgccaccgaccatttcatggagatagtgcgcaccccagccacagcaagggccacgcaagccacaacggccaacagactgattacccaagtagcgcctgaccccatgcccaaggacgcgcccggattacgcaccaaggtgaaggacagcagtccgggaatcacgcgaatggtctgaccgttggataacgcggccatcgcccaagccttggtgagctgatcgacaatcagcgcagccgcggccacacatgcaaagacggccacgcgagtgcgcagccgtccctgttggttcgtcatacgacctgtacctgcctgcgctcagttggtcttggacgaggtctggtcgacgtagttgttcgactcggaaacctgcgatgccagctggccgaggtactcggtgaggcgggcgcggtattcagtctcgaactgcttgaggctctggatgttgccctcgacgaccttggactgagcctgaaggttgtcgcgcacctgctcggcatacgtatcggctgcagagcgggtgttcttgtcgtacgcatcagctgcggaacgagtgttcttgtcatactcggcggcacgctgctgcacttccttctcgtagttgtcagcgtcatcgtgctgagacttggagtagttgtccgcatcctgacgagtcttgacggagtatgcgtcggcctcagaacgggtgttctgggagtaggtctcggcatccgcgtgaatctggtcacggtaagcgtcggcctcggagcgggtacgatccgaataggtgtcggcgtcggaacgagtacgagtggagtagtcgtcggcctcggagcgggtacgctcggagtagttgttggccttggtgaccagatcgttgtacttgttctggctggcctcggtgatttccttggccttgttcttgcccttctccacgtactgatcgtgcagctgcatagccagggtcagcatggcggtggcgcgctcgggctcggtgcccggcatggaagcgacgccagcgatcttctgcagagaaccggtctcagtgctcggctcgaccttggaaacctgggcacgaagctggttttcacgctgcttggcttcttcgagctgacgagacagttcagcgatctgagcggactgctgctgagcggcggaaccctcctgctgagcagcggcgagctgacgggacagctcctcgttggccgcgcggaactgatcacgttcctgctgaatggcggcgatctgctggccgacggcttcctggttaccggaggcctgagcggcctgggcggtgagctgatcgatttgagcgttcagctgatcgacctgacccttgagctgctcattctgggaggacagcgcgcggttggattcctcggcttcgctgagcttggcagaggcaagctgtgccgcctgatcattgccagcctgagcggcctgctgggcctgagccacagcgttcttcaaaccagcattctccgactggagttgctgcacctgaccggtaagatcggagatcttcgcattaaggttggtcacgtcagggcccagagactgagtggcctgaccgccggctaccgcctgacgtccaagagcctcgacggtttccgtgacctgatcaaggaagtcatcgacctcgtcgacatcataaccttccttgaatcgaacagtctggaaggtatgctccctaatatccttcggcgtcaacagagccataaatcttgcacctcgctttggggcattgcccgcacttacgttggtctcaagtcagaatgctatcacgaccccatcgtttcagaacattcaacgtgggtttttatgccagatatatgcctccggcgggtcaaaaacggcctcagaacactatcagaacaacactttctagtaccaccaacgcaaaatacagcacgatgaagctgacatcaagataaatcgagccgagcggcaatggacgaatatagcgacgtagccagcgcagagggggttcggtaatggaatacacaatgttgatcagctgggccaccacaccacgtggataccagtttcgtgcgagaacggagacccagtccagaatcatgcgcacgaacagaaccgtgatatacgcgttgatgagccatgcaagaatgcggccgatcagagagaacactaaggaaagcatgcagacagactaacaaccgcgcatgaaaagtttgctcggagcgcaataagaatcggccgactccttgctgggagtcggccgaataccgatataacgtcgaatgcgaaaactactgaaccggtcagtcagcgaacaaatcgtgtgccgaggttggttttgtcggctcttcgaccttgatgttcacctgcgccgggctcaacaggaacacgcgcggagtgacacgctcgagggaaccacgcacgccgaacaccacgccggcggagaagtccacaatgcgatatgccacggcttcggccacaccggtgagattcagtacgaccggaacaccgtcacgcaatgcgcgaccgaccagctgagcatcctcatatgacttcggatggatggtggtgattctgttcacgcgaccaccggggaacggcttggtagtcgacgatgcggcaggcgcggtggttgatgccagcggcgtgaccgtatggtcggaatcgaatgcggacttcggagccggcttctgctcctcgtcctcttcgatgtagtcgtcctcatcgtccacaacgtcgctcatgcccagataggacatcgcgtttttcatgaacccagccatggatcagtcctttcagcgcaggaaatcaggaatgtcgagatcgccggcgggatcgttcacggcgatgttcggatgcgaggtagtcggatcgtcaaagggcagggatgccgggtctgcggtcgtcggggtgaattccggacgcggagtggccacgggctgggcggccggagcggcggcgggctgctgcgtttgcgtggcagccggctgggcggccggtacggcaattgccggagcggcggcagagggatcctgcggtgtaaccggatcgaaaccggccgcgatgacggtaacacgcacttcgtcgccataggcatcgtccagagcaagaccccagatgatctgggcctcggggtgaatggccttgcgtacaagctcggtggcggcggaagcttcctgcagcttcagatcggtcgggccggcaatgttgatcaacgcgccgtgggcaccctcgatgctctcctcgagcagcggggagctgatggcgatttcggcggcctgggtggcgcggtcttcgccccgcgcggaaccaatgccgaacagcgcagtaccagcgccacgaagaatggagttcacgtcggagaaatcgacgtgaatgtaggaattcatcgaaatgaggtcggtgatgccctgcacgccggcgaggagtgcggtatcggccgtcttgaaggcttcgatgatgccgatggaacggtcggaaagctcaagcaggcgatcgttcgggatgacgatcagcgcgtcgacttccttgcgcaggttgtcgatgccgtattcggcggaagcggaacgctgaggaccttcgaagctgaacggacgagtgacaaccgcgatggtgagagcaccttgctgatgagccgcacgagcgacgatcgggctggcgccggtaccggtgccaccaccctcaccgcaggtgacgaacaccatgtcggcacccttcagggattcctcgatatcagactgatgatcctgtgcggccttagcacccttctccgggtccgcgccagcgccgagtccgcggctggactgatcggacagggagattttcacgtcggcgtcggagcgcagaagatccttcgcatcggtatttaccgccacaaattcaacattctgcagtccctcggcaatcatgcgattgacggcattaccgccggcaccgccgacgccaacaaccttgatgttggtcttgtcgttgaactcattctgcgcgatctcgctcacgtttggctcctgtcacttcacggttacacccaagagtagcgcaaacaggctactcttggagggaaattcacgcgcagaatggcgcgtgttgcgtgtattttcagtattttctcagtaactggcgtccattgggtcgtcaccgaagagcgcctcacgctcttcgtgggtggtggtacgcgattccaaccacccatacggcaagtgcaccttcttggcgaaacgcacgcggccgcgcggtttgtcgaccacgcgtggcgggtattcgatggtcgggtcgagcttgccgatctcgcggtccacatcggccaggctctcgcattccataaaggccttgcgggtggacccacccaccgggaaccctttcagataccaggcgatgtgcttgcgcagatcgtggacggccatcatctcatcgccctcatagaactcggtaagcagctcggcatgacggtgaatcacccggcagacctcgcccagattcgggttgagccgttcgggattgccctcgaaggcgtttttgatgttggcgaacagccacggccggccctgacatccgcggccgatggccacgccgtcgcagccggtctcgcgcaccatttcgagcgcgtcctcggcaccccagatatcgccattgccgaataccggaatgttgaggtgttccttgagctcgccgatgcgggaccagtcggaatgaccgccatagtattcggcggtggtgcgggcatgcagggttacggccttgcagccctcctcctgcgcgatgtgtccggcttcgaggaaggtctcatggttatggtcgatgccgacgcggatcttcgaggtgacggggatgcccgccggctcgcatacggcgaccacgcgctggatgagctcggtgaagatgtcggttttccatggcagggccgagcctcccccgcgacgggtgaccttgggtaccgggcaaccgaagttcaggtccacatggtcggccatgttgccgtcgaccacgattttcgccgcctgttcggtgatggacggattcacgccatacaactgcagcgaacgaattttttcgcttttggcgaaatggcagagacgcagggctttcgggttgcgcgccacgagggcccgcgcggtgatcatctcggccacgtaaagaccatcgggaccgtattcctcgcagatcacgcggaacggccagttggtcacgcccgccatcggcgaaagcaccaccggggtcggcacggtaatgttgccgagctgcacgggggcgatgtataccggagtctcgggccgggccggcgcgtccgtacgcgggtcgagattgttggtctcgtgagtagcggtgatggtggtttcggtttcagattctgccatgtggttcctgttctgaaatagttttggctcccctctttgaggggagctgccgccgtaggcgactgaggggagtcgcctcagcaagagcccccctcagtccacttcgtagacagctcccctcatagaggggagcctctatacagacccgtctttagtacagaccgccggcttcctgaacgccggactcaggccaagcctcgccgcccatttccacaggcttcaggggcacgcgggtgcgcttctcgccgatgcgggcggccacgtaatcggccaccttgtcaagagcgacgcgctcctgggccatggtgtcacgctcacggatggtcacggcgtggtcctcgagggtgtcgaagtccacggtgatgcacagcggggtgccgatctcgtcctgacgacggtaacgacgaccgatggcaccggactcgtcgtagtcgatcatccattcgttgaagcgcaggtcgtcggccaggttctgggccacggtctgcagttcaggcttcttgctcagcggcagcacggcggccttgaccggggccagacgcgggtcgagacgcagcacggtgcgcttgtcgacgccgcccttggtgttcggggcctcgtccacatcgtaggcgtccacgaggaagcacatcagggaacgggtcagaccggcggccggttcgatgacgtacggcacgtacttctcgccggtggcctggttgaagtagctcaggtcttcgccggagtgcttggagtgcgcgctcaaatcgtaatcggtacggttggcgatgccttcgagctcgccccagtcggaaccttggaagccgaacttgtattcgatgtccacggtgcgcttggagtagtgggagagcttctccttcgggtgctcgtagtggcgcaggttctctggcttgacgccgaggtcgatgtaccagcgggtgcgggcgtcgatccagtactggtgccattcctcatcggtgccgggcttgacgaagaactccatctccatctgctcgaactcacgggtgcggaagatgaagttgcccggggtgatctcgttacggaaggacttacccatgttggcgatgccgaacggcggcttggaacgggaggaggtcatcacgttcttgaagtcgacgaagatgccctgtgcagtctccggacgcaggtagtgcaggctgttctcgtcctcgaccgggccgaggtgggtgcgcagcatcatgttgaagtcgcgcggttcggtccactggccacgggtgccgcagttcgggcagacgatgtccttcatgccgttttccggcatcttgtcgccgtgcttctcggcgtaggattcctcgagcttgtcggcgcggttgcgcttgtggcagttgaggcactcgacgagcggatcgttgaacacgctcacgtggccggacgccacccacacttcgggcggcagaatgatggaggtgtcgacaccgacgacatcaggacgggtgacgaccatggagcgccaccattcacgcttgatattgtccttgagagcgacgccgagggggccataatcccaagcggaacgggtgccgccgtaaatttcgccggcggggaacacgaagccgcgacgcttcgcaagggatacgacttcatcgagtttggactgagccacaatgcaccttctggtttgaacggtttggggtctaataacaaccgcttcaggatagccgtatacggtgacaggtcaggcggcattgtccggtatatgttccgcgtctcacgagcggccgttcgcagcgattcctatatcgcaaacacctccatattgttcctgttgttttgcccttccccaatttgtaccactgacatcgcgttagcgtcacaaattcgggagatgttgctcggcggaggcgtccacatatcacgaatggacgggacgcgccagacctgacgacacgtatcgaacaaatccgtcacgataatgtccatgttggcgcatagcgtcggcactgtagtgcagggggactcgcatgtggttcgcgagttgagaaaggcctgagcctgacccttagaacctgttggttaagaccatcgtagggagcagtaaatgagcaatagtgcatcatcgtttgccgatgtgtccagcggttgtaccgccgggactccggttccagccgattcacccatccgcgacaatatcgccgatgccgttcgccgcgtacgcgagacgactccattggcccagtcattcaccaattttgtgaccatcaatttggttgccaacgcgcaactggcggccggcggcactgcggccatgagtttcctgccggacgacgtgatcgaaaccgcgaaaatcgcgggcgcgaactacatcaacgtgggcacgctgctgccgttctataaggatgcgctgcccgaaatcgcccagcgactcaactacttggacaagccgtgggtgctcgacccggtggccgccggcatcggccacacccgcaccgccattcttcagaccttcaaggccgctcccccgaccatgattcgcgcgaacgcctccgaggtaatcgcgctggcgaacatgtgggggctcaataccgaaaccgtgggggacgcttccgagcaccgccccgccggagtggaatccgtcgacgacgtggagtccgcaaccggtgcggcggtggcgctggcacagtatctgaccgaacagcacgccaagcattcctcccatgacgcttccacccgctgtgcagtggctgtgtccggcatcgccgatctggtgaccgacggcgaaaccgtgtaccgactgccgggcggcagcgcgatgatgaccaagatcatcggtgcaggctgctcgctgggcggcgtggctgccacatatctggcggtttccgatccgttgaccgccgctctgtccgcatctctgctgtacaaccgcgcggcagagatagccgatacgacttcgcacgggccgggctcgttccaggtcgcgttccttgacgcgctgtggaatgttaccgccgaacaggtggcggaatccgagattttggtgcagtagtttcagttccctctgatgagggagctcataacagtttttcccaataagacttccacaagaaacaacaaaggtaggaataataatgagtaatgaatacccatacgcctccatgcgagacaacttcgacttgtccgcgtacttcgtggtggggccggaggactgcaaaggccgtccgctgaccgacgtggtggatcaggctctgcgcggcggcgcaaccttcatccaactgcgcgccaaggaggccgatgcctctgagctgaccgacatggcccgcgacatcgcgcagatcatcgaggacaatgagaagtccgattccgtggcctttgtgatcgacgaccgtgccgacgtggtgtggcaggcccgccgcaagggcatcaaggtggacggtgtgcatatcggccagaccgacatggagccgcgagaagcccgcgccctgctcggcgacgaggccatcgtgggtctgtcggctgagaccgaaagcctcgttcagctcatcaacgagctgcccgacggctgcatcgactacattggcgccggccctctgcacgtctccaccaccaagcccgaggcttccgtgggcggcaacgacggctccggcaagacactggacgccgcccagatcaacaccatctgcgctgccagcgaattcccggtggtcgtgggcggcggcgtgaccgcagccgatatggccatgctcgccggcaccaaggccgccggctggttcgcggtctccgccatcgcgggtgccgagaacccggaagaggccgcgcgcaccatggtcgaaggctggaaggccgtccgcggcgacaagaagcacggctacgcgccgcgcgtcgtagcccacacccccgctgctgatactcaggctgctcaggaaggggccgcaaagcctggctccgaggccactgagaagaagttcaccaacgccaaggacgccaaggatgcccagaagctcgccaagcagcagcgcgtggacatcgccgcccgtggttccaagcagcgcgacaaggcgcacatccgcaagaccaagtccgtaccgttcacctatcagtatggttcctacgacctggaagtgccgtacaccgaaatcaagctgagcgacacgcccggcgtgggcccgaacccgccgttccacgactacaacaccgaaggccccaagtgcgacccgaaggaaggtttgaagcccctgcgtctcgactggatccgcgaccgcggcgacatcgaagactacgagggccgccgccgcaaccttgaggatgatggtaagcgcgccatcaagcgcggccgcgccaccaaggaatggcgtggacgcaagcatgagccgatgcgcgccaaggaccacccgatcacccagatgtggtacgcccgccacggcatcatcaccccggagatgcagtacgtggccacccgcgagaactgcgatgtggagctcgtgcgctccgagctggccgccggccgcgcggtgatgccctgcaacatcaaccaccccgaggccgagccgatgattatcggatccgccttcctgaccaagctcaacgccaacatgggcaactcggccgtcacctcctccatcgacgaggaagtggagaagctgacgtgggccaccaagtggggcgccgataccgtgatggacctgtccaccggtaacgacatccacaccacccgtgagtggattcttcgcaactcccccgtgccgatcggcaccgtgccgatgtaccaggccctcgaaaaggtcgaggatgatgcctccaagctgagctgggagctgttccgcgacaccgtgatcgaacagtgcgagcagggtgtggattacatgaccatccacgccggtgtgctgctgcgttacgtgccgctgaccgccaaccgcgtgaccggcatcgtctcccgcggtggctccatcatggccgactggtgcctgcgccaccaccaggagagcttcctgtacacgcacttcgacgagctgtgcgacatcttcgccaagtacgacgtggcgttctctctgggcgatggcctgcgccccggctccctggccgacgcgaacgacgccgcgcagctttccgagctcatgactctgggcgagctgaccgagcgcgcctgggccaaggatgtgcaggtgatgatcgagggcccgggccacgtgccgttcgacaccgtgcgtatgaacatcgagctggagaaggccgtgtgcaagggcgccccgttctacaccctcggaccgctgaccaccgataccgctccgggttacgaccacatcacctccgccatcggcgccaccgagatcggtcgttacggcaccgctatgctgtgctacgtgaccccgaaggaacacctcggcctgccgaacaaggatgatgtgaagcagggcgtgatcgcctacaagatcgcctgccacgccgcagacatcgccaagcaccacccgcacgcgatggatcgtgacaatgcgatttccaaggctcgcttcgagttccgttggctcgaccagttcaatctgtcctacgatccggacaccgccatcgccttccacgatgacaccctgcccgccgagccggccaagatggcgcacttctgctcgatgtgcggcccgaagttctgctcgatggccatctcccagaacatccgcaaggcattcggtggcgaggccgctcagcagcaaatcgtgaaggaggctgctgctggcatcgactccgaggcactggctaaggccaaggccaatgtcgataacgacgtggtgtccgccaacgtgctcagccccgaagaaatcctcgccggcatggatgcgatgagcgaaaagtacaccgcccaaggcggcaagctctactccaccgcccaggagtaaacctctctggctcccctctctgaggggagccaattattatgcccggtggtgtcttaattcgggacgacgctcgactcgctcgaaggcggtgacgaggtcggcagcacggatcgcgccgcggcggtccttggcggccaccagagcggcctcggtccagatggcgcacacttcggcgccgctccagccttcggtccgctgtgcgatatccaccaacggcagttcgccctcgattgacaacgaacgggcctgcacctgcagaatgcccaaacggtcgcgctcagacggcatcgggaaaggaatctgccagtcgaaacggcccggacgcaacaaagcgggatccacgtcctcaatacgattggtcgcagcgaccaccacaacattgcccttggactcgaaaccatccatcaacgtcagcaactgcgccaccaagcgcttgccgacgccattggtatcgttctcgcgcgaggacgcaatcgaatcgatctcatcaaagaagatgatggcgcgcttgtccgcctgcgcggcggcgaaaatcatgcgcagcgtttcctcactatcgcccacatacttgctcacgatggtcgggccggacaccagatagaactgcgcgtccgccacattggcgatgatgcgggccagatgcgttttgccggtgcccggagcaccggtgaagatcacgcccttgatgggcttggcaccgatcgcacgcatctgcgcactgttgcccagctgcgtttcgataagctccttggcgcgcgtgatcacctgctcataaccgccgaacgaatcgaaggtaagcgacggatcgctgcccggcgtgatgcggtactgcttgatgtcgtcatcgtgatcggattcgcctgggcggatggccgtgggccacagcactcgttcgatgccgaacaggtcggtgaactgcacggtgttgccgggcatgatcgaattcgggtaatcgccttcaagcagttcgaggccgtcggaagtctccaggaccacgccttcgttgagcgcacggcgcacgatgcccacacggggcttcaacggccacacatcatgcggcactttacgatagaaatccgtgccgacgagcaacacgtcgcccacatcgaacacctcctgacgcggaaatgtgagctgtgtggtgtgcccattaggcattacgccaaaatatgcggtgcgttcatcgtcaaaaccagtgatgcgcaccaagacgccgtcacggcgcagtacatcgttatcagccatgtcccctcccgaacatttcatgaatcaatcgcaatcagcaaaccctcccatctcaccacaggagcggcaaaacatcaaggaaaaccgctccgaaaaacatcatgggccccacttagaatgaacactatggcacagattgcaacatctacacttcccgctgttctcgcgatctccggctccgactcgtccggtggtgccggcatgcaggccgatctgaagaccatgctggcttgcggcgtgttcggcatgagcgccatcaccgcgctcaccgcacagaacaccaccggcgtgcgttccattcaggacaccaaaccggacattctcgccgaccagatcaacatggtgtttgaggatattccgccggtcgcggtgaaaatcggcatggtgtctgccactgacatcatcgacgtcattgctgaacgactcaccttccatcacgccacgaacatcgtgctcgacccggttatggtggccacttccggtgccaagctcatcagtgacgatgccattgcggccttgaccggcaagctgttcccgatggctacggtcgtgactccgaacattcccgaggccgaagtactgaccgatacgctgattcgcgatcaggaggatatggaggccgccgcccaccgcatcgtggagcgttacggctgtgccgcgctggtcaagggtggtcatggcaccgaggatgccaacgatgtgcttgccgagacggatggaaccgtgacctggtttgatggcgcgcgtatcaataatccgaacacgcacggcaccggatgcacgctgagctccgccatcgcctcgtatctggcgcttggcgacacgctgcccaaggccatcaagcatgcgaagaagtacctgaccggtgcgctgaagacccagctgaatctcggccacggctccggcccgatggatcatttctggaagtatcgctgacataagtgtggctgttaagctccccttgccaggggagcttagcactactgaaaaaggagaatcatggttcttgaccgtaatgccgttactcaggaagtgccgatcgacccggaaaccggcaaaccgtacctcaacaccgtggcagccatccaggtgtcggccaatggcgtgggctccgaggtttcaccatacgtggctcaggccgtcgaagtgattcgcgaatccgccctgccgcaggaaaccaacgccctgttcaccaacgtggaaggcaatctggacgacgtgctcaaggtggccggtgaggccgccaagaagctcgccgagcagggctaccgcacttctctggtgctgcacatggatatccgtcccggcttcaccggccagctgaccgaaaagcccaagctggtggatgagatcctcgccgacaagcaggcgaaatagcaaagcatcgcttccaccagcaagggcatgctttgttattacacgtttcatggggcggtaactcacccatagggcggtaaaaccctcatggggcggtaggcgaaaacggctctattctgcggaaaggcaaaatccgctaaccgccccatgggccaaataccgccccatgagtgttttaccgccccatgggaatcacggttctgccttctttcaacggggtaagaacgtaagtaaggcatatataggagcgttacaaactctgttatcgttcacaatgtgaccgcaacgcggcgtgccacaagatcgaacctatagttaagccccatgtagtgagctatctcacaacgattggctcgctacgtggaattcaagacttggactgcaaacgtcgttcatcccacacaatgggagggcgaacggaacacgcagtccaatcaagagttcgctcgccgcaacatcattgagcagttgcacgcgggcaggtttgcaagaagagggctcaaatatgactgctgctgaacagcagatttccggcaatcccgcggctatggaaagcgcacaagcacgtaccaccgtgacggatcaagccaaggttcaggatattatctcgcgcgtggatcgcgcacatgaaaccccgatgttccatcgcatcgtggcgctggtcgccgctggcatgctgatggacagcatcgacgtatatattggcagcgccgttgcctccagcgcgttggccacacactggtccaccgttgcgcaaaattccacctttatgtccgcaggcttcctgggtctgctggtcggttcgctgctggccggcttcgtcggtgacctgaagggccgccgcgtggcttaccaaatcaacctgctgctgtttggcggcttcaccttcctcggcgcattcgccccgaacatggccgtgctgtccctgtgccgtctgggtgccggcctgggcctcggcgctgaaatcgtcaccggcttcgccatggtcaacgagttcgcaccgatgaaccgccgtggccactggtgcgcgattgtctcgctcgtggccaactgcggtgtgccgatcgctatgctgctgtgtgcatggatcatcccccgctggtcctggcgtccgctgttcgtggccatcggtctgggggccgccatcatctggtggctgcgccgcgacatccccgaatccccgcgttggctcgccgtgcacggccgttacgatgaggccgacgccatcgtcaagcagcttgaggccaacggctccgaactgatcgacgcagccgccaaggccgacaccagcgacacccgcaacgccggcggccgttcgctcggcatctgcctgcttgtagctgtggttgctgtggccgccacgaacgtgtgctcctacgccttcacttcttgggttccgacgattctggtcaagcgtggtattaacctgtccagctcgctgctcacctccacggcgatgatgctcggtgccccggtcggctgcctgattggctctctgcttatcgaccgcatcggccgcaagcgcacgattgtgccggccttcctgttcactggcgtgttcggtttaacgtatgccttccagacctctaccgtgagcgcaattatcgttggcttcctgctcatgatgtgcctgtacgtgcttatggcttccgtggtggctgtgtacgctccggaactgttcgccaccaaggttcgcttccgttgcgtcggcttcgcgaacgccgtggccaagctgctcaatgtgttgatgcctatggtggtgggttggatgcttacctcgcttggtgccacgtccatctttgtggccatcagcgcaattgctattgcatcgatgctgattgtcggcttctttggcgcggagactgcgcagaagtcggttgggtgatcggtttcctcacagtggaataactgctgataatgtccattcggcgtcttgcgtggtgatatgcagggcgccgttttgttgttctagtaattgtcggtaacggttgagaccggtaccggtggataggtccgcactgccatccgcatccgaatccgatgacgtgcgggccgtgtcgatgcaggcgatgcggacggtgtccagtccgatgccaatcgtcattacatagcccgcttccgggtcggcatgtttggcgatgttgccgtacagttcctccagcagcccggcgatcaggccactccgaccggctgcgccatgagcaccggaaataatcgtctgaccttcaaagccaagctctgataatcggcggtcaccattgctcgcaacatcacgaatttgctcggctagcgggcaatcagcgtctgtgatgccacatgcaatgccagaagcggcatcaacggtcgaatcatgcggagtcactgcactgtgcgccgcttctcccctgccttcaataacatcaatgacctgatgcgtgcgatccaatgcgcccatagccacgctacgcagttcgcgtaattcttcttcagaaggggtcttgccatcggcaatatccttgtcgaatcgcaaaatcaggtatgccaaatcattggatacgtaatcgtgaatgtcctgagctgtgcgttcctgctgacggcggtgagccaactccgctcgagccaagctgcgttcgtgattccatcgcgccgccatgccaccaagcatgaagccaataaacaacacggccactggcatcacaccatagagggcaatcgcaccaagaatcacttgcccagtgcgatgctcggcagaagaaccgctcgattcataggcgcttccggtgaagtcgcttcccgactgccctgcgctgtcagacccactggatgaagagccaccatcagcagcgccaccatcagcaacactaccgtttagggcactactactcgccgcgccatccgcagaaccgctcatcgtgtctgagccgccatcaagccaaggaatggccacgccaccacgcgacaacatccacaccacaacggcaatgccggcaaccgccagcgccaatcgcttatcggcgtatccggcaatacccaccgccaataacacggcgagcattgcacccgacggcatccagatcggactcatgcacaacactatccaagccaccgctaccgccacgcatccggtgaccggacgaaacgccatccaccccacaatggcaacgaatatgaactccgcaaggcagtccgccgccgagacactgtcagcagccaagcccgccatggtttccatcgtgcatatcaaggcaacaaccagtatggcaatcaacagccatgcattgcgaacaccgctatccagctcggccaatcggtgtcgtaacgctttcatagcagttcctttcctaccatccatgccgttgcacataccgcccatgccaactcttaaatctcatgccgtttcacgcagattgatatggcatgagcgcgactgcgagcgccgagtttggcgagtgcgcggcgttcaaaagtcgccacagtggccacgctgatgcccaatcgctcggcgatttccttggtggtcgacccatccgcatacatacgcagggtgtcgcgttctttgccggaaagcgcgccacggtgcgcgtatgacgtatcttcgagcaccgcgtaggcggttgcggcatccatgaaggacagcgaattaccgctcccctcatctcccagtaccagctcattggtcgacaatccttgggctgcattgcgaatagcgagcgcaatgccgttcaaatcggttttaccaaccaaggcctgcgccccgcagcgagccgcctcgtcgtgaaatgacgcgagcgcgtatgaggtgacacccaccagcccaacctcgggtgttttggtacgaatcgcacgacagacttcggtaccgggcacgtcgcccatagacatatccgtaaccagcacgtcaggccgcttggtggggctcaggcatcggctgatggccacggcacccaaatcgcaggtccatatcacggcaaaatcgctggacatgcgctcgattagcgcgccgaacacttccagcgcatacgggtcattgtccacaatgccgatgcgtatgttgcggttgcgcgcttctcccattacattcaccccttcagtgtgcccgacgccgaactgctccgtcctgacatgtcatggtcactatgacaactatcattccacatttcctgcgcgatttacgatggaatcatcatcaatccttgacaaggcggtaaaggaggactgcaatgaaccgtgcacaagcactcagcaagctcaacaggagcgatatgcgcaatgccgccgccgagcgcgggacgcaacgaatattcgcgtggaaccgcgcgcattggattggcatggttgtactgatagcggtgttgttgctgctgcagtggagctcatcaatgtatctcatgcccgacgaggtccttgacagggctgccaaaaacctgttcgtatggttccccggtatggttctgcactggccattggtgttgggaatcaccaacctgatactcggttcgatacgatccggcagtctgtctttcccattggcgagcgcaatcatcggaccgctggcattcggctgtaccaatcttcgcttacggccggggttcccataccgttcctgggctcagtggtggaagctaatgcacgctgaaagcggccatcagctattggttcattcgttgatcggctcggccatgctgttgatctgttatacggccgttgcgttcatctgctatgcaatcggacgctacggtctgcgcgaattgtttgtggatccgaatccgcagacggcgagcggacgactgctcacatggattcgtcaggatgcgattcgcttcggctgctggctggcgacggcaatcatgtacggcttgctattggcgctgaccttacggggcggcatggctgcgatggccgccgcgttgctaatcaattttgtgattccgcccgccttgctggtcatcaacggcatctacgcgctacgcccggcctcactgacgtatccgtggaaaagcctgctgttcccgttggcgtgcacactggtacctgcgccgatgctcatggcgctcatcacggtgtatgaagacacgtgcccgataggaagtacctgcacgctgatcggcgaccgatacctctcctggggctcgatggatcaggtcttgcatttcgtcatcgtgttcgccgtggcgagcttcctcggattcggcgtggtgtgggccgtgcggtggattgtggctcgtcgcacaaaataagagagaccaaaatatactggaatcaggggcttcgtgcaatgatgcacgagccgatccaagcaaaggggctgaccatgagcgagaaactgatggaacagtaccggttgcgcaaacaacgcaaacgccgtaacgcttgtatcgccgccatcgtgacagtagtgcttgtccttgccgtcgccggcggcgtatggtggacggccggcgatggcagcgtactggttcgcaatatgttcaagccgaaggccacgcctgccacgcagccggtagtcgacagcaccgcagccttcgcctaccgcaccgcaccggaattcctggcgatggaaaccggcgaccgagacaccggcaatgtgaactactcccctgcttcgatgtggatggcgttggccatcgccgcgcagggcgccaatggcacgacccgctcgcaactgaatgagctgctgtgctccggttcgctggccgacagcgactaccaatcgctgctgagttcgatcaacgggcaatattcgggggcgaaatccgagatgagcgccgcgaactcgctgtggatcgataacgactactcccttgccagcgattaccaatccaccgtcaagaaaatgttcgaggccgaagtcaccacgctaccgttcgacgatcaggccgccgccaagatgtccgattggattgccaaacatacgaatggttcgctcaagccgaagatcacgctgcgtgaccgtgaagtcctgtccatcatcaacaccgtctatgcggatggccgctggaaggatccgttcgaagagcagtccaccggcgacggcaccttccacggcgaagccggagatgctcaggtgccgatgatgcaccggaccttcagccaaatgacttacagccatgatgagtacaacacttggcagcgggtggagattccattcgacaacagcggcaatctggccatcgtgctgccggccaaagggcatttcgacgagctggccggcaatgccgagaaactcggatgggcgttcggcacgtgttcgtcggcatcccctggcgaggacgcaatgggttgcaccgcggacagtctgcccggatggggcgtctccgtcaactcggccacggtgaacgtctcgctgccacgattcaccgtcgacagcatgttcgactcggaagccaccatcaaggcattcgaaaaactgggggtgaccgatgcgttcagtgcaggcgacgccgacttcaccaagatggtcgacaccgattcgcacggcgagaatctgtatatcggttcgattctgcaaggcacgcgcatcgaggtgaacgaggccggcgccaaggccatgtccttcaccaaagccggcgcagacttcactagcgcgccggtggacaacatcgagttcacggtggatcgcccattcctgtattcgtacgtcaccccggacggcataccattattcatcggtgcggtgcgcaacctcggcggagtcggtggagaacactgatactttcccgacagtccgtcaattagggtgtatcgtttgacgcatggctacgatgaaggaaatcgcgaacaaggcgggggtttccgtctctacggtgtcgctggtgctcaacggacgcgacgaggggcgcgtaaagtccgaaattgcggacaatgtgcgcgccatcgccaccaagctcggctaccggtcgaatccgctggccagttcgctgcgtacaggcaagacgcacatcctcggtttcatcagtgaggaggtggccaccaccccgtacgccggcggtatgattctgggcgcgcagaccgccgcaagccagttcggctatatgctcatcaccgtgagcaccgacggtgagaacagcgagagcgaggaaatcgccgcactcaagcgatacggcaccgacggtttcctgtacgccaagatgtcgaaccgcatcacccatgcgccttcttcgctggccaagacgccactggtgttggtggatgccaccgactcgcttggcaaaatcccgagcgtggaaccggacgagttccaaatcggctacgacgccaccaccagattggttaaggccggatgcgcacgtatcgcctatgtgggttgctcggaaccgatgattgcgcaggatggtcgtttggaaggctatcaggcggcgctcagggacgcctgcctcgactatgacgatcgtctggtcgtcaatgtgctcaataacgggccggcactgaccgcagtcagcgatttgttcgacgccgagcatccggacggattcttctgcttcaacgatgcccgcgcctggtatgtgtacgaatgcgccgcacgccgaggactcacggtcggcaaggacatctccgtgatcggcgtggacaaccatcgcgtgttcgccgaaacgctggaaccgatgctcaccactgtggaactgccgcatttcgagatgggctactgggccgtggccaagctggtgtcaattatcgaaggacgctcgatggacgacgtctcacggccagcgaccaccgctcccctgccgccgatcgacgcgccgattccggcgaagatccactgcacgctgatcgaaaaggcctcggtgaagtaaccgaggcccacacgatttctcaaggcctccgtccagcacggaggcctttttgcatgtcgaacgggtacgacacgccgatgacgtcacgacatccgccggactgatacgatgcccgcatcgtcacagcgacgcacggcgaccgggaggtgcatggtgagaacatacgagaacgcgcaggagctcaaagaggagatcagtgcggcgttccgcaaatacattgcggagttcgacgatattccggaagccctgaaagacaagcgcatcgacgaggtcgagaggaccccggcggaaaacctcgcctatcaggtcggttggaccaccctgctgctgcagtgggaggatcgcgagcggaggggccttccggtgcgaacgccgtcggatgagttcaagtggaaccagctcggaaagctgtaccggtggttcaacgacacctacgcccacctttcgctgcgggagctggagggcatgttgaccgacaacgtcgacgccatatatatgatgatcgatgcgatgagcgaggacgagctgttcaagccgcatatgaggcaatgggccgacgacgccaccaaaacggcggtatgggaagtgtacaggttcattcatgtgaacaccgtcgccccgttcggatcgttcaggacgaagatccgcaagtggaagcggatggccctataggttcggcgcggcccgcaacccctttgtccagttcgtctacgccccgatgatcaacgccggaggcgtcacccgctgggctggtgcactgattggctccatcgtcctgtccgccggcttcatggcagcctgctccctgtccgaggctgtcaccgaacgctactcccgtaagttcaacttcgaatacggccagtcccgcgcctggggctccttcagctacgccatcgtggccctgtgcgccgacttcctgttcaacatcagcccgatgatcaacttctggatcggcaccgcctgcggcgtcggcatgctgctcatctacctgttctgggttccggccgagcagaaggaagagctcaagaaggaagccgatccgaacgccgagaagaccaacccctccttcaaggagatggtcggcgtgctcaagatgccgaccctgtgggtgctcatcgtcttcatgctcctgaccaacaccttctacaccgacaagcagctgcgtcagatggaagctgccaaggcctgaaaggacacaccatgactgacttcactcccgaaacccctgttctcacccccatccgcgaccacgctgctgaactggcaaaagccgaagccggcgtggccgagatggccgccaagcgcaacaaccgctggtacccgaagttccacatcgcatccaacggcggttggatcaacgatccgaacggcctgtgcttctataagggccgctggcacgtgttctaccagctgcacccgtacggcacccagtggggtccgatgcactggggacacgtctcctccaccgacatgctcaactggaagcgtgaaccaatcatgttcgccccgacccttgaagaggagaaggacggcgtattctccggttccgcagtaatcggcgacgatggcaagctcaagttctactacaccggccaccgttgggccaacggccacgacaacaccggcggcgactggcaggtgcagatgctcgcgctgccggacaatgacgagctcacctccgccaccaagcagggcatgatcatcgactgcccgaccgacaaggtcgaccatcactaccgcgacccgaaggtctggaagaccggcgacacctggtacatgaccttcggtgtctcctctgcggacaagcgcggccagatgtggctgttctcctccaaggacatggtccgctgggaatacgagcgcgtgctcttccagcacccggatccggatgtgttcatgctcgaatgccccgacttcttccccatcaaagacaaggacggcaacgagaagtgggtcattggcttctccgccatggggtccaagcccagcggcttcatgaaccgcaacgtcaacaacgccggctacatgatcggcacgtgggagccgggcggcgaattcaagccggaaaccgagttccgcctgtgggattgcggccacaactactacgccccacagtccttcaacgtggacggccgtcagatcgtctatggctggatgagcccgttcgtgcagccgattcccatggaggatgacggctggtgtggccagctcaccctgccgcgcgagatcacccttgacgatgacggcgacgtggtcaccgcgccggtcgccgaaatggaaggcctgcgcgaggataccctcgaccatggttcgatcacgctcgatatggatggcgagcaggtcatcgccgatgacgccgaggccgtggaaatcgaaatgaccatcgacttggctgcctccactgccgagcgtgcgggcctgaagattcatgccactaaggacggtgcctacacctacgtggcttatgacgaccagatcggccgcgtggtggtggatcgtcaggccatggccaacggcgatcgcggctaccgcgccgccccactgaccgacaccgaactggcctccggcaagctggacctgcgcgtgttcgtggatcgcggctccgtggaggtctacgtcaacggtggccaccaagtgctgagctcctactcctacgcctccgaaggaccgcgtgccatcaagctcgccgccgagtccggtagtctcaaggtggattccctgaagctccaccacatgaagtccatcggactggagtagctctctcacctccctcacagagggaggttttttgtgtgcccctgtcgttcgccttcgcctatactgatggacggcatataacacaatccatcacacgaccggcaggcgcgcaggctcctcaccttactgttccacgccccggccgcaagcgccaccagcaaaccggactggcgcggaaagcaaggtgacatcccatgtccatcgccaagcgcctcaagcgccgcatgcccaccgtcatcgccgtcatcgtattgctggcagtctgggaaacgtgggtggatctaggacatgtctcccccacgatgatctccgcgccaagcgagattttcgccgccaccatcgaaacgtggaacacgctcggcccggccgcggcgatcaccggctatgagggcgtggtcggcttcctgttcgccgtgttcttcggcattatgatcggcattgcactgtactgctcgcacacgttcaacgcggcgttctatccgctgcttgccgccgcacaaaccatgccgctgatttccatcgccccgttgttcctgatttggttcggctttgagatttccggcaaaatcgtaatcgtggcggtattcggcctcttccccatcgccgtgcagaccgtgcgcggactggaagcggtgccccagttctattccgacgtcgcattgacctgcggcgcgaccccggtctggacgctctggcacgtgaagctgcgcgttgccgcacgtcagatctatggcggtatccgcgtatctgccgcatacatcttcgccacggcatccaccgctgaatatcttggcgcgcgcaagggcctcggcatctggctgcaggctgcctacaattcgttccgcacgccgctgatcttctccgccaccatcgtcattatcctgatgacatgcgtactgatgctggcggtgaacgccagcgagcgcatcctgctcggcccggccggcgatgacgaagaccccgacgcggaccagtagttctttttaccgtcaaagacacaagccggcggccagaaccgactgaacggggcggcttctcatgaggtctccagccctgtctctataatggaacagctttaccagcgtgtggcaaaccggctttcttgagctttcatagggaatgtcgggggcgctggtcgaacggaaatcaaggccctccatatcgttttctgccgacttccgttcgaagcaatcccagagaacgatagagagacaacgaattagggaaccatcattatgaagaaaagccttgtatccaaggccgctgccctcgtgggcgcccttgctatgactttcggtttcgccgcatgtggtcagaccaacaccgccgactcctccaactccaacacctccgacctcaagaaggtcactttcatgctttcctgggcgcccgataccaaccacatcggcgtgtacgtggccaagaacaagggctacttcaaggacgccggtcttgacgtggatatcgtggccgtggcccaggccggtgccgaacaggccgtgaacaacggtgtggccgacttcgccctgtccaacttgaccaatgtgggcatctacacgctgaagggcgctcacatcaagcaggtgctgcaggtgcagcagaagccgagcgccatttggtgcgcactggcgtccaacaccgccatcaagtcccctaaggatttggatggcaagaccttcgccaccttcggctccaacgagtccgacgccgtggtgcgccgcatgatccagaccgacggcggcaagggcgagttcgacaaggtgaccgtcggcacctccaccttccagaccatggaatccggcaaggccgatttcggcggcttctacgccacgtgggaaggcgtgcaagccgacatgtacggcccgaagctcaactgcttcaccgagcctgactacggcgtgcccggcaacgccgacgccatcggcatcatcaccaatgacaagaccatcaagaacaatcccgacctggtcaagaagttcactcaggccactcagaagggttacgagtacgcgtacgccaacccggatgacgccgcgcagattctcgtggacgaagcccctgacgccaacctcaagcccgaattcgtcaagaagagcatgcaggttatcgtcgacggccagtactggggcgatccggccaagatcaaggacggctctttcgtgctcggcaccaacgacttcaagggcactcaggaatacttcgacttcctggctgaagaagacgcctacactgacagtcatgacaaggtgattcatgaggccccgcaggccaaggaccttggcaccgacgaattcctcggcaagtaatttccgatattccgagtttgaatctacgcaaaaatgcgtccttcccatgaggaaaggacgcatttttgcgtatcggccgataaggttattcatagcgaatcatgctaacaaggaggcgattccatggcccaacgtcctgaccgcattattgccagcatggataccggtgttgatgatgcgttggcgttggcgtatttgttggggtcggcggatgagtgcgagctgagcggtgtgatcgccagttatggcaatgtggatgcgaacacggcttatgccaatacttgcgcggtgcttgatttgtttggccgggcggatattccggtgtttttgggctccgagcatccttcttgggctgatgcgtttattcccgatgcagggtgtgcccagtttcatgggaaggatggactggggaatacttggctggcaggggccggggctctggctgatggagctggtgtgcctggtgatgatatgtctggggatgacatgtctgaggatgtgcccgatggggttgtttctgttggcgggtatttggtaggggacgctcatgctcatccggcgtcggggtcttgttctcgtgtgggtcgctctcggcctgtggaccgtccccagtcggctacatcgacagctctcgccagctggggcaaaaggaggcgctccgttgatgctgcggatgggattgagtatctgattgagcaggttcgtgagtttggccgagacgttaccgtgctggctaccgggccgttgacggatgtggatgcggctattactcgggcaccggatattgcaccgaaactcaggctggtgatgatgggcggtacgcttacccaacccggcaattgttgggatgcggtggccgagacgaatatcatccaagaccctgaggccgcgaatcgtgtatttcattccggcgcagacatcacaatggtgggacttgatgtgactcaccagtgtttgctaccgcgatcggcggccgaccagtggcgtgcgacggggaccaagcgcgggcggttcttggctgatctcgcggacttttccatcaaggcaaatttggaagccgaccccgcactgttctctggcggcatgccgttgcatgatccgttggcggcggcggttgcacttgattcttcactggtcgattgttttgatcttgcgttgcgcgcggagaccaataccggtgatttcaatggagtacgaggccggaccaccggagacccggttgggctggtgaatcattccatgccgcatgtgcatgtggcacttggtgcggattcgggacgttttttggatgagtttgcagagaggatggctgaggtgtgccggtaactcccctcagtccgctacacggacagctcgaccgcaattacggacaagctgccgctcgcattcttctggctcgactctcgtctcgccttcgcctacaaacagcccatcgggctgtttgttttacggctcagccccctcaattttgaggggcttaacaaggactatttcacacccccagcaatcaaggaccggcttcgccggactcatcattacctggtcatgtcctatcggcctcggccaggcggcgtgaacgaacagtccacagggctgttctttatttcacgccgccaaatcggcgatcgcggtggatgtaatggtcgatggagcgccatagcacgtcacggccgcagtccgggaagagttcgggcacgaagtcgagctcggcgtaggcggcctcccacggcaggaagttggaggtgcgctgttcgccggaagtacggatcaccaagtcgcaatcgggaacgtccggattgtacagatggtcggcaatcatcttttcagtcacacggtcgccggaaatcttgccatcacgcacttcgcgagcgatggcggcgcaggcgtcggcgatttcagcacggccaccatagttgatgcagaacaccacatcgatgaccttgttgttcttggtacgctcctcggcggcctcaagctcgtcgatcaccgacttccacagcttggggcgacggccggaccaacgcacgcgcacaccccactcgtccatctgttccacgcggcggtggatgatttcacgcgagaagcccatgaggaagcgcacttcctggggcgaacgcttccagttttcagtggagaacgtgtacaggctcaaataccgcacaccggcttcgatggcaccggcgatagtgtcgaacaccaccggttcggcggcctgatgaccattggtgcggaccatgccgcgctgcttggcccaacgaccattaccgtccataatcacaccgatatggcggggtaccttgttcttggggaagtcgggaatacgggcaaggtcgctgaacggagctgcgggaatgtccaacgacgtgtaatcaacgttctcaaaagccatactcatgaatctatcaagcgcagcgaacgaatcgggcgttcgaggtaatactccccccaatcttcaaccaactcctgcacaaccctctccacaggcgcggcatcaagcaccgaccaatcgccacgaatcagtgcatcgaactggtttaacacgaacggcgcgatacggcgcgcatcggtagtgtggtcggcttcgcacatcacgccgccggacgcgatggacaggtacgccggctccgccttgccgcataccacgcaagtacccaatcgtggcgtccaaccggccaaggccaaggcgcgcatcacataggagtcgcctatggcttgcggggcgtgggattgtttggcgagcgcgttcaacgcgccgatgagcagccgatattggttcgtcagctgctcgtgttcggtgctggcgagtttatcgatggtctcgacgatgacgttggcggcctcatacgccgcataatccgccgcgatcggagcaccgtaagcggcgaccgcttcagcctgggagaccacgtcaagcgagcggccttcagcgataagcacatcgactcgcatgaacggctcgagcctggcaccaaagcgtgatttggtgcgacgcacgcctttggcgaccgcccgaatcttgccatgcccacgtgtcaggatggtgatgatacgatcggcttcgcccagtttggaggtgcgcaacaccacaccttcgtctcggtacagcgacatctcatctcctttccccgcgacgcccggcagactctactcaatgaagtagtcagtaaataaacaggccccagaaggcgaacaccaacagtatgtacagcatggtgaaggccaccagccagaacaggactcggcccagacgggtggaggcgagtaccgggtcggcaccggtgacgatgtctcgaacggattcacgacgagggggtatctgaatcagtccgcgggcggaagcgacctctatcagatgcataaagacgcgggaccaagcccatagcaccagcacggacaccacttggatgaccggccagctccaatacatgacgcccggcgtctcggtaggagcgctgccccatgcaagtttgaccacacccataatcacctgtccaagtccggcaaagaagatgagcagtgtggcaagagtggtgagggtcaaagtcagcagcgcgttgccgaaaccatgtgcgaaaccgagtatcacaggccgttccggtatcagcatgcccgcacgtttggcctcgcgtttctcgcgccgccatcgggcatccgccgcgattttgcggcccagcgccgccagtgccagcacgatggatgcgagcagcagcagtaccaccgtgacgtgcaggatcacaccatatatggtgccgacgcgtcttgccttcaaagcgcccggcagaccgattgattggtacagattggtgccggccaccttttcgctggtctgcgtgagtccggcggaagtgccgacggcccaatcgatgagatcgtccacataggcgtccgcaaacggggtgcccgcttcggactcatcccccagacgcagcacatggttggcgaccggatagctgcgcacggtcacgttccagttatcggctttgtgggcgttgtagagaatcgcacgcacgccgtcgacctgcgccgtcatcacgtcttttgaaccgtaagccacataggtgggtacggcgtaagcggcgggtttgagcgtggcgaggtcggaattgttcagtccgaacaggccggtgtccgcgctgaacacgcgttggacgatggatcgatagccctcgttcgcgccgacaagagtgaagtcctgggtgacgaaaaatcccagtgattggcgtgggctgaacaccatcgggctcagaagaatctggaaggcgacgtccggatcgtcctcgagcagatatgaggagatccatgtcgattcggaggtggcatagatgccgaccttggcggcgtctacatcgctttgggctcgtaggtattcgatgacctgatcatatgccttggctgaggccggataatcgcggttgatgtcggtggtgctccagacgggtttgtcgagcactgcggtcacaaagccggccgaagccatatcggaggccacatcgccaaaggagttgtcacaggtgccgtatccggcaccgtgcatgaacaccacgccggggcgcttgcctgatgcgttctgaggttcccgaatcaataccttgatggcttggacgccgtccgcattggccttgccccgatcaccaggctccttggtcagattgccgtcgctggtcatgttcagcgtgatgtatcgctcggtgacctcatacgtgcctttcgccggcagcgtttctccggacgggttatcgaaggtgacttcggtatcgtcggtgagcgtggccatcgactggccggtgggttcgatgttccaaggcaccgtggtcaggttggaaatggagaccagcacgccgatcaggataatgaagatgggcaggctgaccatcagccggtgggtgctggtccacggcttggatcgaacagtcaggcgatgctcttcttcttgcgacacgtgcgctattgtaatctgaccgcgatatttacgccgagggcctattcggccgaatcagtgaccgggatgctggattgggaccacgaccgggccggtggaattgacgggcacttggccgtcggcctccatttgggcggcgatatcgttcgctatggtgagcagcgtgtcgacgatctggtcttcgggcacggtcttgatgaccttgcccttgatgaagatctggcccttgccattgccggaggccacgccgaggtcggcttcgcgtgcctcgcccggaccgttgacgatgcagcccatgacggctacacggatcggcgcggtcacgtccttcaggccttcggtgacggcggatgcgagctggatcacatccacttgggcgcggccgcagctcgggcaggagatgatgtcgaacttgcgggggcgcaatcccatgtattccaggagtttgcaccccaccttgacctcttcgaccggcggcgcggaaagggacacgcgaatcgtgtcgccaatgccctcggccaagagcgcaccgaacgccaggcaggatttgatggtgccttgccaggcggggccggcctcggtaacgccgaggtgcaacggccaatcgcccttggatgcgagcagtcggtacgtttcgaccatggtgatgacgtcatggtgtttgacggagatcttgaaatcgtggaagccgacgtcctcgaacatgtgcgcttccttcaaggcggaggccaccagcgcttccggagtcgggccaccgtatttggcgtagagttccttgtccagcgagccggcgttcacgccgatacgcagcgagatgcccgcgtcggtggcggccttgcagatgtccgggccgacttcatcgaacttacggatgttgccggggttcacacgcacggccgcgcagccggcgtcgatggcttggaacacgtatttggactggaagtggatatcggcgatgaccggaatcggcgatttgcggcagatttccggcagtgcgtcggcatcgtcctgactcggcacggccacgcgcacgatgtcgcagccggcagcggtcagttcggcgatctgctgcaacgtggcaggtacgttggccgtgagcgtgttggtcatcgactgcacggagatgggcgctcccccgcccaccggcaccgggcccaccatgatgcggcgggacttgcggcgcgggtgcaagggcgattcgctggtcaggtcgaccggatcaccggttttgcggaacggcttttcgatgggattttccgtattcaaggtattcatcattgcttgtttatcaggttgtcggcgcgtcggcgggcttcaagctcaagctggttcatttcctccacgtccgtgaacagcgggttaccacgaagctcggcgtccatctggtccagcacggctttgaccgtgtccacgatgccgaggtacggcagccgatgatcaagaaacgcatgcacggcctgttcattggctgcattgagcaccgccgtatgcttctcggaggcggccaggcagtggcgggccagttgcacggcggggaacgcctcatcgtccaacggctcaaaggtccaagttgcggcttgcgtccagtcgcacgcggcggccacattggtcatgcggtccggcgcggacaggcccagcgcgataggcagacgcatgtctggcggcgaagcctggcaaatcgtggcgccgtccacaaattcgaccatggaatggacgatggactgcgggtgcacggtcacgtcgatgcgttcaggcgacacattgaacaagcgggacgcctcgatgacttcgaggcccttgttcatcagtgtggaggagttgatggtgacaaccggccccatgttccacgtcggatgatgcagcgcctgctcgggagtgatgttctccatgtcgacacgtttccagccgcggaatgggccgccggaggcggtgaccacaagcttggcgacttcggcgtgggttccggagcgcagggattgccagatggcggaatgctcggaatcgaccgggttgatctggttctcgcgcacttgcgcgctgaacagcagatgaccgcccgcgactacggactccttgttagccaatgccagctgggaaccggccttgagcgccgcgatcgatggttcgaggccgatcgagccggtgatgccgttcaatacgacattcgcaccggagccggccatggcgatgaccgaatccggaccgccggtcacgcggacaccttgtgcgccggcctgtgcgagagccgcttgcagtgctggaaccttggtctcatcaaacaccgcgacttcgggcacatggaactgtgcggcctgttgcgccagcagctcgatatgtgctccgcccgccgccagaccggtgacggtaaatcgttcagggtgacgcgagatgacgtcaagtccttgggtgccgatggatccggtggatccgagaatgatgacggtggagttggaggctatgctcacttttccttcttcgtatcgtcattgttcagtgtggggaacgacaggtcggggatatccgaatcgaagttaccgccaagcgggaacagcagcgggaacgaatcgttggaatcgtgcttatcctgtgacggctgagctgcttccgtgtcgtgggaggcggcaacgtattcagatgattccacagccggacgggagaccgtgctgtctgcaggctgactatcggatacgcgaaccggaatggagttcgtgttacgatccggcttgctggtgggagcaaaggagaccggcatggcagcggacgcagcctcgtcggcagtgctattcacaggttgcgctgccggggcggagggtgccggggatgaaaccgaacccggtacctcattcaatttcagcgcattcggtgtatcaaggctgggcatcttgggagcgaaggacggcgcatccaccaccggaagttcctgagaaaccgcagccatgtgggcgagagcggccagagaggaaccgtcctgcaccatatccacgggctgttccgcgaacaccgacggggtcgatgacggagctgcggattcgtatgacgactgtgccggagcaaacgagggggcgctgccagcggtcacaccggaaaccggtgcggacggggcactggcgggaggctcagccgcaacagctgcggtaggagccacggaaggcgtctcggagacgggcttcgccgcagactcgttggacgtatgcaccgggtatgctgcgggagcaaaggaaaccggctgttccgcattgatgttattggtgcttgtggaagcatcgaacgatgcaggagccggcgcataggcgatcggtgccgccgcggccggcgccgcgggagcaaccggagccggagcagtgaacaagctctgctcggcctgatgcagggcatcgaatgattcgtcatgagcaacggcagacggcgcaaaacgttcgtcagttgccgggcgctgcgttccggaagcgaacaacggtgagacgccgttcgcttgaacggtcacgttcgtggcggtctgggcaggagccgtgggctcgccggacacgaaatcggccacacgtgcataggattccaagcgactcagcaactgcacgcaggcgttcaggaagtaatcgacctgtcgctcgtcatagcctttcttgcccttgcgctgggtgaagatcacattgttgaccgtattcgcattgagatcggccaaagaccgtacatcgtcttcggtcacgccgtcaacgcccaatgcggccgccgccttgtccacaatctggtcgaccagacgatccacctgcttcttatcgtacgaaggctgcttgggcgctccggacttgaagcgttcgcgctcgtcacgctccgcatggttctggacttcgtgatacagcttctcggtcttcgccttccacgtcacacgcccatgctgtgcgatctcccatgtggtctgcttatcgaccacggcacgttccagacgtccaagcgcggcgtcaacctgtgcgatcacatagccgttcttgcgcaaatcaaaggacacgttctgaatgtcatgctgggtgagattcatgccctcgctgtcatacagagcatgggcgcgctccaagaaagcgtccacctgagcggggtcatacccccacttgcgcttgcccgcacgtgcgatgcccgacttgccgtccccttcacgaagttcctgcgccatcggctattcgacctcctgctggatataaacactctgccacaactttacgtgactattgagacgcatctgaccaagaagaccgaaattcacgattttgtagcagtactgccggtttccttctgcgcgcatctcactgagatttcagaaccccttgccgaagactgtcagggaatatcgtcacagcccatgtctgtggaatgaggggattgcacgaagtgatgaaaaatgaaagtgggcaatgagggactcgaacccccgacatccaccgtgtaaaggtggcgctctaaccaactgagctaattgcccgcaaatgacaacaatagcgtatggccggcactgcgcgacacgtggtgtcgcatacgcgtgccgtagcgctcaatcgcgatgacattcagtcacgcccagcagcactacgcagcacgcgacgccagtcaacacgcttaaagtcaagcgtattgattgaggcttatcagcggcccctgccgaatgcgcgcagacgaatgccgttccagtccgagctgacggtcagcggggtggcggcgttcataccggcggtctgtgcggcggactgcacggtggaggagctggcggcacccgggcggccgggcttgggagtcagtatccacagcgggccgtcattgcccagtaccgcgtaggcgtcaacgatcgtatcggacaattcgtcctcatcatcgccgtcgcgccaccatacgatgacgccgtccacagcggagtcgtagtcctcgtccacgagatcctcgcccgtgagctcttcaatctgggcacgaatggaatcgtccacatcgtcgtcccagagccactcctgaacgatatcgccgggctcgaaaccaaattcttcagcgttctgtgatgccgtttgattcacaggggacacattagcaagtcttcgcgaacaaatgcgttaacgcggccgaaaatcgccgcattgtgggcagacccatgcgagtcgtctcaccagaaacaacgactggccgcgcgtgtcatgcctcgcaatgaggcaaatcgtcggcctgccccttgccaatggccaccaacgcctgatacgcctcgtccagcgtggcgaccttgacgtcgcgcagaccatccggcacgcggccggccacatccgaacaattcgatgcgggagccaggaaccatgtggcgccatcgcgcttggcgccaagcatcttcagctctatgccgccgattctgccgactttgccgtccttgtctatggtgccggtgccggcgatggtcttgccgccgctctcgttggcgggggtgagtttgtcgatgagaccgagcgtgtacatcatgcctgcggacggtccgccgatgctgtccacgtgcatcgtcaccttggcgtgttgcaatgtactggcgtcaatgcccagttcgtccgcatgggctttggcatgcgccagaccgacggcactggccgaatcctgggaaccggccatgtcctgttcgactttcttctgatactggtccgcactctggcccaccggtaccgtggcctcacgcggcatgacctccacctgcggattggcccaaccccagacggcctgcgcgttgatgatcgggtacccgggcacgccggacgcgttcaccgtggtcagcagcagcttgccggaatccttatacgtcgtcacgccggtaccggtgatgtcgataaccgcaccatcctcgaccttgcccagcacgtcttgggtgggtccgggcatctcgatgacgtacgggctgggcagcagcagaatcaccacaccaagcaacacggcgaatgcaccgacgaaatggcgtttcggacgagcggccgcataggcccgagcacggctgattccacgagataggcgcgaatcatgcttcacttcgaacgatggcatgcgcccatcccccgcttccgaatccgcagtcgggctcttctgctcctggacgaagtctggttcctgattcctgtggcgtgcaaacataccctacagtgtaagcggagggccgaaatcagccgaaaacgaacataaaccgaaaatattgctcggccacgagcgaacaggcccgggcagaccctacacttggggtaacacaccgcggcaaagaaggatacgcatggacgacaacgcgattcacgagtggctgatcaaatgcttcggccccattcagggcgagatggcctggcagcagatcagccagttgcctgaggagatccgtgaacagctgatgagtcaggaccccagccgactgcccaatccatccgaagtccagcagatgatggccgcgttcagcgccggcggactcaacacgatgggcgatatgcagcgcactgtcgaggaagggccgatcaacgtcaagctcgccaagtcgattgccttgcagcaggccaacgcctccggttccgcgtccagcgtgtccgccgtggatggcgaggcggctcgccgcgcgatgagtgaggcgaacctgtggctggataccgcctgcgagttcaatcccgcgcccggcgatccggatgtgctgacccgcgccggctgggtggaaggcaccatcgaccagtgggcgaagttcgcagctcctgtggccgagtcgatgaacgacgctttggcttcggtgatttcggagcgtcttggcggcgcgttcggcgatggcgagattgccggcatgttcgccggaccggtgccgattccgattcccgacggcatgaaagatccagcccagctgatgaagctgctgggcaacacgtcctttgccatgcagttggggcatgcggccggcaatctgagccatgaagtgcatggcagtttcgatcagggcatcgcattgctgaagaatccggctggtggactgattgcccagaacgccaccgaatacgcgaagatgctgaacggtgagactcctgcgcccgaggccgatacggccggcacttcaaccgactcggtcaatccgttctccacatccaccgacgcttccgccaatcccattggcttcacttcggccggcaacagcgatactccggcaactgacggtaccgcccaagtctccggctccgatgcctccgccgacgccgccgcgttcgaggctgcgctctccggattcgagaccaccgagaaaattcccgaatccgaagtgctttccttcctggccctgcaggaaatggctcacgcccgcctgtatgcctcggtaccgtggctgatgccgcgtttcgaggcgctcatcggcaagtacgcacgcggcatctccatcgatctggatgcgatggaggaacagctgcgtgacgccacgtcgatggatccggagtcgatttccggcgcggtgaatctcaccaaggtcggcatccccgacactcccgaacagcgcgaggcgctggcttcgctggaatcgctgctggcgatggtcgagggctgggtggattgcgtggtgtggcgcgccggtatggcccatctgcctcatatcgaacagttgcgtgagatgatgcgccgcgagcgcgcgatgggtggccccgccgagcgtacgttcgaaagtctgctcggtttgcagctgcgccccaagcgcatgcgcgaggccgccggattgtgggagatgatcaccgccgccgaaggccctgaaggccgtgacgccaagtggtcgcatcccgatctgctgccttcgctgcctagcgacaagcccgcagatggcgcgtctccgtcatccgacgccccttcaggctcctcttccgatgccaacggttccgcctcccaccctgccgcagatggcaagaccggcgatatcgattgggatgccgaactgtccaagcttctcggcgaagacggagaagatggcggcaacggcaactcggaggatacgcaggcatagtcaaccgtccttcagccaattcccgttcctgaatgttcaggaacattcacattcattaccgacgcccgtcacaaaaatcgtgatgggcgtctgtgttgcgctccataaccatccttggtccgcgcatacgacaaatgcagcgaatcctcagctcgggtgatgcccacatacataagccggcgttcctcttccagcgcatcccccgtttccggcgaaccgtacggcaagagtccttccgaacagccgatcagaaacacgtgcttgaattccagacccttggatgcgtggatcgtggaaatcgtaacgccgggatcgtcgtttgcggcaagtccggtggcgtccaaacccatcgcctccaatagcgcacgtttggacgcggcatcgtcggcgagcgcggatgattgccatcccgaatccttacggacgcggtatttcagtcttgcagcgcgcaaagcggcaccgaataccggctgttgggcgttgatgcgggtgaggatcgcgcaatcggacggcttggccccgttggcaaccaaccgggctatgcgtgccgccacgccctgtgcctcttccatatcgctctcataagcggttcgggtaacgcgcggaccggattcacgggcggaaaccagtttcaggtaatcctcacggttcggcgcggccgcaagcacccggttggcgagattcacgacttccggcgtcgaacgatagtcggtgttgagattgacatcggcggcgagcggcccgaattcatcggcgaaacgcagcagatcccagctggaagcaccggcaaacgagtagatggtctgggccggatcgcccacgacgcatacgttgcggttcatcgcgctcttgccgtcaggtcctcccccgcccagccacagggtcagcagcctgtgttgcaggggcgagacgtcctgatactcgtcgacggtgagccagccgatggtggaacgaatttgggcggcggcttcgggaaaatcatccatgatatggcatacgagcagcagaatatcgtcaaaatcgatttcgccacgcgaggtcttttcctgctcgtaggcgctgtagacgtcggcgaaccgagcggtgtcgagtccggcgggcggttgccgatgggcgatggcacaggtccgtgcataatcttccaccgccaccaacgagattttggcccaattgatttcggcgagcacatcgcgaacggtcagcggatcggcatcggtacgtgcggtggcgcggatgatcgcgcgggagacgacgtcacgctgatcttcgatcacatgcgggaatggagcctcgcatatgtctgaccagacgctgttgagctgatgcaatgccgctgagtggaaggtcgcggccgtgactccggcagttcccgcacccgaaccggaacgtccggcaccttcccctacgccgagctggcccaaccgtgcgcgcatttccgccgccgcttttaccgaaaaggtgacggcaagcacccgctccggcttccatgccccggtggcgcaggcataggcgatccgccgcgtgaccgtgcgtgttttaccggcacctgcgccggcgatgatgcgcaccggcccttgcaacgtagtcgcggcggtacgctgccgctcatcgagcccctcaagaatcccctgcgcctgttccatgcgtccattgtggcacgattcgcgctcacggcacgactcacgcctatggctgaatcgggctcacgacaaaacatcgccagaatcatgcgttttgcgtgtcattctgcggtgcgaatcgccacggatgtattagtgtggaagggtgatgaaacgtagcgattatatgttggcggcactcgcctcagccgtcctgccgaatctgggggtggccggcgtacgcgagaacgtgcaggccagcgcaaccgacgaggccaaaggcatcgatcagaccgtgatccaagatgcctcgggcaagttgtacgacgtatacgccactgacagcaaggaagggcgtacacgtctgatccgccgtgtgaaagcggcgcagacactggcagccgcgcgcgagcttggtggcctcggcttcgatatggaccgtgtggtcgcattcgtcccgggagacgtttcccaacccggccagacggccaccgcacaggccgtggggcagcaggcccaggcggagtccacaccgctgaccccgcgcaagcccggtcccacaggcgagacgaccgtgatgatcgccgtccaccgtgatggtcaggcgcggcctctcgacctgttgacattggatgactgcgcggccgtcggcacctccatcggagccattcatcgtctgccttcaacttttctggccaatgccaaatatccggtagtcaccaccggtcagattcgttcgcagctgaccgcctggattcgccgcttacgctccgccggccatgttccccaagaaatcaccgacagctgggcgcgcatcatggacaccgagggattgtggtcgttctccacctgcacggttcacggcggattctccgacggcgacttcctgttctccggttccaccatcaccacggtgaccaactggcaggatatgcaggtcaacgatccggcacgagaccttgcctggattttcggcaagctcgacgaatcccatcgcaacgccgtgctttccgcatacggccgcatgatgggctctcgacttgacgatctcatcatgctcagggccaacctgtggctgcagatggaacaggtgggcgaattcattcaggcgttgaaccgtgcggacaacaatcgcatcatgcagttcaaggcacaggtcgaacgactcgcacaccagttgggcgtgatcaagcacactccggcaccggccccagccgcaggggcggccgccgccgcgtcgacggagcccggttccccctccacaatcaccgtcggcacattgttgcaggacgaccgtcatcaggcacccgccacgcaggtacccgcacaaccgcagcagtccgacaccggtaccgcggcggccgaggtctcggacgacacgcccgatccagatcgcaccggttccgctgacatcgtggccgctggcgacgtggatcttaccccggaagtcgaacccgatgctgaccggaccgccaatcacccgcaagcgagtgtctccggcaccgcaaccggtacgggatcgaccaaaccgcagccctcacatggcgcttcccattcttcggtgacgatcacgctgaaggagctcctcagtatgaacgggcatagcggcacgacgtcaaccgacgcttcccctgcatctcaatccgccgccccgaccgacgatgcggtgaatgacgatactccggacagtttcgttcagcacggagcctcgagtgcccaaaccacggtgattccgctgttggagcgggaagaacgcgctctgcgcgatgcccgtgccgggttggacgggtatgacagcgagggcaatccgctggccgaatcatccacatcatccaaataatgtcgtgtgcggtgttccgcgccacgccgagcgcgtaacaccgcacatgacgacgcagacacgcggcacaatagagtacagaacctcggccggtgacggccacttaccatgatgttcgtcacaaagacggcagaacaaggagccttatatggatatcgaactgggcattcagaacgtggcacgaccggtgaacttcagcaccgacgaatcagccgataatgtgagccaggccatcgcgcaggccgtggccgacaacgcgacgatcgatatgaccgatgacaagggccgtcgcatcatcgtgcccgccaaggcactcggttacgcgatcatcggctccgaaaccaagcacgccgtcgggttcggcacgctgtgaccgtgaatcgcgcataagcggccttgggcatcatctcaaggccgctttgtattgccgcgaatcaccgatataacgggagcacgccgcgatgaacgatctcttcgacagtggcctcgtcggtgaggttctcccccagtttgttcggtttgcctttgccatgccagtcagatccgccggtgaccagtagctggtgccggcggcagatggtgagcagccgttctcgttgctccggtgaattgcc

SEQ ID NO: 270 - DNA, 20315 bp, Unknown
  R101_18m  MAG No. k141_63443
atccgcgagaatctgggaaacggccagcgggtggatgatgtacggctcaccagacttgcgccgttgcgtgcaatgctggatgacggcgcgccggtacgcgcggtcgaggatggacaaatcctcaccgggatgatgggacttgcataccttcttgattggatccagcggattgagcggatcggcactgatctcacaacccaacttacgggcggcgtactgctcgccatcaatctctgccatgccagtcacctccctcgtcatgaagttcattgtagccgcgaaccggagccttgtgcatgcacctgttcgccatcattggttccgcaaccgtcgttgccgtcatcaccttggtcattcaaccggcccaatccggtcaggacgccactcccgtcgaaccgaacccacgttcggcgcgatcggatccgggcagggtttcggccgggatgaaccgggcctcaacataccgctgaatcaccaattgagcgatgcgatcgcccggatggaagacggcggtgcgttccggatcgaggttgatcagcggcaccttgatttcgccacggtagccggcatcaacggtgccaggcgcgttaagcacggtgacgccctgcttggcggccagcccggaacgcggatgcaccaacgccacgtagcccgcaggtagggcgatggccacgccggtgggcaccagtacccgttcaaaaggcttcagcgtcacatcgacggtggtgatgaggtcggcaccggcatcgcccgcgtgggcatagtgcagctgggccggatgttcggggtcgaggctcttgaccaggacctcggtggattcgggctcgttgtaggtctcgtcgaacgccatcaggcggcgcactcctcacacaccggctggccatcctcgtccgtgtaggcgagctggctgcgatgcttgaccaggaagcactgcgagcagatgaactcgtcaccctgcatggggatgacggtcaccgaggaatcctcgttgctcaaatcggcgcccggcagttcgtagtcttcggcgatggcgttctcatcgtcgtcgatgtcgctcgaggcgttctgcgaggacttccccagcgcctgcagcgattcctcgtcctcatccttattgcggggggaatcataatcctgagccatcatggtcctttcgtcgtctttggttcgtaagtcgatatatatagcacggtcagcgccgtactcgcccataggatacacgatttgaaatactcgtaaagttcgacacgtggggcatacttaaaagaagtaatgtctttgcgacggaaagtggtgcgaatatgccagatgatcggcttgaaaaagcccgtttcgtacgcgtgagcaagacgggggacctcgtattctccattggcggcagggaaatggccgtgagcgtggacgacacgctcgaacgggcgattcttgaggccaagcaggtcagaagcgagacgcgacaggccccccagccgcatcagcagtccactttgccgatttcccagatacagtcgctgattcgcgccggcgccgatccggcccgtgtcgcggagaaatatcatctgagcgaaacgctggtacgtcgtttctccatggccgtggagaccgagaaacagtacgccatcgaacagttccttgccgtggcggcacccaaagacagcagggtgcgcaccatcagcgaactggtggaacgcacgctggcctctgctggaatcggcatggaatcagtgacctggaaatccacccggcgcggacttgagccttggcgcatcgtggcgatattcacttccgcgggccgtgagatccatgccgaatggacgtggaatatgcacgacaattccgtgatgagcctgaacaatgccgctcgaaaactgctcggcgaacagaatccggaatcagccacggattccaaactcaagccgacgattcctgaactgcccggcgactccgtacgttccgcgcgtatcgagcgcgccgtgtctgcttgggcggcgcctacgccttcgattccggccgcacggcctgccgcgatccggccctccgtcacttccacaggttccatgcccccggtggacctatccacgtccatctcaccggccacgaaccaggctcatgacgctacggcccccagcccggtctcttcgcagaccgccggacctgtttcgtcatctgccgcaggattgcagcaatcgcctgccacggcaccagagcagggttctgacaatatttcggacgagaccgtacggcgtggccccaatgcacagctggtagccaccgagcaggagcgggcggccgaatccgccgccaccaaacacgaggcaccagccaaaccggccaagcgtaaatcaggacgttcggccgtaccaagctgggacgagattctgttcggagactgaatttccgaatcaggccatatcgatcaggcagggaatatccatttccaatgccgtttgggagccatgcacgctcggcaggtgggtggctttgtctccttgcgtacgcgaatcgacgagggtcacggctcccgctgcctgcacgaccacatcgccgagcatcggccggactcgctcgcagaccggtccaaacaatccgtccgcgatggcctcatccctggtccgcaccaaggctcggtcttgcaggtaatcgcgccaccggcaagctatatcctcaggtcgttcatccggctcggcatacagcatcagcgagcgaggctctcccccgaccagtgacacgcctcgggtgagctgcggttcaacggcgatgtcaatccgctggtccacgtcggtttgcaccatgccgtggtcggccacgatgacgatcagcgtgcctttgggtgcgctgcgtttcaggagcgcgagctgggcgtcgatatgttcgaatgcggccacccagtgttcggaatcccacccgtaattgtggccgactttgtcggcgtcacggatgtacaggtaggtcaggccgggggtacgggaggcgcgtgaggcggccagcacacgatcgcgtggggtgacgttgccttgatagtcggtgcctcgcaatgcggcttcggtcaatggcgatttggagaacttgggcaaccccgagcttgtgacgcgcacctcttgagccgcaagtttctcgaacaccgtctcctcgcgctgctggtcgagcggatcgaccatgggtggcacaggaatgtgcggattggctggtttgggtgccagcgcatctttgaactggatgagttggatgagcttatggctggcgggttcgagctgcgtatagcccgccattgcggtcagtcccgggcaggttccggtaccgaatgcggccatggccgccacagtggtgcttggagcgcaggtggcgatgggacgctgattggcgcgttcgttcatcagcgaacgcagatagggcgcgtggccgaggcgcatggcgaggttccagaagcccaggccgtccacgagcaccacgatggccgattcggcgtcgggcagtcccaacgcgcgctggcaggccttgggatcggcgtggaccttggtgggagtcggatgcccaatcgcggcggacaaggcgggcagcacggcggacaggtgcagtgctcccccacgccgatcggccggggcgtcatccccatagcccacagtgggcaccagccgcagcaactcgtccatatccggcgtctcaacactcatagttgcccattcaagtagcacccctccccttggctcagtgcgcagagaacggttctcaataacaactgtgcgctccaacgcacataatcaaacaaacgcacatcgactgaaacactggaatcacgccgttttatcggcaaacatgtgcgattggcgcatcgaaaccagcgcacagttgttatcgagaaccgttctctgcgcactgtttcgcgccctcccgctaatatgggggcgttcgaaagggagtttcatggcatcacaccgcaaaccgtccgcgcaaacctacgatccgcgcacggtcaaggagcatatcgtcgagacgccgctgaacgaggagatgagcaaatccttcctcgagtatgcgtattcggtgatttacgcacgcgcactgcccgatgcgcgcgatggcttgaagccggtgcagcgccgtatcgtctaccagatgggcgagatgaacctgactcccgaccgcccgtatatgaagtccgcccgcgtggtgggcgaggtgatgggcaagctccatccgcacggcgattccgcgatctacgaggccatggtgcgtttggcacagccgttcgcgatgcgtctgccgctggtagatggccacggcaacttcggctcgctggatgacggccctgcggcctcccgttacaccgaggccaggcttggcccggcggccctcggcatgaacgcggatatcgacgaggacaccgtcgacttcacgccgaactatgacaacaagctcaaggaaccgaccgtgctgccggccgccatcccgaatctgctggtcaacggcggctcgggcatcgccgtgggcatggccacgaacctggccacccacaatctgggcgaggtggtgaacgccgccaagttcctcatggcgcattcggacgccaccctggaacaactgatgcgttacgtgcccggccccgactggcccaccggcggcactatcatcggccgcgatggcatccgtgaggcctatgccaacggccgtggcacgctcaccacgcgcgccgccacgcatgtcgaacatgtcacggcccgcaagcaggccatcgtgatcaccgagctgccgtacatggtgggcccggagaaggtgatcgagcgtatttccgacggcgtgaagaaccgcaagctggaggggatttccggcgcgttcgatctgaccgatcgtcataacggcacgcgtatcgtcatcgagatcaagaccggtttcgacccgcatgcggtgctggtgcagctgttcaagcacacgccgttgcaggacaattttgccatgaacaacgtggcgctggtggagggccgcccgcacacgatgggcctgaaggagatgcttcaggtgtgggttgaccaccgccgtgtggtgattcgccgccgcagtgaatatcgcaagaagaaggcgttggagcgcctgcacctggtcgagggcctgctgctggccatgctggacatcgacgaggtgatccaggtaatccgcacctcagatgatgcggatgctgcgaaaagccgtttgatggttgtgttcgacctggacgaggtccaggcccagtacatcctcgacctgcgtctgcgccgtctgaccaagatgaaccgcatcgaacttgaggccgaacgcgatgacctgaagaagcgcatcgaggagctgacccgcattctggcctccgccgaagcgctcgaccaggtggtcaccgacgagatggacgaggcggtcgccaagtggggctcgccgcgtcgcaccgtgctgctggacgccgacccggatggcacgctgacgccggtcgtggcgcagggcgccggggcttcgggtgtgtccaagtccgcactcgaagcagtgaaggccgccaccacgatttcctccgccgaagccgatgtggccgcagccgcagccgccgccaagaagaccggcgagcggtccgcgctgaccggagccttgaagatcgaagacgagccgtgcgtggtgatgatgagcgccaccggtttgattgcccgtaccacgccaagcgcgatggacgtgttcaatgtacggtccgcatccgatgaacgtctgcgagacgatcaaatcaccacaatcttcgagacctccacgcgcgccacgtacgggctggtcacgtcggccggccgcctggtgctcgcgcatgtggttgatttgcctgccttgcccgctgccgccacattgtcgctgaagggaggagttcaggccgacgaactgatcggcatgaccgaatccaccgatccgattcgtggcgagcgcgtgattacggcgatcgccatggagcagccgacatccggcaaggccagtgccaaggatgagagcgaggatggcggggccgccgaggccaagccgttgccgtcgctggctatcggtacccgtaacggtgtcatcaagcgttggaaccgtgaggcacccaccaccatggattcctggcccgtcattgatctgaaagatggcgacgaagtggtattcgccgccgtggccgaggatgacgaccgtctggtgttcatctcctccgattcctcgctactgacctttgaggcgaagaacgtgcgcccgcagggtcgcaccgcgggcggtatggccggcatcaagctggccgagggcgcccgtgtggcggcattcaacgtggttcccgccggcaaggtggcatggacctatgaggagggcgagaacggtttgacttccggctccggcgcggtggtgctcaccgtggccggcgactccgatgcactacccggcaccgaaaacggcgctgccaaggtcaccccgctggaaatgtaccccaccaagggccgcgctaccggtggcgtacgctcccagcgcttcctcaagggccagaacacgctgattcttgcctgggttggtctctacccgttgcatgcctccacatccgcaggctccccggtcgagcttcccaagcccgatatgcgccgagacggctccggagtggacctcgcctcccccatcgccttcattgcgtaacctcaattaagctccctctgatgggccgagccgtaaagcaaacacccccagtggggtgtttgtaggcgaggagcgaacgatagtgagccaaacacatagagaagagaccctaaacccgacctacactaagcatcaaggaggtggcgatgagactactggttgccgtatccaatgaaccgttggcccgcgccattcgtggtgcgctgcttgcctgtcgtcatgaggtgtccttggcaagcaccggcagtatcgcgctcgccgcggtcaccaaggagctatttgacgcagtgattctcgatgaatccctgctcggcatctccaccgagcaactcatcgaatcccttcacaatgcccgtgcctccgtcaagattctgctgctgacttcgacgccactcagcaaaaccatcggcgaaggcagccgctggcgagcgctgcctgacgagtacgccccgatcgaagagacgccctacagctccttcagcgcggatttacacgcaaacaactcagatgccgaagccgaacagtgcacggacaatgctgccgctagcgcacgagctaatgtacgacacccggatgccgtactgagcaaaccattctccgatggcgaactgctctcatacgtcggctcgcttgccaccgactcccccaccatgatcattcgtggcaatctcacgttggataccacgaatcgcaaagcctactacgcatccacacacaccgcaatttcactgtcccgtctggaatacagtttgcttgaagcactggtcaaggctgatggccagtttgtcaacaccagcgaattggtcaagctcgtcggtggcccattcttcgagcaacaagggctcctcaggaacgccctctacacactggataagaagctcacccacgccggcctcatcatgacccaacgcggctccaactaccgcattcgatagctgggctcaatcagtacagccgcatgcctcggggaacgggggtgaagccggactggtggaggatgcgggcgaaggggtgacgcgcgttgaggggttcgccattgatgtcgctgaacgtcacggaaccggtgccattgcgtttgagagcgtaggccagttctgtggcggccttgcgcatttgttcgtcggaatcattggcggcgggttcatggccgaccgattgatcgaacgccgtcaagtgcttggctttggcagccgcgtatagtagcgcaccttgcgcattgagcacgaccgtggctccgatacggcgtgccggtttacccgcaccggcaggcgcgtccggccacgcgatggcggagccactgagatttgcggggtcgagcacactcaatgccaccacggactggccgcgatgctctgacggatgacgcaacgcatccacggtgtcgcgctcggcaaattgggccgcgccgaaaccacggacgaacatgcctcgtaccagtcgaccatgctcctccatgcgctgcaatatcggatacaacgctgagtagccacccgggatattttccttgtcgatcaccggctgcgcgatgacgccatacctgtccagcaacgtctcgaccagtgcgagcgcctgctcggtctgatcagtgtcttcggcttcagcttgcccgattacggcagaccacaaacctcctaacgtcatatccgtagtggctcggtgaatcggagcgacacgcccacgacgacgtgatgtagtggatttacgcaggcttgctgcgcctgcggttaatgcacgtaccggcgcgaagctggaattggtgaccttaccttgccagaccaagctccacaaggcatccttgaactgctgttcgctccactcttgcggaatgatttcaccggtgtttggattgatgtccggctccgcggcctcattccacacacgtttggcggcatccaccagttgacgggcatggaacgctccccctgagtccagtgcggtcagaatcgcttccggcatggtggcgtctgaagcgttcgatgtcgtaccatgttccacaccgctgagcaatattgaatccgccggatagaaagcaacctcaccggggtccatcgcactggttcccccggtttttgagccgacccagaccacatcgccgctggtcagcaactcatccagcaatgcaggttggtagtctcgtactcgtgcggggaataccgccgactcccagagtgcagtgggtagtgctatgccctccagctgctcgataacgcgcatgagcccgtcggcaccttcatatcgttcgccgccgaccggcccgataccttgtcggtcgataagaaacatctggaacgcctctggttctactggcttgactgctttacgcgccttggccaatgagcgagaccgaatgcggcggaatacgtccttatggagccactgttggccttgcttgtcatcatctacaaaatggccttgcagcaactcgcctttggcagccagtacatccaaagtatgcacggcatccgtagcatcgaggtgcagatcggccatgagctgatcggcggtgaaaggaccatgggttttggcgtaacgggtcacgcgaccagtcacatcatcgtcggcaagttcattccagaaagtgcgctcccccagttcctgttcgacttcgcgaatcacgtccgggttgagcacttgtgccatgtcggtggtgccgagcaagcgttcgagcacgtgcggatcgagagacaacagttgcgcgctgcgctcggcctgaggttggtcatactggtacatcaccacgccgacgaagccaaagagaatgttctcggcaaaaggcgatggcggctcggtctccacgtccttcacggtaatggtgccggcttgcaatccggtcatcacctcgttcagggcgggcatgtcgtatacgtcttgcaaacattcgcgcgcggtttccagcagcagcgggaagttcttgaccatacgtgcggcttgcaggagctgtgcggcgcgcagtcgctgctgccataggggcacgcgacggcccgggtcggatcgcggcatgaacagtgatcgggcggcgcattcgcggaatcgtgcggcaaatagcacggactcgcccacttgacgctctacatctgctttgaggtcttctgggtcgaaaaggaacaggtcttgagcaggaatatgtccgtcaccgtccggtagctgaatgacgataccgtcatcggcggcatatacctgcccatcgaaaccgtagcgttggcgcagtctgcggctgatggccatggaccacggttcgtgaacgcggcggccgaaggggcttaacagtacgatgcgccagccgccgtcttcatcgcgggtccgttccacgatgagggtttggtcgctgggaactgtgccggtgatggcttgttgctcggagagtaggcgggccaggttggtgatagcgttggggtctaggccgtctcggtggagacgggtgaggattgttgggatgaaggttgggacagctggaccttctgcggcagaactccccccagtccgcttcacgtctaatccggcggcgatttctcgggtgaagcgggctatggtacggctgaaaccgtagtcacggccagcgccttcaccgtgccagaacggcagacgggcggtgcggcccggagccggagtcacgaccacacgatcacgggtgatttcctgaatctgccatgtggaagtgccgagcgtaatgacatcgcccacgcgcgattcgtagaccatctcctcatccaactcgccgacgcgacgctggcctttgccggcgtccgcctcaggcaggaccacggtgtacagccctcgatcgggaatcgtaccgccagaggtaacggccactttctgcgaaccgggacgggcggaaatcaggccattatcccgattccataccagtcgcggccggaaggccgagaattcctctctgttgtattcgccggacatcatgccgattacggcatcgaacatgtcacgtggcagttcggcaaacggcgcagcacggagcaccgtggcataccagtcatcagcgttcaaatcgtgcatcgaggcagcggccacggtctgctgggcgagaatatcgagcggattgcgcggcacggccaatggttctatatcgccggcaatcatggcttccagacttgcggccccagtgacgatttgctgacgggtgagcgggtagaacaatgcgtgagagacgccaccgacctgatgatcggcacgacctacacgctgcaatccggaggagaccgacaacggtgtatcgacttgaatcatcaagtcgaccgagcccatatcaatgcctagctccaaactggaggtggccaccacgcagcgcaattcaccacgcttgagccgttcctcaatcattttgcgacggtctttggagaccgacccatgatgagccatggcgatgacatcatcgccctcatgcgagccgacaagcatggtggtggaaccgaccacagcatcgtaatgtgtggagaacccttcgcggccttccggagagcccggatcccgaacagtgtcgggattggtgccatgccgggtctgcgcatagagatcattgaggcgcgcggtgagcttttcggccacaccacgcgaattgacgaacaccaatgtggtgcggtgcgcgagaatctcatccaaaatactgcgttccaccacgggccagatggaaccggaggcacggtcgcccgccgctccaaccaacgcggaggaatcgaacgcatcactcgcatcagaatcgtccccagaagtggaagaaacatctctatcatccaccggcacaatgcccctgcgttcggcaagtcgctgcatggccggcgtgacaccgctgatatgcggagcggaccgttcggcctccacgccaccgacacgctgcttggcattcacggactgcaaatcacgcatgttttccaacggctcaatcatgcgcagatccattgcaggctgcccaccaggattcacgatggtaaccggttgtccgccgcccaggaatcgcgccgcctcttcaggcggattcaccgtagcggatagaccaatgcgctgcatatgaaggtcactgaggccagcatcgatggcggtatcactgccctcatcagcatccgcatcgattgcatctcgcttgcgcgattccgcgacaaggttctccagccgttccagacttaccgccagatgtgcgccgcgcttggtgcccgccactgcatgaatctcatcgacgatcaccgtatcgacagtgccgagaatccgccctgccttcgaagtgagcaacagatacaacgattctggcgtggtaacgaggatatccggtggatgggaggctatgcgccgccgctcctgtgcggtggtgtcgcctgaacgagtggcgaccgcgatcttcggcacgggcagcccttgcgcctcgcattgtgcggcaatgccctccaaaggctgttctaggttctttgccacatcggccgcgagcgcctttaacggcgagatatacagcacacgcacaccggcacgccgcgtgcgtggcacggtcatcagccggtcaatggccgagagaaacgcagccaatgttttgccggagccggtaggtgcgatgaccaagacattacgaccggaatggattgccggccatgcctgagcctgtgcctcggtcggctgaccgaaggcatgctcgaaccacaccttggtgggttcggaaaacaggctcagggtttcgcacatatgtacgattataggtcagctgaagtaggcgatgacttcttcggcggtgccgtaggcgctttgggcaccaagcttggtggccgcataggcggagacataggagccgatttgcgcggattgcagcagcgtatggccagcggccaagccagccagcacagttcccatgaacgagtcgccgcaaccggtggtgtccaccgcattgacttgcgcggcggatacgcgatgccaacgtccgttctcgatcaccaccgaccccgacgcaccaagcgtcactatcgcccggtcgaatccgtaatcggtgaatcgttcggcgacctcataccagtcgagtgattccacatcgccgtccggcagacccagtaactgagccacttcatgctggttgaccagcagaatatccgtggcttccaccagttcgtgaggcagctcgtccataaatggcgagtcgttgagcagcacggtcacgccagcgtcatgcgcggtctgtgcggcggcgataacggtggagatcgggctctccaaacacagtcccaataccgcgcattcggcgatggtcgtgcgatgtgattgcacatagccggcacttgccttggcattggaacccggcgaatagacgatggtattctcgccctcagcgctcacggtgattaccgtggtgccgctggggccttcaacgtgcaggatatcggcggtgtcgacgccggcctcatccagcttgcctaataggaagtccgcgttggagtcctcgcccaccgcgcccagcaactggacattgacaccgaggcgagcagcggcagacgcctgattcgcgcctttgccgcccggcaacactttcatggcaccaccattgacggtttcgcctggcttgggcagtcgtttggtggtcacggtgtaatcggcgttcatcgagccgaccacgattaccgagcccggcgcatccttcagcgcttccaatcgttcccgtacgggctcgggcatctgtttatgttcttcttcacttatcaccatgggctccaagcatagtaggcggcgggcccaaatgcgcgcatgatcagccgcgcaacttacgaagacgctcgtgcatggccaccatcagcaccaagagcaccagcaaataccacgggtagagactgattgtcacatattgcgcgatgatgccgaacagtggcggcatgagcagtgagcccacataggcacaggccatctgcacgccgacgacggcctgcgatttgtcttcgccgaagtaggccggcgtcgagtggatgacgcacggataaatcggcgcgcacccgaagccgatgaccaccagcccaacgaccacgccaaggtggtgaggcaatggcacgaacatggtgaggatgccggcgagcaccagcacttggccgaggcgaatcatgaccgggtccttgaatcgcatggtcagaaagccggaaagcgcacgccccacggtgatgcctacatagaataggctggcccagctggcggcggtgatcttgtcgatgccgctgtgcatcaccatgtagctggaggcccacagacccgccgtggattcgatggcgcagtagcagaagaacatcacgaggatttccttggcaccgcgaatggcgagcacgccggccacgccgagcggtttgcgttcagcaacagacgccccttcagcattaccacatccctcggcattgccgtcagatgatgcggcaccatcggtcgattcgccgcccccagtcgtgccacgtttcttccacagcggcaggctcagcaccaggatgacggtcagcatcacctgcaggatcgcgatgtaccgatagccccacggccagccttgcccttgagacagcgcatagcccatgatgtaggggccgaccgatgcgccgacgccccacatgcagtgcagccagctcatatgccggctttcgtagtgaatggctacgtagttattgagcgccgcatccacgccacccgcgccaaggccgtacggtatggcgatggccaacagcacccagtaattcggggcaacggagaaacctgccaaggccgccgcagtcaacgccaccgaaacggcggtgaccttgcctgccccgaatttcaatgtcattcggtccgaaagcaacgccgagacaatcgtgaacatggaaatcaccgcggagatgccgccagcccacgccaccggcacgttcagatcctggctcatggtgggccatgcggacccgagtagcgaatccggcaaccccagactgataaacgccacatagatgacggcaagcaacagactggccatgttccatctcccattcacagtacggcaccggttgtgataacgatgtcatcagtctatcgaatagctcatgggcaacacgcataaaacatatgacaacgtgctcacctcaaacgctaattacggaaattctcggtaagcacgatgtcattatcagcgacgtcttcgatcaggtatcgatcttggagcggtcgaaatcgtcggcgttgtcgacgatgaactgcttgcgcggcggcacgtcgtcgcccatcagcaggctgaagatctcggatgcctgggcggcgtcctccatgcggatgcggcgcagcatacgcgtgcgcgggtccatggtggtgtccgccagctggtcggcatccatctcgcccagacccttgtatcgctggatgtcgtcgttgtaaccgatgtgcttcttgtcgaggtcggccagtttgccggccagctcgtcatcggaatacgtgtagatgtattcgcccttgtgcgagccggtcaacgcgatgcggtgcagcggcggtactgcggcatacacgtagccgtgttcgataagcggccgcatgtaccggtagaacagcgtcagcaacaggatacggatgtgcgcgccgtccacatcggcatcggtcatcatgatgatcttgtggtagcgcgactgttcgatgtcaaagctctggccggagccggcacccaccacctggatgatggccgcgcattccttgttggagagcatctgcgtaatcgacgccttctgcacgttcagaatcttgcctcgaatcggcagcagcgcttggaaaccggcgttgcgggcggccttggcggtaccgagtgcggaatcaccctcgacgatgaacagttcggccacgtcgtcattgcccggctggcagtcggagagtttggccggcatcgaggcggattcgagcgcgttcttgcggcgcgtgacctccttggccttgcgcgactggatgcgtgcgtgcatttcgccgacgatcttctccagcacgcggccggattgttccttgtacccgcgcttggagccggtgatcatctcgccgaattgcttgtcggtgagccgggtgacgatcggcttgacctgcgcggtgccaagcacgtccttggtctggccttggaactgaggttcggccacgcgtgcggtgaccacggccacgagtccggcttggatgtcgtcgcgctccaccttcatggcggagtccttcatgttcaccttgagcttgcgggcgttgtcttccaccgccttgcgaatctgcttggtgatggcgttcatgaaaccgtccacgtgagtaccgccgccgggcgtctccacgatgttcacgaagctcatgattgtggtgtcgtagccgttgacccatcgcagggcgatgtccacgccgcaggtgcgttcgatttcctgggcgtgcagttcaccgccttcgcccacggcctgggtctcctccttataggtgccctcgccttggatgcgccagatgtcggagatcggctcgcctttggataggaagtcgacgaagtccttgacgccgccggtgtgcaggaattccacgacgcgcgggtgcgcgggctgctcgccgaacgcgccatcgacgacctggtcgccggccgtcagcgagaagtcctcctcggacaggctcccggtactgtcggcttgagcctcggtggagtcgtcgaagagttcggcatcgttggacgagacgtccaaagccggggcctggtcttgcgcaggttcgactgcgtcggcatcaatggcttcggcggtgtcagtcgccgtttccggtacgttttcgtcaacaatggtgattttgagtccgggcaccaggaagctggtctggcgcacgcggtcgatgagctgttcgtatgagaattcggcggttttgttgaaaatctccggatcataccagtagcgaatacgggtaccagtggttttgggagataccttgccgatgatttccagctcggtgggtcggttcttgcgagtgcgcttgaacggggaatcgggagacggattggccgggtcggcatccgtgtatacgccagggtgaccttggtggaaggtcatgtggtgcgtcttgccgtcacgatccacttcgacgtccagtcgggagctcagggcattgaccacggaggagcccacgccgtgcaggccaccgacggcgttataagacgagttgccgaacttggcaccggcatgcagtttggtcagtacgacctccacgccggacaggccggttttcggttccttatccaccggaatgcctcggccattgtccgcgacttccacggaaccgtcggtgtgcagggtgaccacgatatcgttgcagaagccggccaaggcctcatccacggagttatcgatgatctcccacaggcagtgcataagaccctgcgagtcggtggtgccgatgtacatgcccggacgcttgcgcaccgcatccaagccctcaagaacagctaggtccttggcgccgtattcttctttgggcatacagtcctattttctaataatttggctcccctcttcaggggagccttcaacggatggctccgtcgtctgacagcccactgggctgtcaaactcctcgcgcggtcggcctactaagcgggccgaccgtcattgatccaggaagtcgcgcagggtctgcgaacgggacgggtggcgcagcttggacatggtcttggactcgatctgacggatgcgttcacgggtcacgccatacacacggccgatgtcgtccagcgtcttcggctggccgtcttcaaggccatagcgcatcttgatgacgccggcctcacgcggagacagggtttccagcacctgcttgaactgttcctgcagcagggagaaggccacggcgtcggacggagcgatggcgtcggtatcctcaatgaggtcaccgaactcggaatcgccatcctcgccaagcggggtgtgcagggaaatcggttcgcggccgtacttctgcacttcctgcaccttctcaaccggcatgtccagctcgcgggccagctcgtccggcgtaggttcacgccccagatcctgcagcatctggcgctgtacacgggacagcttgttaatcacttcaaccatgtgcacaggcacgcgaatggtgcgggcctgatcagccatggcacgggtgatggcctgacgaatccaccacgtggcgtaggtggagaacttgaagcccttcttccaatcgaacttctcgacggcacgaatcagaccaaggttgccttcctggatcaaatcaaggaagagcatgccacgacccgtgtaacgcttggcgagcgagaccacaagtcgcaggttggcttccagcagatggtccttagccttcttgccgtcggcggcggcccacttgagttcacgcttgcgcttgaactccatgccttcactttcggtgtcgagcaggtgctgggcgtacaggccggcctcgatgcgctcggacaggtcaacttcctgttcggcgttcagcaggctcacacggccgatctgcttcaggtagtccttgaccgggtcggcggttgcgccggccgcgatcacacgacgcttcggattgcccgaagggatgatgttctcttcctcatcatccgtgtcggagaccacgtaggcacccttttccttgggctgctcgggtgccttggacttggcttcttcctcgtcctcgtcgtcttccacatcgtcgtcgtcggcatcgtcctcatcgaggtcttcgtcgtcggcatcgtcttcgtcaacgtcgtcaagatcctcgtcgagatcgtcaacgtccaaatcgtcgtcgttgacctcggcatcgtcatcaagcccgtcatcgacctgagtgtcctcgtctttgacgagctcatcgtccttggccttcttcgcggttttcttcgcggcggacttgcgcgtggtctttttcgagggctctgcggacttggacttcttggcagaagtcttgcgcgcggtggtcgtagagctggccttcttcttggtctcggtctcctcgctggactcggctgtctgcttggttgccgtcgtttccttcgtggccaaaactgctccttctgatctctcgccgtgaagtgcatataccacacgggcccacttctggcaagggcaaatcgtcaactatgtgagtaaaccaccctccacggacgattattcccacatcgttgcccgacgtgttgccgatcaccacacgctttccttccgcgcatcgcgcataaaacctcggaaatccgccgtttctgttcattcagcccgagcaccatgccggtgccacgcctcgatcggcggctgagaatatcatcgccgccagcgaacaatcctcatcgagcagcaggcatcgcaaggcgaacaccattgctcgcggatcgcccagccaccataagatgtaggcgattacggccaatggttgtatgcagtacggcaccggtgaggcttccgcgatatcgagcaacataccgatgccggcatggcaacgctccttatccggcatcatgccttcatcctcgaatgcgcaggtcagcagctcgcccattcgtgttctcgtacgtgccagatgcggtcgcgccgcgaattccatgagccatgacttggggcaacggctttcatcaataaccaacgagagaatcagcgcatcacgaatcgataaggtctcgcgcatgcccaccgcaaacgcggccatcgtctctcggcctaggtcggtgttcccggcatcgagacaagacagccattcgtccaatggttcggccacccagtcggcattagcctgttgcgcgcctcgaagtcggcgatcattgcgaaattcctgtgatctcgtctccaactcatcaaagccaaagggctccgtctgctcggcggcgtgccgtttggcgtgtcggctcttacgcggcttgtgcggcgtgttgttgttcatcatgtcctccttgactaatggtgtgcaatctattggtgttgtggtgcgcgccgagccggatagctcatgcgccgagggggtgtgtgcccactatggctgaaaacgccgtatgacgcaggaaaaaacgaccattgtggttctagcttcaaaacccttgattcccaacgttcttgtgttcttcaaaccctgtggataagttattaggcatgtgcacaactgctaacaaccgcgaaatcatcgagccacgcatcattcagttggtgcgggaactgactgccgcccccgccaccgacgaggttgccgacgccctgaaaccggtgatggaacaggttgtgggccaagccgcctcctccagccaaggaggcaaacgactgcgtgcgctgctcgcattggacgccttcgatattcttgccggcgacgtgacgcctgatcggcgtgacgccatgatcgacctggcctgcgccattgaagtgtttcagacggccgcactggtgcatgacgacatcattgacgaatccgatctgcgccggggcaggccttccgcacatcgtgccttggaacaggctgtacacagcggtgccataggccgtggcttgggcctgatgctcggcgacattctggccactgcctgcattgaaatcacacgccggtccgccagccgtcttcccaacaccgatgccctgaacgaggcgtttcttaccatgcagcgcgaggtggagatcggccaggtactggacttggccgtcgagatgaccccactgtccaatcccgaagctctggcgaacgcctcattgaatgtattccgctgg

SEQ ID NO: 271 - DNA, 7629 bp, Unknown
  R101_18m  MAG No. k141_64039
ctatacagcgcgagttcggcgtcggtttcgtaattgtcgagatcctcggcactcatgcttgtttactcactcactttccgtatcgcgtttgcggccgcggcccagcgtacgccaccatgcttcctttgagggcttgcgttccgcctggccgtacggccagttgctttcctcttcgagactgtggcgcgtgttcttctgcgtatcgtcgtggtgcccggcctgtggctcgactggctgtgcggccgccggcgtctgggcctgggactgcacgtcactcgtcgtgacggcggctgcctcaccacgctgtgccggctcgggttccggcttgttctgctggatggcgatggaatgctcacgcgcggacagcgcttccttgacacccgggttgtcctcaatcaagtgcataccaaaagcgtcaagcgaacgaatcgggtcgtactcgtcgaccaacgtgtccatgacgataaggtcctggtatttgttgttttcgacatcccacaacgcgtcgcgcgaggtgccggacggcacgaagccgagcgactggtagaccgaaatcgaacggctgttcttttccggtacgctcacccagatgcggtgcatgcccaggccggccggttcgggcgcaaagccgtaagtcatcacacgcggcatggcgtcacgggagtagccgcggccacggtactcacggcccaagatgatctggatgcgggcggacttggaccagccgtcgatgtcgatgaggaaaatcatgccgatgacattatcggtgctggccgcatcgagctgaccgtcatcgtcatggtcggcgtcagtcaatacggcccatgcgatggtgcggcgggattccgggtcgcccacgccggattcggcgggtgcctgaccggcttcccaggcttgggagcggcggacccatgtgtgtacgatggcgcgttcggtgaccgcatccttgccggtgatcttggatgcgccatagaaggcatcaagttcatccaaacgagccaggtcctcgacggtggcggggcgcaggtgcaccatttcgccacggattggcggaatgacgatgctctgtggcagatcgcgcttcagttgcgcttcggtagccatgctcagcgtctcgttggttgcggtcatcggtatacatcccccggttcggcttgtttcggctcacggtccagtgccgaacatatcttactcgactgggtgaacgctggaaatgctctgagacgactttcttacagaatcaataaaggctcccgctggcgggagctgtccaacgaatttgaactggaggatttccctacaaataagtgctcccgctggcgggagctgtccacgaagcggactgagggtggtcatccgtacatggcgaccaccctcagtctcactccgttcgacagctcccgccagcgggagccagtgaatctaatcagcccttgatcttgcccatgacgaccttggtgacggccttggcgtcggcctgaccgcgcgtggccttcatcacggcaccgatgatcacgcccatcggcttcatgttgccgctcttgagcttctcgacgacatccgggttggattcgaacgccgcgtcgacggccgcctcgatggcaccgttgtcttcgacgatcttgtagtcgtgcttcttgacgacttcatccggagtgccttcgcccttaagcacgccttcgacggtctgcttggcgagcttgtcgttgagcttgccggaggcgatgagcttctcgacctcggccacatcggccggggtgatcggcagctcttcgagggacatacccttggcgttggcttcgcgggaaagctcgcccagccaccacttgcgggcaccggcagccttggcaccggccttgacggtttcctcaatcaggtcgagggcgtcggcgttgaggatgtcgcgcatctgcagatcactcaggccccactcagacttgaggcggttgcggcgctcacgcggcatttccggcatctgggccttcatctcctcgatgtgctccttggtgatgtggagcatgacgaggtcggggtccgggaagtagcggtagtcgtcggcatcggacttcagacggccgccggcggtggtctgcgaagcctcatcccagtggcgggtctcctgcagaatctccttgccgtcgtccagacgggcggcctgacggcggatctcgtactggatggtcttctcgatgccgcggaacgagttcacgttcttggtttcggaacgggtgccgtagggggcgtccgggctcggacgcagcgagacgttcacgtcggcgcgcatgttgccctgctccatgcgggcatgggagatgttcaacgcacgcacgatgtcgcggatggcacgcatgtaggcaccggcgatttcgggagcgcgatcgcccgcgccctcgatcggcttggtgacgatctcgatcagcggcacgccggcgcggttgtagtcgaccagcgaatgatcggcgccttcgatacggccgtcggcaccacccacgtgggtgttcttgccggcgtcgtcttcgatgtgggcgcgctcgatcggcacacggaacacggtgccgtcctccagttcgacgtccaggtagccattgccgttggtgggcttgtcgtactgcgagatctggtagtcacgcggcatgtccgggtagaagtagttcttgcgggcgaactggctccactcggcgatttcgcagtgcagggccaggcccagcttgatcgcgtaatcgacggcggtcttgttgatcaccggcagggagcccggcaggccaaggctcaccggggtcagctcggtgttcggctcgccgccgaactcgatgtgggccgggcagaacagcttggtgttcgtggacagctccacatgggtttccagaccgaagaccacatcgtacttcttggtggcatcggcgtacttcatcagtttttcagccatgatgttgtttctttccttccgatgctcacttgcccaggccgtcaagccacggggtcttgaggtcgttccagatcgggccgttccagctgtcttccagcgcggcttcgagggccgcagccggcttgtacatgacttcgtcgcgctgctgcggggcgatgaactggaagccgacgggcaggccgtcgtcggacaggccggccgggatggacatggcgggcacgccggcgaggttggccggaatggtggcgatgtcgttcatgtacatggccagcgggtcgtccatcttctcgccgaacttgaaggcggtggacgggctggtgggggccacgagtacgtcggccttctcgaaggcgttgtggaagtcccggatgatcagcgtgcggaccttctgggccgaaccgtaccaggcgtcgtagtagccggcggacagggcgtaggtaccgaggatgatacggcgcttgacctcgtcgccgaagccggcctcacgggtgtaggccatcatgttggcggcggtctgaggcacgccggtcggcggcatcacgcgcaggccgtagcgcatgccatcgtaacgggccaggttggagctgacctcggacggcatgatgatgtagtaggcgcccagcgagtagccgatgtgcggaaccgagacctcaacgacctcggcacccatctccttgagcttgtcgacggcctcgttgaagcgggcctcgacgccgggctggaagccgtcgccgccgagttccttgatgaggccgaccttcatacccttcagatcgcgcttggcgccttcgcgggcggcggcgaccatcgggcgcgggccttcggggatggaggtggagtcacgcttgtcgtggccaccgatgatctcctgcagcagtgcggagtcgagcacggtgcgggagaccgggccgatctggtcgagcgaggaggccatggcgatggctccgaaacgggagacgccgccgtaggtgggtttgacgcccacggtgccggtcagggcgccgggctggcgaatcgagccaccggtgtcggtgccgagggcgatcggtgcctcgaatgcggcgactgcggaggcggagccgccaccggaaccgccgggcacgcgctcggtatcccacgggttgtgggtggtctggtaggcggagtgctcggtggaggagccctgggcgaattcgtcgaggttggtcttgccgagaatcggcatgccggcggccttgagcttttcgatgacggtggcgtcgtacggcggcacccagccttcgaggatcttggaggcggcggtggtctcaatgcccttggtgacgatcatgtccttgatggcgatcggcacaccagccagctcaggcagggcggccttgtcttcggcggacttggcgtcgaaggcgtcggcctgctcgagagccacatcgccggaaaccttcaggaaggccttgatggacggctcggcggcttcgatcaccttgaggtgggcttcgacgagctcacgagaggtgacgtcgcccttcttgatggcagcggcctgctcggcagcagacagtttgacgagagttgcggtttcgttgctcatcgattactcctcgcttcccaggattcgcggtgccacgaacatgccggcctcggtcttcgggccaccggcgagcgcctcttcctgcgtgagcggggtttcggcgacgtccgggcgcaggtaggcttccagaggaaccgggttggcggtcggcggcacatcgtcggaggcgacttcctggaccttgttgatggagtctgcgatgacgttcagttcgccctgcagacgggtgatttcctcatcggtgagcgcgattcgggccagatcgcccaaatgcacgatttcttcacgtgaaaatgttggcatggccataactatatgagccgtatgtgacacgcagttgtcgggaagcctcattttcccgcctactggagcccttcagcgaatcagaagctcaagccggtcgagcatttgccccgctgctggcttcttcggcggggcaaaaccgttgccggaccgcaagttcaccttactgagacgactcgcagcagagcaaaaccgcgagctgaccgatgaaacgccccgctcagccatcccagcaaaacaaaaccgcggtccaaccaataaaacgccccgctgagacgccccgcagcgaggcaacgccacggcccaaccgcaaatgtgccccactgaagtatctgcatggccaccctaataagctcacaatgagcccaaacacacctacatcgaacatatgaacgacaatcgccctgcgcacctcgccagttatccacattttgcatacccacccaaaagaatccacataatcagtccaatacggtcagatgcctgataatcaggcaaaaacacacatctaggcaccgaagctagaaccacataaccccagacagatagacaccgtgttcaccattggcataccgtcgaatcatgaaacatcacaaagcagtggacatactcatcacgaaggctgaagcaacgcaacagtgcgcttatggaacaaccaaggcacaccgctcggcgctggctcggcgcgtgcaggcgcgcgaactcaaacgtgtattccccaacatgtacgccgcttcggaatactgggattcgctgcaacccgacgaacgtatcagacatattgcacgaactcttcataacagacatccggattgggtgttcgccggggtcacggcagcggccatccacgattttgaacaccaatggcatcttcatgctggcaccatcactctcgccacaacatcacgaggccccaacgccagcagtgcaaaggtcaaacgcatcttcacgtcaagcagcacgccagaatatgccaatggactcccggtgaccagcaaagccagaacggtggtggattgcgggctgtccgtcgacttccgatttgcactgcccattatcgattcggcgctgcgcaacggcgtcgccatcacggacattctgaatgtgtgcagcactatgcgacgtgattgcacgccgatattccgcctactgcattatgccaatccggcgagtgagaatggtggcgagtcacttggacgaggcaccatcatcgcaggcggcctattagccccagaactgcaacaaaacatcaccgacccgcaaaccggtgcgctgtatcgcgtggatttcctctggcggctacctgagaatcggcttatcgtgggcgaattcgatggctatgaaaaatatgtgaacccggatatgaatgaccgcaagggtgttcgtggtgcagttcaggcggagaaagaacgggagacggcactgtaccgggccaaagtcgacaccattgtccgattcacctatgaggaggtgatgcaacaacatcctttactcaataagctgcgggcagccggcatacctcatgctggaacagtgatgggagctggttaagcgcagtgaaccacggtggtcaaatccatggggtcagagtcaccagaaccatggtcactgcagaaccgccaaagccatagccatgacaaactgccaggaccatggccgaaccggcagaaccgccaaagcagtaacccgcgttatttgatatctgatatccgcttttccggtgatgatgagaccgccgatccatgcggcggcagcccaggcgatgagaatcaggccggactgccaccattcgggaatccagtagtccggtttaccggcttcggccagtgtggactgcgcggagctgctgatgcctgcggcgagcaggatgccgacgatgccggcggcaaatgcgaattaatgccgcggcgatggatttggtggcgtagatcatgcctctaatgtggcccatattgggcagatgcggcgggattgtcggcgcatggctacacgcctgatacggcgtgttgggcaatccatgcgtgcatggccacggccgccgcagcgcctgcattaatggagcgcacggaaccgaattgagagatgtagaccacatcgtcggccaattcgagggccttctcgctcaatccggggccttccgcaccgaagagcagcaggcaccgcttggggaaggtataggtttccatcggcactgcgccgggaatgatatcgagggcgatgacgcgggcggcttgaagctccttgatgcgcgcatcacaagcatcgatttcggccagcagctcatgaaggtgcttgttgtctccatccacagccacatcatgcgcatggatggcggcggcaccggccttggctcgttcataggcgatttcaccggcgatgcgatgatgccagctttccaccagttcggcgatggaggggtggtgttcgacgtgctggtacagttcggtcatcaacgcgcccttgcgattccacttatgtggaccgacaatgtgtacgcgcttggcctggaaggcgttggcggtgcggaccatggaaccgatgttgaaatcgtgggtccagttttccaccgcaacttcgaagtcatgacgccctcgagcgtcaagatcggccttaatggcagcgacggtccagtagcggtaacgatccaatacgttgcggcggtcgccgtcattcaacagcaccgagtcgaaacgaccgtcataattcgaagaagtcggatcatcgggacgaggctcaccgggatgggtctcagaccacggcccaaggccgatttcacggaattccggttcacctgaagccttggcagccaaagaaatctggttgggtgcgtgca

SEQ ID NO: 272 - DNA, 5607 bp, Unknown
  R101_18m  MAG No. k141_64204
ctacttcaccgccccgtacccgtcgtgccggcgcggcggcaacgagaaccgcaacggtgcgatccgccgctacctgcccaagcgcacgcgcgtcgacccgtccatggccgacgagatacaggccatcgtggacgagaccgacgaccgtcccatgcgcgtgctcggctaccgcaccccggccgaggcattcgccgacgaactgctgtcattaaccgaacaacaaggatgttgcacttctaaatagacaacggggtgactaacgaagagacggcggtgttctacactggtagccatgtctatcgcatcagtagaggcccaaaaacagctcgaccgtatcgtggctctcggctatccggatgtggcggatatttccgccgccgcattccgctcgctggcccgacccctgatcggggcgctcgagcattccgatttgggatcgaacatcctgctggtgcccacgcgcgaactggtttcgcctgagtcactgatcgcacgaacctccatcaatcgcatggccggcttcaccaccatgccgccgcgtgacatcgccagcttcctgcctcaagacggcttcatgccgccggaaggcccgttctatctggtcgtcaatccgcacaccggcacgtgttatatcaatcgcgagccggacgtggcccgcaagcttatcgactccgatgaacgcctgccgctcaccctcgaggaaggcttggccatcgccacccagcacccggagtggctgctggaaaagaacggcttcaatctgctcggctcacgctccgcagacggccgcgtgccgagcatctggatgagccagaacgcaccgcgactgggagctgtctggcccaattcccgccatacctggctgggcaacgcgtattgcacggcccgtcgcggggtgagtctgttccgttgactccgccagtgtgcgttttctctgtacaatgaaaggcatattgcatcatttcatcagagagaagacgcgatgaactgtgataggtgcggtgctgtcaatgacgataggttccgtttctgcacggaatgcggtgctccgctggcaccgaaacttgccgtgggacacaatacggtcactgatgttccgcctgtgccgatgccacccgccggtcccattcccggccccggtctcagctctagcctcggcccagcgtcgtctgcgcccgccactatcgcggtaccgcagacgccggtaccgggtcataagcgtcgccaaggccgctgcggccgttaaagatatgggtgtgccgatttatgccaagcgagtagccgcaacatccaaggccgatacgaagaaagtcgtgtatacctacccggctggggcagccagtggacgataatggtgcgatttatcttggtatcccggatccctcagtcgagggcatgccggccgacgttatcggtatggataaggatgaggcgaaaaccgcagtagaaaacgcatcgaacaacaagatcgaggttattctcgagccgcgattttccgccaagaaggattttggcaaaatcgtagcttccaattacatttttggtgcgccgtttgaggcgagcaatgaggaaaatgattataaaatattgcaaccgatacgtctgtactacggtgtgggagccgacaacactgaagatgtggtgaccaccggttcaggtagtgattatgatttcgacccgcacgcggattatgccagcactagcaagagtgacaggagtttgccgtatatctcggctgcgggcgaatggcgtgttacgggcacctattgcaaggatggtttcttacctggctcgggtggatgcatctcgctgatttcgaagggtcaagacggaatgaaatacgggtccggttacccgtatttggtgcgcaaaggcgatgagtccaatggcatatgggacgatcgggtcacactgtgcacgcccaccggagacattggcgggtgcattctgcactacaaggatggttcgattcccgataatgaaaccaatatgcgcaaccacttgttggccaaacagtggggcatgttcgagatgtaccgtggctacggatggccggtatgcgacggcacggtctaccgaggctatggggagacggaagggtgtgaccatggtcaatatgtgaggactgatgatatccctgatggtcagcaatccggtgccacctacgaaatggatgacttctacgtttacttcccggtgggatcgaagatcagcaaactcgaggattccgactatttctccaacaaggcgctggctgcggcgaacaaggcggggaagccagacaccgaccggccgttcttcatcatgcgcgaccccaagggatacaagaccacaagcgtcgaagcatacaagaacggcgagcaaaccaccaatccgtttgtacccggtataccgatgagcggtggatacaacccgctagtgaagatggatgtggctcccagcgccgatgcgtcgtctgaagactcggccattgccaatacgtcgcagtcgagtaagaagttcgttgccgcaggcctgtatctgccggtgtatcttgcctctcaaggcaacggcaatgcggaaggattggcaaatacgatgatgaccggcatggacaacagtgccggcaatcaggctgtcggggcccttggcggatggagtgctgtcaattcatggctgagttcccatgggtacagcggcaccagcttcaaccgtgatttcggtgatgtacaggccagcaatgctggatatgagaattacagtaccgctcgtgacgcggcccgcatgctggttgccgttgatgcggtcggtggcactggtctgatgaacactgatattgcttcggagggcgtggtgattccgagcggcatgaccgtgcatgcacatcgtggcatgggcatccagaacacgtggaattacttcgccatcgtggaggtgaatggcaacaaggccgcggtctctgtggtcacgcaaaaccaaggtcaggatcgtgccgctcagctgatgagccaagtgcttgcctcggtggatagcacgttgcgcaaatagtacaagcagtatttgcacatgcaactgtgtatacggaccacgccttttggttggcggctgagtggggactattccatcgcgtcatttcccagtagaatgaggctatagtgcgtcattcgaccagagagaagagcaatgatgatctgtaagaattgtggtgctgacaatgatgggggaagccggttctgcatgcactgtggtgcgccgctaaccgacgtgagtgctcctgctcctcaggcggcggccggcccgattccagtgccgctgccggacaatactatgacggtgcttgatcacccgccgctgcccggcccaaacgatgggaacgcctatgggcagcccggcgtgccgacatcgagcggtgtggcaggagcgccgaccgcaccgggagcaagtcatactgggtcgatcgcaccgggagcagtgccgcaggccgctccgggtgctcctgtcgctccgggcgcagccacgccgccgagcggcacaacgaccgcaaccgccacattgccgaatctttcgggcaagcgtggcccgaatacgctgattatcgcgctcgtggcggtgctgctggcgttgatcgtagccggtgtggctttattcctgacgtatcgtgccgaggtgtggggtggtaagtcgctgcctgatccggcgtccatcgcctccagcgtcaccgataagaacggcaataaggcatcggtggtcaaggccaaggatgtgaccgagacgttgaaggccaagggcctgaacgcgaagacggttccggtgttctccggcgaggatcgcggtgtgttcctcggctacgagggcacgaatcctggcgctcgcgtcaaggccggttccacggtggtggtgcaggagtcggccggtcccggtgtgccgaagggcacggtcggcaaggatgtgaacaaggtgacgaacacgttcgcgaatatgggcgtgccgattcactataagaaggttgtgatttcgccggacagcaagactccggaagggcaggtcagcgtcacgtacccggctcccggtgcagggctcaccgatgacgagaaggacaacggcatttacattggcgtggcctccaagggcgatggtatcccggtggatattcttggtgcggacaagaacaaggccgtcagcgacttggagtcgcaaggctacagtgtggatttggaaccgcattactcgtcagagaaatacgtgggcaagatttccggctcgtacccggctccgggatccacgttgagttccggccagtcggtgaccttgtattacggcatcgataagtccagcaacatggacgtgctgagcaaaaccaactcgtatgacaacatcaagatggccagcatccacgcgtccgcaatgatcggtatgtactgcaagagcgaggtgacggatgccgccaaggactgcatcacactggagcaatcctcgatgaatccctttggctccacttcatccgaggattatcagtacctgcaaatcaaaggccatgagcctgaagacaaggccgatgtgttgggcctgaccaacttctctcaggacatcagcggcgcgatgctggaagcggattcggaatacggcatggccgcggacaaattgccgatgaaaaaccatctgctgttgaaagactggggtatgttcgagctgtacgcgggcatgggtctgccgaactgcggctcaaaggtgatgtccgcttcgataggcgagtactgcgtgaacggcaactatgaacgggcgtcgttcgacgatggcgaaatgacgccaccggccggggctgagaacgggtcgaccggcatgacctacgacatgaaggacttcctggtctacttcccggccggttccgatgccaagtcattggatgattccggttacttcgacgccgccgaactggcgaaggccaagaagcagaaggccgtggataccagccgcccgtacgttctggttcgtgacaagagcctgtacagcgagatcagtgtgagcgccagccggggcaaggatgtggacccgtttgtgccgaccaacagcagtatcaataactatcagaacgcgctggtgccgatgaggccggctcccagcgattcgaccgtctactatctggtggagcagaacggcgatctcgactgggattccctgccggacgccgaggtcaagggcactggcgataaggccgcttccggtgagacgaccggtgacaagtccaaggacagcggcaaacgagacgccacattcaaagaggccatgaaacaggcggcaggtaactatagtttcggttccggtgtcggcgcatggggaaccgtaatgaaagtcaataaggatggcaccttctcaggctcctaccatgactcggatatgggggccacgggagacggctatctcataggaaacgacgtcgatacgctgaacggcaaggcattgctcaacgtgacgagcggagcggataagggatacacgttctacgatttctcgtagtgattcagctgccgtgcggagcggcggggaacgtgaaggaccggcgcgtatgctgtgcgaaacagcattacgtccctagactggtgaggcatgacgaacctgcgattccgcgaa

SEQ ID NO: 273 - DNA, 9027 bp, Unknown
  R101_18m  MAG No. k141_65591
atggagttgccgtacgacttgctcatcttgcggccgtcgagacctggaatctccggtgcctcagacagaatggcggccggctccgggaacactgggttcttcttggcgtaacgctcgttgaaacggcgggcgatggtgcgcgtgatttccacgtgcggcaggttgtccttgccgatcggcacgacattggccttgcagaagaggatgtcgcacgcctggtgcaccgggtaggtgagcagcaggccggtcaacgcgtggccggacgcctccatctcggacttcacggtcgggttacggtgcagctcagcctcggtgaccagggacaggaacggcagcagcagctggttctcggccggcacggcggagtgggtgaacatcatggtcttgttcggatcgatgccggcggccatgtagtcgagcaccaggttcagcacgttgtcttggatgtgctcggtggtgtcgcggtcggtgatcacctggtagtcggcgatgatgatgttcgtgttgacgccgcgctcctgcatggcgacacgctcacggatcgagccgaagtagtggccgaggtgcagccggccggtcgggcggtcgccggtcaacatggtgaaggacgacggcttggcctccagcttggcgagcgtttcgtccgaacgctttttggccgcgaggaagctcgcgcttatctcattgcctgccgctgtcagttgctgctcgtcggtcatgcgaaaatcctttaaatagggctcagataaacgctttttatggtaaaagtgtgagccgacaacgaacaagccactattagtggtactctctattgttgatgaatcgaacagcacagtaatcgcagggggtcagatgggccgcggacgtcaaaaagcaaaacagcagaaaattgcccgaaagctcaagtacctgaccaccgataccgattacgatgagctggcaaaagagctaagcgagcaggagccgggaacgggctctcctgacccgttcgccgatattgatgatcagtatgcggacaaggatgtggattctgctgctgacgaccacgcttccggtgccgccgaggcagctcccgccgcgcaggaggacgacctcgacgagtacgccaagtgggcagccgaagcggcagccaaggcgaccagtggagaattccccgcatcggcacccaagaaggcggtcaatgtaccgaaaccggctccccgtaagccgattccgatgcccatgccttccgcgctcaagcccaagaagagctgagcgcacgtaggcatatgccggatatcagcgggcaggatgggccaaggcccaccatgctcatcatggacaacgaccgcatggccctgatggcattacagtcgattttgtcgaaggccctgccagacttcgaattgttgccgccggtgagcgaaggcagcaaagccattcagctgtgcacggccaccaaacacccgcctgctgtgctattggccgatatcgcgatgaacgacatcaatggtccggatgtggtgcgtgcaatccgcagggaaaacgcgaccacggcgatactggccattaccgcctcgattgtgggccgacatgcccaggagatggcccgggccggcgcacagggcatcatgagcaagaacgatgatgtgcggttgcagggcgtggcgattcgtcaggtacaggccggcaaaacatggggcgatggtggcgacgtgcggttcgagaccgcggccgttgcgtccgcgcgcatcaaggccgagaaggacaaccgtctgagcgcgcgtgagatggaggttgcggaactgtggtcccgcggccggactatgccgcagatcgccgccgaactgtccatcaccgaaaccaccgtgcgcacgcatctgatgcgtgcggccgacaagctcggcgccggcaatctcaaggaacttatcggcgcatggattcgcatgaacctgcactgatgaaggcgccgatgggtgtgtggggacacggtagaagaagcgcaaggcgcataaggggagcgggccggtgaaacgtccgattatcatttcgcggcattcgtcgtattcgtatggtcacgccgacggcaagaagcatcatcagattgatatcgatatagaactcaatcatccgctggcgatgttcggcccgatcggtgtgcttgcggtggcggccatcgtctatgcggtgaccgggtcgtggctggtcacggcgtcggcggcgttgacggcaagcgtgctgctggtattactgggcattgcgttgcgctggcgcaagcgcgtggtgaatcaggagaacgaaaacgagcagatggaatcggcgctggccgatctgcgccacggcaaccagctcgcgatcgaactgcacgacacgctgtccaacgatctgacgtatatctcgaccatcgcccggaataatctggccgcgccagccggcatcgatggtggcgactggcagcgcgtgctggatcgcagccaacgtgcctttgcggaagtgcatggcatcatcgattttctgaccgagcagagcggaatggacgccggcttccgggacgagtccttgccggtcggtggcaccgggacatctgaggtggcgactgcagaatcagggcaggttgattcgccgacgaaagaatccgccctgactcgtgacccggtaggcgccgggagctgtccagcgattgcgaatgaggtggttgacaatgccgtgcccgagaacgccggtggcgatgaccgtacgcaatccacagcgggcatgccgcagtccttcgtcacgcgtgtgaaggcgcagatcaccgataccgaggagtttctggaggcgcagggctatcgggggacggccgcggtcaacggcatcgccatggtcgtggaccccgaggcggcggccgaggcgctgtcgctgatgacggagatcggcacgaatatccgccgccatgcaccggcgggagctgattcctacctgctgttcgtcaccctgtctcccgaatggattgagattcgcgagaccaacgatatccgtgacgatgccgacgcgcagaatggcctgtccgcgcaggagcggtcggggcgtgggctggccatgcatcgcacccgtgtgcaggagttgggcggtgaattgaccacccgttcggatgatggcacgtggatgatctatgtgcgtatcccgtgcgtgcggggctgatggggcagaagctgcgatgtccggcgtccggcgctgattgtgccctgtcctcacaaatgaggacgacgaccgcagccatgtccccataaccgaggattgcgggtgttcggctcggcggcggctccctatggtggcgtccataaggaccaatcccagggaggacaacgatggcaagtgatacggaattatggcggggaactgattacggatggtggctggctgcggacacgtccggcgcggtcggtgccagcctgatcgcgttcgcggtgccgctgatcatgctcgccacgacaggatcctctgccgccgccaccacgacggaaagcatctgcgtggtggtgcagacggtgctgggccttgccggcggcgtgattcaggaccggtatgatcgccgtacgctcatgctgatctggggtgcgtccggtgtggtgctctcggcggtggcggcggcagcggtgatgctgttcggcaatgcgccgaagacgagcggccatggggttaacggggcaaacgctccggcattcggcggaccgtatgcccacgtgcttccgatcgcgctgctgtgtatcgtcgtgctgttttcggtgcgcgatgggctgttggagaatacgtcgaatgccatgctgcgtggcgtggtgccggatgagcagctgccgcacgcgatggcgttgaatgacgccagggattcgacggtcacgctggcaggcgggccgttgggcggtctgctgatgaccgtgggacatgcggtgccgttcctgaccagcgcggtgctgagcgtgctgggcatggtgtccgcatggcgtatccgccgctattggaaacgtgcgactgtgagcgatagcggccgtccgggcaatgttgataccggttcggaggtcggggccgtctcggacgccgatgatgccgatgactccgccccacgctggcgcgacgcactggacggcatgatctggctgctgcgcgaccggttccaacgccatctcatcatcgcagcggccatggtgaccggtgccagcaatgccttcctactgctgaccgcgctggacatctcccaaggtggcagccagctgatatccgccggattcatcaacgccgcctccgccgttggcatgttgctgggcgcactgatggcctcgcaactggtcaaccgtgtgcccggcggcgtactggtgggcgtgatgttcgtcttgctggctgtaggattcaccggtgccgcgttggtgccctccatggttggcaaggccatatttgtggcctgctcggtactggcattgcccgcgggcaacgcggtgcttggaggcctcagcaataccttggtgggcaaggacaagctcggccgcgttggagcgggcagcatggtgttgcagtacggtgcctatggcgtggccgtggcactcgccggctggggtatgcagaccatcggctacggtccgacctgcctgattctggccaccgtactggtagctgccgccgcttacgcgctgacgatgcgcagcctcatcaccctacccacgccggaccgctgggccgagcacatccagcgttggagcatcgcacagttctgataaagggcatccgataccgggcatccgacgatttacagcggcagcaggtcgctcagatcgtcgcgctctccgaccgcgctgatgtggccggcgtccttttcctctgcccacgtggtgatgccgcaggccagccgtagccagacctcgggctccagttcgatgacgtccggtggagtgaggttgtgcgggtccgattccgggccgtccaggattttgaccgcaccccacggcgcaacgcgcacctccacgccagggccgggcgcgcgccgctccagcaggaacagcgagtagcgcacagccatcgcccacaccgggcgcggcagaacgggggaggtggtcaggcgatgtggtgtgttgtcggccagttccaaggctgcggcacgccattgcaccagtgcgtcgtgccctcgtttcaagtctttttcgagaattactgccatatgctccatcatggcaccggcacgcgaaaccgcaaggtatgcaaacgatggcatactgtaggatgcggaaccgtgagatatgtgatacgctctcaatgagaacgtatgcaagaacgctccgccatcgtcgttacggagagttcatgcttacgtctatgcgacgatacctatcgcgcggcataataaacacgggcacttatcccggaaggaaagtcagaatgaccgaaatcaccgcaccgaagtctcctgtcacggcggaacaattcgccgacgagattcgtgaacaactgaaatacactcaaaacgtcaccgccgagcaggccacccctgctgacgtgtatgtcgccgcatccaaggccgtgcgcaaccaccttgccgactcctggttcaagacccaggccgacaccgtcaacggcaacaccaaggccgtcggctacctgtccgccgagttcttgatgggcaagcagctggagaacgcactgctgaacgctggcctgaccgaccagttcgacaaggctgtggaagcccttggcttcaagccgaaggacatcgtggacgccgaatacgagccgggcctcggcaacggtggccttggtcgtctggccgcctgcttcatcgactccctcgcctcgctgggcgtgccggccttcggctacggcatccagtacaagtacggcatcttcaagcagaagttcgacgagaacggcaagcaggtcgaaaccccggactactggctggccaacgaagagccgtggggccacaccgactacaaccgtgatcagaaggtctccttcggtggcaaggtcgtcgaaaacgccgacggcaccaagacctgggaaccggcctggtccgtgcgcgccgtgccggtggactacatggttcccggctacaagtcccagcgtgtgaacaccctgcgcctgtggaccgccaagagctacgacgagttcgatctgctcgccttcaaccgttccgagtacatggacgccgtggccccgcaggtcaaggccgagaacatctccaagattctctacccggaagactccaccaaggtcggtaaggaactgcgcctcgagcagcagtacttcttcgtctccgcatccctgcacgacgccatccgcgtcttctacccggggcaggacaagccggacctgacgaccttcccgaacaagatcgtcttccagctcaacgacacccacccggtgatcggcatccccgagctcatgcgcatcctcatcgatgagtacggctacgactgggataccgcgtggtccatcaccaccaagaccttcaactacacctgccacaccctgctgccggaggcccttgaggtctggccgtccagcctgatcggcgagctgctgccgcgtcaccttgagatcatcgagaagatcaacgcgcagttcgaggccgagctcaaggccaagggcgttgccgccgacaccatcaaggacatggccatctacaccggcgacgccgtgcgcatggcctacctggccacctacggcggctcccacgtcaacggcgttgccgagctgcactcccagctgctcaaggacgtcaccctgaagaacttctccgacgtctacccggacaagttcaccaacgtgaccaacggcgtgaccccgcgtcgcttcgtcaagctcgccaacccgcgcctgtccgacctcatcaccgagggcctgggcaccgacaagtgggtcgccgatctggaactgctcaagggcctcgagccgctggccaaggacgatgagttcgtcaagaagttcgccgccgtcaagaaggccaacaagcacgcattcgtgggcttcgccaaggaccactacggcatcgatatcgacgagaacaccctgttcaacaccatggtcaagcgtctgcacgagtacaagcgccagtctctgaagattctcgccgtgatctccaactacgccgacatcaagtccggcaaggtcaaggccgaggacatcactccgcgcaccgtgttcttcggtgccaaggccgctccgggctactacctggccaagatgaccatcgagctgatcaacaacgtttcccgcgtgatcagcagcgatccggccgtcaaaggcaagctcgccgtccacatgctgccgaactacaacgtcgagatggctcagaacctcatcccggccaccgagcttgacgagcagatctcccaggccggcaaggaagcttccggtaccggcaacatgaagttcgctctgaacggcgccctgaccgtgggtacgctggacggcgcgaacgtcgagatccgtgagcgcgtcggcgccgagaacttcttcctgttcggcatgaccgtcgacgaggtcgagaagaagtacgccgagggctacaatcccgcctcctactacgaggccgatccgcgcctgaagcaggccatcgatctggtggccgacggcaccttctccaacggcgaccgcaacgcctactccccgctcgtggccgactggctgaccaaggactggttcatgaccctggccgacttctccgcctacatggacatccagtccgagatcgaggccctctacgccgatgagctcgaatggaaccgcaaggccctgctcaacgtggccaactccggctacttcagctccgaccgctccatggaagactatttggaacgtatctggcacactgctcctctggcctgacggccgccggagcagcgcgccggctacgtgctggtttctacctcgcggctgtcgccgctcggcgtcgcctacgggaagcccgccgggcttcccgcttaacggctccgcacatctggcacactgctcctctggctgactgagtcggtggggcggctcccctcggagaggggaaccagaacataagaagccccgcaaccgacatccatcggttgcggggcttcttgcgttgaaaaaccgccctatcaggcttcggccggggcggcttccgcctcgccatcggcctcatcctcggccttgttcagacccaggtcgaccggcgaggagctgttctcccacggctcctcccacggatcgtaatctgggttctgctgcttgtagatgtacaggccgacaagcgcggcgagcaatccgccgaacagcagcgcgaagaacttccaaccgttagaagacttgttctccatgacggctcctttccctagggatcgtctggtcggtatgcccattcagaccgactctgctccctattctaggccgctgtttgtgacgattgggtggaatgacattcgtgggcgattcatccacgcccgtctgccctcggccggctcagcatcttcgcggcgcgtgaaacgcatccgagaccttcgatacagtggattgcatgcatattcctacacaacgggagattcgataccagtgggagcgcggtggtccggtgatgacctgggcgctgattgttgcgtgcgtggcagtgtggctactggaggtattgttgggatttattgccccgggcctgagggcttggttgatgtacctcggcatggcggctccggtcagactggtggctgagccgtggacgctcatcacctcgatgttcctgcatgcgccgaactcgctattgcatatcctgttcaacatgatcgccctgtattccgtgggcccagtgctggaacgaatgatcggccactggcggttcttgggactgtatgtgatttccggccttggcggctctctgggacttatggtgtgggctgcggtggctccgggaggcatcggctggcagatggcagcctatggggcttctggagccttatttggcctgtttgcatcattgctggtggtatatcgccgtatcggcgccgatatccgctccatgttgatctggatggcggtgaacttcgccttgccgttcgtggtcgg

SEQ ID NO: 274 - DNA, 2653 bp, Unknown
  R101_18m  MAG No. k141_65669
ccagcgggaatcgccgccgacggcgcgattcagcttgaacgaatctccatggcgttcatgcaaaggtggcatgatggcgggtatgagtagcttggtgcgtattgtcaatgccggtgttccggggtctcaggaccgcgtggatgtggtgcttcgcgatgggggtgttgcgtctgtcggccctgctggaacggtctcggcttcggacggcacgatgcagactaaggcgcatacgacatcgttggcatacgcgacgaatgccattgcttctggcagcgtctcaatcccaacgtcggcctccgcacctgctgacgaaaccaccatcgacgccgacggcctgtgggttattcccggcctgtgggactgccacacgcacttcacgcaatgggctaagacgctgggccgactggacctcatcaatgcccgttccgccgccgaagcgatggacatgttgcgccgtcatctggatgagcgccgcgccgccggcacgcttgacccggatgccttcgtggtgggcatgcgattccgtcactcgctgtgggccgacgacgagcagcccacactggctgcaattgacgccgtgaccggcgaacagccggtggccctctccagcgcggacatgcactgcggatgggtgaactccgccgcggcccgcaggcttggcgtacatgtggacggatccggtctggtcggtgaactcgaatggttcaacgcctacaccgccttcgacaaggtgccgggcgctgctgaagagactgaccgtctgttgcgcgaggccgaacaggacgccgcaagcaagggcgtggtgggcatccgcgattatgaaatggccgaaaacatcgatacatggaccaatcgtttcgcggccggcattaacggtttgcgcgtggacgctggtgtataccccgagcggttgcaagccgccattgacgcgggttggcataccggcaacccactgccgggcagcgccgggctcggccatgtgggcgccatgaagctcatctcggacggatcgctcaacacccgctccgcctactgctccacgccgtattcgggcatcgagccgccgacgtatggcacgctgagctacacgccgcagcaaatcgaagactatatgcgcctagccaccgagcatggcttcgacatcgcctgccacgctattggcgacgaagcgaacaccattgcgctcaacgcagtcgccgccacgcacgcacatggatcgatcgagcacgcacagatgctcaaacccgtcgatatcccgcgtttcgccgagctggggctcgcggccagcatccagccgcagcacgccatggatgaccgcgacgtcatcacccgtttctgggccaacccggccggtatcccttatccgttcagggccctccacgacgccggtaccacgctgcgcatgggctcggatgcgcccgtggccccgctggacccgtggctggccatttccgccgccgtgttcggctccgaaagctctgaccgcgagccgttccagcccgagcagtgcctcgatgtgcgcacctcgctggcagcctcgaccgccactggccgtgaccgccttgcatccggcgacccggccgatatggtgttgttggacgccgacccatacgccgccgatactccggaagccatgcgcgctatgccgcaacacgtcgtaatgacattgctgtgcggggagcgtacgtattgatgcaagccatcggcatgaagtgaccagaggtccgtcttgatagccgcgttgcacggaaaacatgttgtgttttttgaattgagagttactaacgcttgattctccgtttcaaggggcggatttgagccgttccggaggtctatctccgtttcaaggggctggtcatgcgctcaatctcagataaaatcccattcacgccaacgtcattccgccgtttttgtgcctcgcctacttgagcaacagcccctcgaagcggagatagacctccggaaaacaagaaatccgcccctcgaagtgaagataggacacagcagacgccgcaatgcaaaaaacgccgtgtcagttgcccagttggggctgacacggcgtcttgctacgagcggcgggaaaatcagtacttcatgcccatggcctcgcgcacctggtcgagggtctcctcggcgatggcgttggcgcgcttgttgccgtcgtgcaggatgtcacgaatggaatccatgtccttggccagctcggcgcggcgctcgcggtgcggggccaggaactcgttgactgattcgatgacgtatgccttgagtgcgccggcaccggaatcaccgatctcctcggcgatgtccttcgggtcgcggccggtcaccagaccggcggtagtcagcagggcggagacctgcgggcgggcaaccgggtcgaaggtgatgcggcgctcggaatcggtcgggctcttcttgataagcttggcggtctcctcggcggtggcgcccagcatgagggagttgccgtacgacttgctcatcttgcggccgtcgagacccggaatctccggtgcctcagacagaatagcggccggctccgggaacaccgggttcttcttggcgtaacgctcgttgaaacggcgggcgatggtgcgcgtgatttccacgtgcggcaggttgtccttgccgatcggcacgacattggccttgc

SEQ ID NO: 275 - DNA, 42668 bp, Unknown
  R101_18m  MAG No. k141_68138
cccccacggcggcccatgccacgggatgccaccgcaccggcattccggctgcggcaccgggcatgcagcgtcacggccgcatgccgcgaggcatcacagcttcgcggcgaaccagcgcgtgatcgtcgtcggatgcgtgatcgcggtgcccaccacggcggcccacgcgccgcattccatcacgcggtgcagctggtcgggcgtgtggatgcgcccctcgcacagcaccggcatgtccgggaacgccttgaccatccgctcgagcagttcgaagtccgggccgtcggtcttgagacgctcaccggtgtagccggacagcgtggtggagatgatgtcggtgccggcctcgaccgcacgctcggcgtcggcgaaactgccgcagtcggccatcgtgatcacgccctcgtcgtgcagtgcgtgcacggtgtcggcgtagctcagaccgtccgggcgaggcctgccggtggcgtcgatcgccacgatgtcggcgcccgcggccgcgcagcaacgggcgtggcgcagcgtcggggtgatatagacgccctcgtcgccctccttccagatgccgatcaccggcaccttcacctgccccttgatggcagcgatgtcggcaagtccctgacagcggatgcccaccgcgccaccctccaccgcggccatggccatttgggccatcgtctcggggtggcgcagcggctcgcccggatacgcctggcagctgacgacaagcccgcccctgatcttttcgattacctgatgcatgatgcgcttcctttcctcatgccttgacattgcttcatatgggtgttgacgattgcgcgacgaattgccggagagcgccggctcggggtcctcccgaggggagtcccagcccggcggcggatcacgggcggccctgcgcgacatgcctgcgcacggccaccgcggcgccgatcagcggagcggcgccgcccagttcgccctccaccagcggcgcagacctgaccagctgcaatgcggaatcctcgaatcccgcgcgcagggcgttccaccacagggggccggccttgaccaccgacccggaaacgacgatgacgtccgggtcgatgagattgcccatgccgccgatgcactcgcccagcgcacgggcgctgtcctcgatcacgccgacggccaggggctccccagcggccgcgcgcgccgcaacctgggagccgtccgccaccggttcgccctcttcggcatcgcaacgggcgttgtagaggtccttcagccccgtgccggacgcgaccggctcgatgtgcccctcgagggtgccgcacgagcataggaatccgcggcccagcgcgctcggcacgtgccccgcgtggccggccacgccgtgcgcgccggtgaacagggcgccatccaccacgatcgcgccgccgatgccggtgcccacgccgatcgagagcaccacgcccctgccgcgtccggcgccgtacgtcgcctcgcccagaccgtgcgcgcccacgtcgccgatcatgtgcaccggcaggtcggtcacggccgcgaatgcgtcgtagatgcgctggccgcgccagccgggcaggatgtccgtggcggagacgatctcgccggtttcgctgtccggcacgcccgccgccgcgatgccgacgccggcgatcgccacgccctcggcctcggcgcgctcaagctggcggacggcgaaggcgacgatgcggttcttcaggtcctcgccgccgcgcgcggcctcggtcgggatttcgcagcgggccgtcacctcgggcctgccgtccgcgcccgcgtttgcgtttgcgggcaacgtcacgaatcccgaggcgaccttggtgccgccgatgtcgaaggcgaggtaggtgggcgccgcccccgcgctcatgcgacgaccgcctcgtggatgcgcgcgagatagtcgaggcgctcctcgaccgtcgcggccttgggcacgcacaccttggcgcccagatagtcgagcgggcgctcctgcgtcccggcggcgcgcacggcggccttgatggcggcggcgtccatgagcgaggtcggctcgtccgggttcatgggcaggtggccgtcgatccagccgtagccgtactgggtctcctccgggccggcgccggagaacatgaggccgctcagtacgccggccttcgcggcggcctccacgtgcgccacggcggtttcgggtgtgcgcccctccaccaccgagcgtccccagttgacggtgagcccgatgccggccgacccgcacagcgcgatctcgtcctcaatcggcaggaagcccttttccggcttctgcccctcgacgtacttgtcgcagtgctcgatgaccagcttggcgccggaccagtccagctgcgcgagggcctgcaacgaggcggtcatcgcgtcgcggctggcaatgcgcgtgggcgccgtgtggatttcgacgaacttgacgtcctggctgccccgccactgtgcaaagtcggcgagcgcgtcgcgcagctgcttgaagaacgccagagcgaaccggcgtccgtcctcgtccgggctggccagtccgaagttcgggtccttccatacgtgctgcatggtgcccggaatggcagtgaccgtattgttcttccaatgcctgggcagttggccggcaagccagatgcggtcggcggtttcggcaaggtcccccgggaaggggatctcggtgccgtcgatccagggctgaccgcccagcagatcgtaataggcttcctgggcttcgcgcccctgcggcaatgacgcgtacgcgccgacgacgaatgatggcatcgctttcctccttgaaatgcccgatgcgggttcgctgagcattcctatcgtactatcatcagacatctgatatctaatctgttaaaggcagattacttcggcgtgtcttctctcggcctgccgaccttagcatcatgcattcgcttactatgcttgcccccctggaggggaaccagaaattatcaacaaatagtgacatgggatgctaaccgcggccagccggtgaaatggcatgcgcttatacggtttcaccggctggcgcccgctacggcggagttttcgtatggccctgtacgatttcaccggctgacgggcgcccagccggagtttccgtatacggtcatacgatttcaccgtcttagccgcagccagccggtgaaatcgtatgtggactccgtgcggcaacaagtcagcgggcaagcggcacggccccgacaagccgcgcaatccgctcactaacggaacagcgagacgcccctgcgggccatgcagaatgcgttgccaagccacgtgtgcttggaattcggccacaccgcaccgagcctcggggcgttctggctcagccagatgctgggcacgcggccgtcggcgctgcgcgagcccagcaggttgaacccgtttttctcctgaagccagcccggatgctgcgtggcgatggccagtccctcctcgagcgtgagcggaatgcgctcgtcggagtcaatgagcttgcgggccacgtcgggctcgcggtttgtgtgtacttggtaccggtgcgcggttccacgacgatgtagaacggtccctcgggcggctcggagccgtcctgcggcaaaaagctcgcgatgtcgcgcggcggcatcgtggcgaaaccggccatgcggttgatcgacgtacgggaaatcagcgattcgggcgacaccagctcgcgcgtgggcgccagcaggatgcgctcgtcaaaatcggtatgctccagcgcctcgatcagcggacgggccagggagcggaacgccgcggcgctcacatccgccacgtccgggtaccccaatgccacgatgcggtccaactggcgctgcgcttccaccgacgccttcgacatgactcccagtgcagagcatcgcggcggggcggcgccgtgacgttccagccggttccggcgtcccgtcgcaccggcgatccggcccagcatacgggcacccggttcttcttgttccgcccgattcgtaagattgatggatacgtgtggccatttcgctacggctgcccgaacgtgaaatcaatccgtcaaacccagaaggttgttatgtccgaaaagttgaaagtcggcattctcggcgccaccggtatggtcggtcagcgttttatcacgctgcttgagaatcacccgtggttcgaggtggtcacccttgccgcttccgcgcacagcgccggcaagacgtatgccgaggcggtcggagaccgttggaagatggaaaccccgatgcccgaatacgtcaagaacatggtggtcgtcgatggcgacgatgccgagtccgtggcctctggcgttgatttcatgttctctgcggtaaacatgccgaaggaccagattcgcgccattgaagagcgttatgccaagaccgagaccccggtggtctccaacaacagcgctcaccgttggaccccggacgtgccgatggtggtgccggagatcaacccggagcacttcgaggtgatcgagcaccagcgcaagcgcctgggcaccactcgtggtttcatcgccgtcaagccgaactgctcgattcaggcctacacgccggcactggccgcatggaaggaattcgagccgcgtgaggtggttgtgagcacctatcaggcgatttccggcgcaggcaagaccttcaaggattggcctgagatggtgggcaacatcatcccgttcatctctggtgaagaagcgaagtccgagaaggaaccgctcaaggtgttcggccatgtggacgccgaaaagggcgagatcgtgccgttcgacggcgacctcaagatcacttcgcaatgcatccgcgtgcccgtgctcaacggtcacaccgccaccgtgttcctgaacttcggcaagaaggccaccaaggaagagcttatcgaccgtctggtgaactacacgtccaaggcttccgagctggagctgccgcacgcgccgaagcacttcatccagtacctcaccgaggatgaccgcccgcaggtcaagctcgacgtggactacgagggtggcatgggcgtttccatcggccgtctgcgtgaggattccatcttcgattggaagttcgtgggtctggcccacaacaccctgcgtggtgcagccggcggtgccctcgaatgcgccgaaatgctcaaggctctaggctacatcactaagaagtagttgaatctcgttaaaatcgcaaaagccctccgcaaggagggctttcatcgtattaggcgcggaattcgcggctcagcggccagtaccgccgtacaccacggcttcgatctggtcggcatcgagaccgtaggcagtgtgcagagccttgacggcgtcgttcagctggtcgagcggcacaagcgcggcgatacgaatctcggaagtggaaatcatcagcacgttgatgccctcatcgctcagggcctggaagaacttggcagccagaccggcgtgggtcttcatgccaacacccaccacggctaccttgccgacgttggtgttcacatcaaaggagtggtaacccagcacttcctgcttgtcgagcagcgtgttctgcacctgcttgacggccgattcgggcacggtgaaggagatgtctgcagtgccaacggatgcgccggcctgcacgatcatgtccacgttcacgtcggcggtggccagctcggtgaacaccttggctgccatacccggctcgttcggcacgccacgcacggtggccagcgcctcggaacgatcgtgggcaatgccggagatcaccggtgcctcggggcccaggtcagggaacaggtcgcccatggatttcgcttcttcttcagtcatgtcttgccttgtcttggttgaaattacttacgattattgttcgctgtagccgcgctcagtcgaggttcggcagcgtgcgcgggtcaatgccgtcaggcacaaccagcgtgccggggcgacgggagaacgaagagcgcacatgcagcggcatgttgaaacgctgagcgtactctacgcagcgcagtgccagcaccttggagccgcaggaggccatttccagaatggcttcgtagccgatggaaggaatacggcgggcggaaggcacgatgcgcggatcggcggtaaagatgccatccacgtcggtgtaaatctcgcagatgtcggcaccaagggccacagcgagtgccacggcggacgtgtccgaaccaccgcggccgagcgtggtggcgtcacccttggcgttgatgccctggaagccggcaacgatggcgatgtctcccaatgagagcgcgttcttcacgcggtccggtctcacggccttgatgtgggccgcgccgtaacgggtgtcggtgaagaagccggcctgctgaccggtgaaggagtgggcgcggctgccttcggcgtgaatggccatggccagcaggctcatggaaattcgctcgcctgcagtcatcagcatatccatctcgcgctcgggcgggttggagtcgatgctcagcgcctgatcgataaggtcatcggtggtatcgcccatggcggagaccaccacggccaccttattgcccttcttctccgtctccacaacgcgcttggccacacgtttgatcgaatcggtatcggcgaccgacgagccgccatacttctgcacgatgagagccactgctgtccttcgttcttctcttagggatttgtttggtcgatattctacgcaaacgcaacgattataagggctgtcgcgttcaccccgcgaccccgcgccggcatgcggacacgggtatggcctacgttgttcagcaaatattcaagttttcaccggtggttctttgagacagccgcatccatcctttgagattcgagcggttaactatcaattaccggcaaacgaaagcaaaccggcgaggtttccgcagaaccccataactgaataccttgtcatgggcgaaactttgggctacaaagtggaccgcatttcggtgattttgccggatgacacgtcgaagctcaagattgtgccgggtgaggaccatgtcaccttgatgacctgtacgccatacggcgtgaacacgcatcgactgcttatctccgggcaccgcgtggcaattccgatgccggcccccgagccgaatgacgtgcttgacgcgcgcaatatcgcccttggtgttggcctgggcatactggcggcaggactgttcattatctggttggcacgacggcacaaggccgcgcgcatcatccgccacggcgcattctggccgtggatgcgccgcaagggcgaaagcgccaatgatacgctggcctaggcctcacgccgaccggccagcgccctgcccagcgtgatttcgtcggcgtactccaagtcggagcccaccggcaggccgctggcaagtcgggtgaccttgacacctacgggtcgcaatagctgggtcaagtagctggtggtggcctcgccttcaatattcgggtcgagcgccataatgacttccttgacctcatcgccttctaagcgtttgagcagactgggaatacgcaggtcggcagggccaacgttggccattgggttgattgcgccgccgagcacatggtataggccgcggtattcgcgcgtgcgctcgatgctcatcacgtccttgggctcttcaaccacgcagatcaccgaacggtcgcgtctcgggtcggcgcataccgggcaggggctggattcgcacacgttgccgcaaatatcacagaagcggatcttggccttgacctcctcgatggcctcggccaaatcgcgcgcttcatcttcgggcgcggacagcatgtagaaggcgatacgctgcgcgcccttcggcccgatgccgggcagccgcccgaaagcgtcgatcagtcgctgtattgcgccgtcataagcaagtgccatgggtattcctcgttattcgtcctcattattcatccgagtgcttcttggcaggctggatgttcttggggttcttcggatcatctgccgcgaattgctcgacttttttgacctcgaatagctttttcagatcgtcaagattcatggccgtcgcctcgccgagcgactggtcgttcatcgagtattcgtcgtcctcggccgcgacttgcggttgcggctgcggctggctattccacgggtcggcattcggcgtcggctgtgcgggctgcggttgattccacgggtcatcgccggcagccggctgcggaaccgattggggctggttccacgggtcatcgcccgacatattgcccgacactgtctgaggaaccgaagaagccggagtctgggactgcggctgattccacgggtcgtctcctggctgcggagccgcctgagcatggttcccctgcggctgattccacggatcatcgtgaggagactgctgatatggctggttccacgggtcggcttcgaccggttgcagtgccagcgaggccgtagcctgagattgcggctgattccatggatcatcgcttgcgccggcaactgccgtagcgggagctgcggtggctggctgccccgtggactgtccagtgggtccagcggacgcaacggacgcagcgggtgcaacaggagcagccggagcggcccacggatcaacaccatcactgatgtccggaaccgcaacatgcttcttgtgatgctcttcgggcgcaggcgcagcagcgggctcgttaggtgcgaacccgtctgcagattgcggtgaagcgttgcttacggccggcttggcccaagggtcatcgtcactccaactcttcgccgccgtggatgcactggattggccggctcgatggctgtcgtccgtatcctcggcttggcctgttgcagtcggcttcggagctttcggctcgctccccatatgaatgcccagacccgcgcccaaactcgacgcggccaatccggccttggccatggcaatctgctgcttgaccttggccaattgctccgggctcatacgtttgacggattcgactcgctcgccattcgccgcgaccgcagaaggtgcaataaccgcattggcaccgaactcgttgcgcacggcatccaacaccacggacgccgccttcttaccgctgttgtccacggccaaggcgaaagcgtgctggctcagcgacttgtcgaacgtcatcgacaggcaaggcagactcttacggttgggaccgaattttacggtcggcaccttgtctcgtgacacatattcacgaatggtttccggcaaagcggcgacggctgcatcccacttctcgtcgatggaccgattatccgatgccgcaggcgaggtcaccggttgggccgggacggccggcgacgtggcgggagcaccccaggcattggcagcagcagttgctgcggcaggttgcgcagacggagagcccgcgggccggtcgctgactgggctgctgacagggccattgtctcccacagcggattcatgggaagcggtgctctgaggcgcggctgcttgctggttgcgtgcagcaccggagaatccaccatgtgaggctccggcaaacccgcctcgcgatgcgccggcaaaaccactggcacccgtaccggaagcggctgacgtagtcgaagtcgaagaagcagccgcaggcggcatgccagaagaagctggcgcgggagcggctgttgcaaagcctgattcactgccggccaacaatcgtgcggccagcagttccaagcgcatacgcggagaaatggctccggtcatggcacccaacgtagtgttgatgatgtctgccatggcggtcagtgcgcccagtcccagcgccttggcttggcggtgcagatcgtccatatcctcggcctcagccgtgtcggacagcacggattccgcacggtccccggccaacgtaagcaccagcagatcacgcacacgagccagcaggtcttcgacgaatcgtctcggatcgaatccgccgaccacgactttctggataacgccgtacagggcttcgccgttgtgattgattaccgcatccactgcctcaccgatcagcgcctccggtgtgaagccgagcagggctacagcggcatcatgggtgataacgccttcgaccgaaccaaccatcagctggtcaagcacagacagggtatctcgcatggagccgccaccggcgcgcatcgccagtttcagcacaccgggctcgggcttgatgccttccttgtcgcagatcgtctccaggtagggacccatgacttcctgcggcaccagacggaacggatagtggtgggtgcgcgaacggatggtgccgatcaccttgtctggttcggtggtggcgaagatgaacatcacatgttcaggcggctcttcaacgattttaagcagcgcattgaagccctgctgcgtgaccatgtgggcctcatcgagaatgaaaatcttatagcggtcgcgcgcaggggcgaaaccagcgcgttctcgcaattctcgagcatcatccacaccgttgtgcgaggccgcatcgatttcgaccacgtcgatggaacccggaccgccggtggccaggtccttgcagctttcgcattcgccgcaggggtgggaagtcgggcctttggcacagttgacgcaacgggccaggatacgcgcggagctggttttaccgcatcctcgcggccctgagaacagataggcatgcgtaagcttgccttcgtccaaggcgcgcatcagcgggaccgtgacttggtcctggccgatgaccccttcgaaggtgtccggacgatagcgacgatacagtgcaagtgccatagctactaacctacctttgccctcagaattaaccgataaaaagtcaagataaaccgggctcatagctgccgaatcgggaaaactctttatattccaacgacattcatctgacaacggttaccgcatttttattgttattaaccgctttctttgtattaacatagtgtcaataacggttgtagtcaggaggtacccatgagcgatatcctcgacaagaaacgccccacccgtggcgatgcccggcgcgacgccatcgtgcaagccgcgcgcaaggtgtgtctggaaaaaggcttctccaaaatcaccgtttccgacatcgcaagcgaagtcggtatgacgcgttcgctgttctaccactacttcgaagacaaggaagccgtagccgacgcagtactcgatgacgtcatcgacgaaatcctcaccacgttgaagcagtggaaccaagcgcgcgaaacaggcaacgtgaacaaggcattagacgacatcgtgcatgtgctccgttccctaatcgccgacgagagccccttctcaaaccgtatgatccaagatggcaacgccgaactgtatatcaagttcattgaccgcgcggcggaccgtattgccgactacattgcccagaccaccgtacgtgatttcgagcagatgcatggtctgccaatcaccaacgtccatgagacattcttcacgctaatcgtggggcttatctcgctggttcgctcgcatccgaacatcagcgaccgaaccatcaaagaggtcatggcgcagacgctgcatatcgaaagctatgtcgtctgaggtctgacggccattggctctggtaccgctctcccgcactcccctcagtccgcttcgcggccagctcgtccgcaattgcggacagcctacggctgactttcttctggttcgactatcgtcgaaccctcgcctacaaacatcccactgggctgtttgctttacggctcagcctaatgaggggagccaatataatcaggtcaggcgaactggccggttacggggtcgcgaccgtctcgggcgatggcgtcgagcacttcctgtcgggagtccacctcacgggcggctacggccggcggtaccagcacgcgtagcgcgcagtcctcggccactaccctgaatggcagatgcccgatgtattcgccgtccgccatcagcaccggtggctcgtcgccttctgcggctcgcgtgacttcgatctcgcgtatgcgcttccacccgaacacctttgaggcgagcagcttgccgttataggcgttcgagatggccaccgcacattcgccgaagttcggcacatgattcatccacaccaggtccaacagcccgtcggagaagcaggagtacggtgagacctcgatgccgccaccgatatgacgcgaattcgcaatcgtcagcaacggcgtgatgatgtctcgttcatccgtggtaccgtccgccagcgtggccttgacgtggtacccataacgcttcatatgcgtcagctccaccagcaccgccgcaaagtagcgcatggtgccggtcggcagatgcgaatgattcgcacggtcgttgatacttgcgtcaagaccacaggacagcatgcccgcatagtaccggtcaatcgggtgctcggcagacttgttctcccggtactcgtattccccgccggtggatgggttcacggcatagccaccatccaaagaggtcacgcgtcccatgtccacatcaatgtgtgatccgcgcacgatagcgccgacgataccttccactgcggtttcgatgcgattgaccggcagcttaagtccccgagcgaaatcgttgcccgagcccatggccacgatgcccagcggcttaccgccgcaacccacggcattggcaccgagtgcgatcatgccgtcgccgccgaccaccaccagatagtcgtactcgtgcgcgcgttcacgcgcctggttcagggaatcgtcgaaacttacgccggtgatgtcgatgacgtcgaagttatgggcacggccggcgtcctccagcagtcccaatactcgcgcatccaccttggcaccacggcccttatcggaagtgggattgcccaccatggccaccacgcgacggcgttctgtgcgttcactctcgctcatgctctcaccttaaccaaaggtccagaagcccgccagagcatcagtgcttacggtccattattgtgataattgtctccttccgtacaattcaccggtccggcccgagccatccgctccacggatgatgccaccggaaccatggtttccaccttgatggttaccaacacgtcttcatcccgcacggagcaggagcccagcgtgacgccattcgcttcagccatgtttgcagcaagcgcgcatggatcaccgatatccacatgccacagcgcatacgcggcgtcaaaggcgatgagatcggcgagggaacgcgctcgattctggcagatcatgaggttgcccacacttgccgccaccgcgagcgcaatgcccaccgccataaccagcatggctccggccatcgtgcccgatccctcctcataacgcattccctgcaccgcagttcctttctattgcggccgcccagccagcagccgaccagttattggcttatcgccgtagcgttgccggtgacccgcgttggagtgacatccagtgggccgggcagtaccgaacattcgaccatcacgctcgtcgattggccgttgtgggcaatgctgacgcggggatctccccctgcaacgtccgcagctatgctgcgcgcggatgattcgtcaccggtaaccacaaactcgcgtgcagccgccgtcgcggcaccttggcagtccatggaaacgatgaccacacgtcccattgccagtatcagcccggcgatggcgataacgctgggcaatacgatcgcgaattcggcggtggccgatcccgtgcataggtctggcggcagtctggcgagcctccaccggcatctcatggtcttcatggctgtcacccgactttcagagcctgtttgatgatgttggtcagcaacgtcttgatggcatccgacttcaggatggcgaccagcaccgccgcaaagcctgtagccgcaacgagtacgactgcgtattccgcagtggctgcgccttcttcgggctcagccatgagggcgcggatgcgtgcgtccatgaggcatagccgttctttcgccttggcgttcagcgtggccacacgagccttgctgtgcgcaaagatgccggcctgcccgtcgacgatgacggggataggggtattcattggcgttcctttcggtaaggaggggaagctgcgcagtggcttcgcaccttccccatgcgtatgtgagtggttggcccccgcgccgggttgacgcggggtgcataccactgtggactatcaacgcttcatgcaccaggaaaaatggggtatgtggttctagcttgccgagttatccacacctcgacgtgtcgtccaccacaaatgtggataaccaaacgcagccaagtacaataccgagcaatacaacaagattcagcctaagcgcactcagttcacgcctatattcacatcgtgaaggacgcaatcgccggaatgactcctaccagcacgaatgccggcagaaaacatagccctgtaggcgtcagtagctttaccgacagcttcgcggcattccgttcgatagcagcacgctcgtcacggtccagctgttcaatggcggattcgaggcgcacaccaggcatatcgccatgcgtccatgacgattccaaagccgattgcagcaggccaagatctcgttgcgtggtattcgtatttcccttggatggactatcagctggcgcaccctcatgctgaacagccatagcggcatgccacgcatcagcccagggaacccctctggtcagggagttcccgacctcgctcatgcgagcgccgcagtcgccgccgacggctttgcccaccatgtcaagcgcccggggaatcgaggagccctgacgcaaggacacctgcaacatacgcaatatgagtatggtccatgacgacccgcaatcatgcgctacggccggctcctcgcccggcaagcggctgtcatgacgagacagagccttatacagccaaccagcaatcgccgcacagcctgccgcggcgtgtacccacaccgtactcataatccgctgcctttcaacaatgcccgcatccatgccaagccggcagcataacaacatcctcccaatgtcaagcagaccacaccgcgtggcgatccaagcaagaacgccaatggtctagctcccagaagctcgcccaatgccacagtgacggccggaagcgcgctcagcagccccacagtggctttaggaacggcacatgcttgcgatcgcaagttctgcatcagcctcatctgccggtaagcagtcaataccgcttccagacatggcaccgcttggcaaccgagctcatcgctcaaaaccgctgcggcggcgaccccgcgtgcagcttcaagtacctgcgctggtgattcgtcgggcagacgccgctgttcgaacaccgttatgagccgttccacagtaatgcgatgagtggcgaagcgtctgctggattgttcctcgaatgcttcaaccaatgtgccgccacctcgcaatcgcgcgatggcggacgtaatcacctgcgcaacgcccacgcgaggtgagtcggcatatcgaggttcgtttatggctgcggaatcgaccgcgcgcccgcggtaagccagccggtacagcctcccggacttgttccccggccatatcagcacggcgagcgccaccagaacagcacaccacatcatcacccaccaccactcggcctgggaacgatgccccatcgttcaatgaagtgcccccattcggcggcataccgaggaggatggcagccattccataccgccagcggtgttcctgccagttcaccatgtgctacgcgcagttcgccgatctgcgtgatacgccgctgtccgttcactcgctccaaatgcaccaccgcgtcgaaagcgcctgccgccagcatggtcaacgcctgtggactgactccggcgagtaatccaagcgaaatcagcctggacggtactcggttcacgccgtccgcatgcacggtggtcatgccaccgtgatgaccagaattgaacgcgcgcaataggtcgacgatttccgcgccacggcattcgcccagcaccacgcggtcggggcgcattcgcaacgtcgctttgaccaagtccgccaggcttatggctccgacgccctccacattcgcctcgcgtgttaccaacgagacatgatcgtcgcgtcccagttcccccagttcacgaacttcctctacggtgacgatgcgctcgttcacgtcgcattgcgccagcagcgccttgagcaaggtggtcttgcccacgcctgttccgccggtaatcagcactgtggcatgtttgcgcaccaatcccacgaacgtcggcagccaagcagccgggaatacgcctaatttgctcaggtgctgtagcgatgccatggttcggtcagggaatcgtatggaaatcgcggcaccttgtggcaccaatggggcaatcaccgcatgcacgcggatgccatccggactggcggcatccgctatcgggcaggcatcatccagtctgcgcccgagctgcgcgcacagttggacggcgtattctcgaactacttgcggcgagcggaacggcacatgcaatactgtttcgcgcatgccattgccgcggtccgcccaaacgcggccatcacaggtcaccgccaaatcggtaacctgcgggtcagatgccacgtcatccagcagaccgaagaatatggttctgagcgctgtgccagcctcattggctcgcgtgctgacggcagccatagcatcactggtccttgtgagaagctcccgaaaccgggcgaatggcctgttctacgagatcggcaagcaagttcatggctttgcgactgcctttggtcaccgatctgatgccgaggccttccagtacgtctccgcacagattgacacttggcttgatgggccccaataccgtggcagtcaaatagtcctgcgcctcgccaatacccacgtggcctctcccacgtggagcgccacgtggttccacacctacgatatgtggcgcttcacagccccatgaatccaatctggaccggtgcgacttggctctggccagccccattaccgacaattccgcggcaatcacctgcaggccactgcgcagatcgggtacggtctcaatgagtccaccctgaccggcatctacgatgacaacgtcgttcgtttccgccaaagcccgaatggccgcttgaacttcccaccagtcaggctggcgcgcgctccaagggtcatagggaagtactcgcacaccctcccacatcatcagctcatggttcatcgcctcaccctcgatacggccgaggggcgcgtcgacttggctgaaccgcaagcccggctctcgttctacaccaagcagcaggtcaaggcatccggccacgaaatcagcgtctatgagaacgcagctgtgttcacgtctcgccaatgtccatgcaagcatggaagccatgacgctcaaccccacgcctccatgacctgacgtcatcgttacaatgttatggaagctggtgtctgtagttagggcgagtgccggagcctcgcccgatctctgccgttcgcatgaggccaacggcctgggcggcggagtgtagtagcgatacgctggaattggcgcatcgtccgtgggcagcggaatgcccggaggtgctaccgctggcgaggtgatcctacgcgccacgcggggtgtggtgttgctattcataagccgattgaaacgtgtccgagttcaatgctcaacacgaatcgaccattgtggttctagcttgctgagttatccacaccccggcatgtcgtccacgacaaatgtggataaccacgctgctgtttcacgcccatctcatgcagaaaaggccctgacctcacatgcacagtcagggccttcattttcacgacgattccttatgcggtaatctacatttcttgcttacttatcgaggttcttaatgccgtcttccatagcatccaactgagcatcggtcaccttggccggcttcttcttgccgaacttggccttgagcagaccgatgatggtcggggcgagcgagaccagcagaatcagcacgatcaccagctcgaagtggtcctgtactgccggaatgttaccgaagaagtagcccagcagcgtgaacaacgtggaccagcacaggccgccgagcactgagaacggcgtgaaacggctccaacgcataccggaaataccggagatgaacggcatgaacgtacgaatgaacgggaagaaacggcccaggaacacggccagcgggccccacttctcaatcatgtgctcggttttggccaaacgctccggggtcaaggccttcaccttgccggactggatgatgcgacggccgaagaaatgaccaatgaagtaattgcactggtcgccgataatcggggcgcaccagaccaccggcagcagccagaacagcggcagcgcggccttgccggtcgcggcatcgggagcggcgaacacaccggcggcgaacagcagggagtcgcccggcaggaatgggaagaacaccacacccgtttcgataaatacgatgaggaagatgaagccgagggtcggcgccacgcccatggcaatccaaccggcaatcgcggcacgcggatccttcagcagttcgaggatgaaattaacgaagcccatgtgtttcctatgagtcctaaatcttgtattgagctgccagcccaatgaaccagacattcgtctgaaaaccgtcaaccactctaccagtcgccccgatacaagagggggccaccggaacctcatagcagccattactgccatcttctttacaaatatggcgtgcttcgctggtatatcgtcaacacattccaccgctcatgaggagaactgcatgcgcggtgatgtaatcaattactcaccaagacgctggcgcacgaaaccgtccagcgcggccgcatcgataccgtcatacgattcgatggacgcgaactggcccaggccggaagtatccgtgcgaatccagccagtctgcgcgatcagagtcgcgcccgatgccgcaccggcctgaagtccaaccgaggaatcctcgagcaccacgcacttggccatgtcttcacgggcgatgccaagcttgtcggctgcggccagatagggcgcagggttcggcttgtgttcgtacggatcgtcgccacagacgtagccggcgaacagtccctcggactgcttcatgatgttctccgccatacggcgcggcgacgtggtgaccagcatggacggaatgccggcctccttgagcgagtgcagcacgtccaatacgccgggaatccacggcagacgttcgacctccgccttgaacacataatccttgagctgtttgtcgatttcgggaacgctcaatgtgcagccatgcgcaatcatgacctctgccacgtatggcaccggagtgccggagcactcccaaccgaggtcctcgttccactcgccgccattgttgtgcgcgatctcgatttcaccgtcatgccaaagcggctccgaatcgataagcgttccgtccaaatcccaaaacacggccttgagcagcatggttacctccgtacgtcgcagtgaatcctcaactattcgtattcgatatacctatctcaccaactccgcacgacagccgaacagcaaatcaccaaccccacaggaccatggatttggaatcggcgggggtggagtcggattcgcgcgtggtgtcggcagcggtatcgcggccgggcagttcgcgggtttcgcggcggatggcgttgcgccagaggcgggcgcggttggagcgttgtacctccacgatattgccgtcacggcctgcggcgaaaacgctctcctggtcgccggtttgcatgcgtttgacttcgcggcgcagttggcgattctcttcttcgagggccaaaatgcgtgcgatgccggaaagattgatgccctcatcctgacttaggcgctgagctcgagtcaggcgggcgatgtcgcgcaggcagtagcggcgtgcgccgccatcggtgcgctgcggacggaccagacccagccggtcgtactggcggagggtctgggggtggatgttgcccagttcggctgcctggccgacggtgaagatgggcagttcgatgtcgaagccgacgtcatcggctccgtcgagatcggccctgcccatcaccagcgcggttgcgcacatcgcgtacaactgcttcatttggttggctaaccgcgccattgttcacctcctgattacaggctgagatagtcgccggctttttcgtcgaattctttggcggcgtgcttgacggccagacccggcttggcggggaccatgatctgcacgcggccgatcaggtcgcccggctggttgccgcgctggacgccaagtcccgcgagcttgacctcggcaccggagctggagcctgccggcaccttgaaggtgacgggattgccgtcgatatccttggcctcgaccttgccaccggccacggcctggcccacggtgacgggcaggtccatgacgatgtcgtggccgcgcatcgagaacgcggcatcgggcttgacggtgacgtgcaggtacaaatcgccggccttgccgccgttgatgcccggcttgcccttgccggccagcttgatcttctgaccgtccttgacgccggcgggcacatgagccttgaacttcttgccgtccacggacagggacacggtagcgcccttgaccgcctgacgcagggtcaggctgatcttggagttgcggtcctcgccgttttcggggcgcggggcctcctcatagccgtagccaccggcattgccgtacggcgattggccgtagccgccatacgactggccgccctgacctgcagcaccgccgaacatcgagaagatgtcgttgatgttgttggggccgccgcccgaagtggagaagcggatacgcgaaccgttgccaccggcaccctggccaaacatggagccgaagatatcagagaaaccggaagcgtcgaagccgccggcgccggaaccgcctgcgaagcgggcgccgcccatgccgaactggcgaatcgcgtcgtacttttggcgatcttccttcttgctcagcacgtcgtaggcttcggagatgtccttgaacttctcctcggcttccttggtcttgttgacgtcagggtggtacttgcgggcgagcttgcggtacgcctttttgatgtcgtcgtccgaagcgtccttggagacaccaaggactttgtagaagtctttactgagccattcgttttcagccattcatgtctcctttcttgaaaagtctttatggttggctcccgctggatgaacagcccagtgggctgttcatagcagtgcgcaattgcgcacgtcgcataaaacatcgggagctgtcgaacgaagcgagactgagggtggtttatattcagtgtttgaccaccctcagtcagccttcggctgccagctcccgccagcgggagccaaggtaatgtcagctcgttaacgagctggccgttatcagttttgcggggaggctactactactcgggcggcgcggattacgcggtcgccgatacggtagccggcttccaccacggtgtcgacggtttccttgtcggcatcggcatccggcttgtgcaggattgcctcatgcttggtggggtcgaagtcctcgcccttttcgccgaacttctcgacgccgaacttctcgaaagccttgtcgatcttggcggcaacggccttgaacgagtcgtccatctcgctgtgttcgcgaatgcggtcgatgtcgtcgagggcgggcagcagcgcggtcagcacgtcgatgatgccgtgctggcggaagcgctcctgctccttctgcgtgcgattgcggtagttgatgaactccgcacgttcgcgttgcagggcttcgaggtagtctgcggcttccttcttggccttgccgaggggggtgagggtgtcttcggaatcggactggccttcgccggtcttctctccggcatccgacttctctccctcagctgcggcaggagccgcgtcggctccttcattggaaggagcctgggcagccgaatcctgcgcagagtcggactcggcggaggcgtcagcccctgaagaggcctgagcggcctggccggcagcctcagcatctgagggatccggcaggtcgttcaggtagtcgtccttgttgaactcggacatcacttgttgtccttgtcgtcatcgtcgtccacgacctcggcctcgacggtgtcgtcgtcggaaccggaggcggagccagcggaagcgccggcaccgtcagcgccagccgcaccggcaccagccgcggcaccctcagcaccctgctgggcgtagaggacctggccgatcttctgggcggcggtcatcagctcggtctgagcggtcttgaccttctcggtgtcgtcacccttcagggcttccttcagagcgttgaccttgtcggtgacttccttgacgatgtcgtcggagagcttgtccttgttgtcgttgacgagcttctcggtggagtaggcgaaggcctcagcctggttgcgggtctcggcgtcttccttgcgctgcttatcctcagcctcgtgagcctcggcttccttgaccatgcggtcgatctcgtccttcggcaggccggaaccaccggtgatggtcatggactgctccttgccggtgcccttgtccttagcggacacgtgcacgatgccgttggcgtcgatgtcgaaggtgacctcgatctgcgggacgccacgcggagccggagcgatgccggtcagctcgaaggtgcccagcggcttgttgtcgcgagcgaactcacgttcaccctggtagacctgaatcagcacggacggctggttgtcttcagcggtggagaagacctcggagcgcttggtcgggatggcggtgttgcgatcgatgagcttggtcatgatgccacccttggtctcgataccgagggacagaggggtcacgtcgataagcaggacgtccttacggtcgcccttgatgacgccggactgcacggcggcaccgacagccacaacctcatccgggttcacggactggttcgcttccttaccaccggtgagttccttgaccaggtccttgacggcgggcatacgagtggaaccaccgacgagcaccacgtggtcgatgtcgctcacggagatgccggcgtcgtgcagcacgttgttgaacggcgtgcggcagcggcccagcaggtcggaggtcatttcctcgaagtgcgcgcgggtcagggtctcgtccaggtgcaccggggtgccgtcgggggtcatggccaggtactgcatggagatgctggtggaggtggaggaggagagttccttcttcgcctgctcggcggcttccttcaggcgctgcagcgcaatcttgtccttggacaggtcgacgccgtacttgttcttgacttcggaaaccagccaatcgatgatcttctgatcccagtcatcgccaccgaggtggttgtcgccgttggtggcctgaacctgaatggtggagaagccgtcgtcatccttgccaatctccagcagggagacatcgaaagtgccgccgccgaggtcgaagaccaggatgcgctcgtcttccttgcccttctcaaggccgtaggccagagcggctgcggtcggctcgttgatgatacgcaggacgttcaggccggcgatcttgccggcgtccttggtggcctgacgctgggcatcgttgaagtatgccgggcaggtgatgacggcgtcggtgacgggctcgccgaggtatgcctcggcgtctctcttcagcttcatcaggatctgcgcggaaatctcctgcggggtccacttcttgccgtcgatgtcgacggtccagtcggtgcccatgtggcgcttgacggaggagatggtgcggtcaacgttggtcacggcctgacgcttggccacttcgccgacgaggatctcgccggacttggagaaggccaccacggacggcgtggtgcgcgcgccttcagcgttgacgataacggtgggctcgccaccttcaagagttgcgatgcaggaattcgtggttcccagatcgataccaactgcgcgtgccataatgtgtgctcctttgtgggacttgcgattgcccggccggcgccgccgttcgccacgacctgttcgggttgtgacgcgcggtgtgcgcgagccgtctcgcacgtgttcgttctttcgttcttcgcccgggtttcggtcggttccttgtgcggttcctctcggttgtggggtttgcattcgcagccgcccattcccgtgcttccgaaacttgagcctacaccactcaactttaaaccgcaagtgcatattcccggattcggcaaaaaacttgagcgattctcactcaggtttctgcgaagcgcggcacacggcacgtatcgcgccacggccaaaagccgccggaaaaccatcgcccgccgggcatcggctcggcgggcgatcgttttccggcggctggacgactcgggattaccggtcggccaaggccgaatcagttgttcctggcgttacgcgcggccttgatgagcatcgcgatcgcaaccagcatcacagccgcgatggcgatggccatgacggcggtaccggtggcgcccagcgggccggagaccgcggaatcgttcggcaccttgcccgaagcgatcacgccgttcttgtcggcgcccggcttcttgtcggcggagccggcggccggcgcctggatggcgacggtcgcgaccttgccggactggcgaccggtgacggtgagcgtgtactcggcgccttccgacatcttgtcgagcgcgatcgaagtggtctgcgcgggcttgacgcgcacgccggacaacggggtgctggaatcggacttggacaccacggcgccgttcttgtccttcagctcgtagctgagcagcgcgtcgccgttgaagccgtcgacattggcgacgtagccggcctgcgtacgggcgaccttcacggtgccgtccttggagagcgcgttctgctcgtcgggggaggtggccaggcccagggcgccggcgatggtgtagaagttatcggtctgatcggtcaggccgatgacgcgctgggcgccggggccggaagcggcgatgcgcagctgggtgccggtgtgctccatgtcgccgccgttgtagccgccttcggcgtcggtggaggcttcctgggcggtgccgtaggagacgaccatgttgttgccgtcggcggacttgagcacagtggacagcgcgtaggccggctgggcgttgaggacctgggaggtgtgcgcatgatcggcggtgacgatcaccagcgtgttcgtgaggtccacgttcttgatggcgtaggcgatggcctggtcgaagtcgtcggtctcgccgatctggccgcaggcgttggcgttgtggtcctgtttatcgatcgaagcgccttcgacctgcaggaggaagccgttcttctggccgttcgggttggcgttgagcagatcgagcgccttcttggtcatgtccttgagcgaggcgccacggttgccgagccaggcgtcattcggggtgcacacggtcgggttggcgtccttggccggatccttggcggtggccttggacgggttgaacttggtcggcatgttgccgtcgctcatcagggcgagcaccggctggccatccttgtactgcagggcgttcatcgcggccgggtcgttctcaacggtctggaagcccatgtccttggcctgctcccacacggtcttgcccttgtattcgccgccctgcacggtctggcggaaatacttggagccaccgccgatggtcacatcggcgcgggtgtcgagcagctgctcggagatggagccgatgccgccgttctccttgagctggttggcgaggcactgtttggaggcgttgttggaagtgccgtcggtcttgccctgcgggccgtagcaggcacgctcggtggagtgcgattccagcacggccggggtggcgtcctggatttccgcggtggacacgttgccggtggccttgccggcggccttggcaagctcgaagagattcagctgcgggttgccgtagatgtcgacatccacggcgttgttgtaggtcttggtaccggtcgcccatgcggaaccggacgcggaggaatcggtgacgggggtgagcttgcccgggttggggttggcgaccagcttgccggcggcatccttgccgacggcgctgtccttgctgccgtcgccgagcgagaaggtcgtgtactggccggtgcccgcctgcacgtcgtcaagcgcgccgggctgaccgaccgcgtccagaccatcgaagtggccgttggcgcctttcagatagtcgcgggcgacggtgatttccgaatcgcccatgccgtcgccgatgaacagcacgacgttcttcgcgctcttgttgccgatggcggcgatgcgctgcgccgcgccgtgcttggcgagctcggcgaccgacttgccgttggggctgtaggtgccgtttgcggcatcgacagcaaacgccggagcggcgagcgcgccgagcgtcgcgatggaggcgaccgccgcgacggcgctcttcaaagccttgtgattgcccattgttcttccttcttccatgcagtgtcatctgcgccgtccggcccgcacttctccggccgcacccgtttggccacgtccgtcgtcgtcatgccttccagcttcgcggaaccgttccgcacctgcattgcttggatctttcgattccggatttcacggtaggccccacaagccaacgtccggataccgccggaagaacgccgggtgaacattcttcgtcgaatcggccgaggcatcatcgccgcatgaaccggcaagccatacacgatccgcacctggcagtacatgttctcgaaaatccgccccgaattccccgaggcggcgttcgtcgccgaatgtgggccgaccgaacgaatcgatgcaggccggattcgacatggacttctacctcgactggcgctgggacggccccccaacgctctccccgcagtcgttcgtcgtgctcggataacccgctaattgcccaactcaccgaatgtattgcaatcgttgtcaatatgagttacggtaaagatagaacagctcggacattggtctgtcagattgccggaacctcaacgcagagcggccctcgaacagcaatgcaaacgactagcagtacccgatttgcaagcaaggagtcatcatgactgacgcgcacggcaacgacgcagcgaccagcaccggcaccatcgcagacaccaccaacgacgccgcttccggtgccccgcagcgcgcggaaagcgcggaacgactcgcccgtccgctggtcaagctggccaaagcatgcgggctttccacctcgttcatcgaccagctcggcacctacaccgaaatcagcgacgaggccttggtcgccgtgctcaaggccctcgatgtggacgcctccagcgacgaggccataaaacgttccatgaccgaacttgaggccgaaaacagcaaacgtttgctaccacccaccatcgtggccaccaccggcaagccgacaagcctgaccctgaattgcccgtcggacgcggacatcaccgtctccatcggactggaggacggcaccgcgtttggccactttgccctgctgccgaacctcaattccggcaagccggacttgaccatcgcccccgatttgccgatgggctaccacacactgaccgtcacggtggacgggcgcgagggcaaggcggccatcatcgccgcccccgcgcgcattcccgtgccggaggcggtcgccgagcaccagcggtggggctggatgacgcagatgtattccgtgcggtcccgcgaatcgtggggcatcggcgattacggcgacctgaagccgctgctggcggacgcggccgacaagtccaaggccgacttcatgctcatcaacccgattcacgccggcgcgccgattccgccgcttgagccatcgccgtatctaccggaatcgcgccgattcctcaacgtgacgtacatccgcccgcaggacatccccgaatacggcacgctgccggccgatatccgaacgcaggtggatgcgctgcatgattcagtggccgcacgcaacgacgaatcgaacccgatggacatcaacgcggcgtgggcagccaaacgcccggcgctgcgcctgatcttcgacgcgggccgcaacaacaagcgcgagctcgaattcgagcatttcaagaccaccgccggcccagacctcgattccttcgccacctggtgcctgtgcttcgaggtatggggcgcgccgtggggcgagaaccgttggttcttcgagaagaccatcgacgacccggccgtgcgccagctcgtcgaggagcaccacgacctgttcgagttcaaccgctggctgcagtggattgccgccgagcaggtgaacgccgcgcagcaggaggcgctggaccacggcatgacactgggtctgatgcaagacatggccgtgggcgtgcacgggctcggcgcggatgcctgggccaatccggaacgcttcgcctccggcggcgtcacggtcggctgcccgccggacttctataaccagcagggccaggattggggccagccaccgttcaacccgcgctacctggaggccaccggctaccaggtgtaccgcgagatggtgcattcgatgtacgagcacgcgggcgcggtgcgcatcgaccatgtgctgggcctgttccgcctgtggtggattccgcaggggctcggcgccctcaacggcgcatacgtgacgtacaaccacgaggcgatgctgggagtactggccatcgaggccacgcgcgccggaggcatggtggttggcgaggatctgggcaccgtaccggattacgtgcgccgcattctgtccgatcacggcgtgctcggcactgacgtggaatggttcaaccgcgtggacgattcgccgaacgccggcgacccgtaccgtgcacccaaggactatcgcaaacaggcattggcctcggtgaccacgcacgatctgccacccaccgccggctacctgaacttcgaacacgtcaagctgcgcgaggagctgcatctcctgagcgagccggtggaggcgttcgccgcctcggcgatggccgaacgcacggccatgatgaaccgtctggtggagaacggctatatctcgcagaccgtggcggatgatgtggaaggccatgtgcaggagatcgtggaggcgatgcacgccatgctcaccgatacgccgtcgctgctgctgcaggcagcgttggtggacggcgtgggcgaatgccgttcccagaatcagccgggcacttccagcgagtattcgaactggcgcgtgccgctggcggacagctcaggccacgtggtgcataccgacgaggtcttcgacctgccacgcgtgcagtccctagccgccgtgatgcgccgagagaagcggtgatcgattccgcaatgggaaattggtctaaatcggcttcgaggggctgatttggcctttcccggacatccacttccgcttcaaggggctggcgcccaagtagacccagcgcgagaacggcggaatgacgttggcacaaagtcgtttgcacttgtggtttcaccggcaaggagccccttgaaacggaagtagatgtccggaatgccctaaatcagcccctcgtaatcgagatagccgaagacggcgacttgttatgggcatgttatcgttgtcatgacaatgattgttcgcgacggcgaaggagcgacggcatatgaccaaggcaagcattcaggcagtggcccgcgaggccggcgtttccgtatccacggtgtcccggaccttcgccaagccggatctggtgcttcccgagactcgagaccgagtgatggccgcggccgaaaagctcgactactcagtctcacgctcggccgccgccctaaaatccggccaatcgttccgtatcgcactacttgccagcgagaccatcgccagttggttcaattcgaacatcttcgccggtcttgactcggcgctgcgcccctccggctacgacactgtgccctaccccatgcgcaacgccgccgagcgccacgacttctttgcggatttgcccgtgcggcgcaatgcggatgcggtgattgtcagctccttcgacatcgaaccggctgaagtggagcgactgaagcatatgcacgtgccgattgtcggcatcaacatcccctccaccgatgggttcgacgcaggcgtgagcattgatgattacgccgccacacgttcggctatcgagcacctgattgcactcggccaccggcatatcgcgttcgtcggcagcgcaccgaccgaaaccaatatgcgctacagtaccgaggctcgtttgcagggcgtcattgatgccgctgccgcccatccggggatcgagctaacgcccctgagcattcaacgcggtcttggcgaaagcaacgcggcattgaacgccgtactgaacgtctcccccagcatcaccgccttctgttttgaggatgatgaaatggccgcgcccgtgctgtatcgcctgcgtcaatacgggcggcgggtacctcaggacatttccatcatcggcttcgacgattccaccctgtccgccgccgtgggactgaccacgctgcatcaggacccgttcgcaatgggcgcgactgccgggcacatggtattggatgccattgccggcaagtcaatcgaaccggcattcgtacggccggacactccgctaatactgcgcgaaaccaccgcgccgcctgccgcgacagcagcgcccgcgcaggcgtgagcacgttaccaccgcaaaacgccgataaatcgatttttgcatgcgtaattcacatgatatcgttgtcatcatcaatacaacggtcgggccttcacacagcagttcgggcgcgaccggaacaacccaaccacaacgcacccggaacaggagggaatcggcatgaccgcaaataacctcaatgacgactggtggaagcaggccgtcgtttaccagatttacccgcgcagcttcaaggacgttaacggcgacggcatcggcgacatcgccggcgtcaccgagaagatggactacctgaagagcctcggcgtggacgccatctggctttccccgttctacccctccgacctagcggacggcggctacgacgtaatcgactaccgcaacgtcgacccgcgcctaggcaccatggaagacttcgacgcgatggccaaggccgcgcacgaggccggcatcaaggtgatcgtggacatcgtgcccaaccacaccgctgacaagcacgtgttcttccaggaggccctcgccgccgagcctggctccccggcgcgcgaccgctacatcttccgcgacggccgcggcgagcatggcgaactgcccccgaacgactggcaatccttcttcggcggcccggcctgggcgcgcgtggccgacggccagtggtatctgcacctgttcgataaggcgcagccggacgtcaactggaagaatccggatatccacgaggagttcaagaagaccctgcgtttctggtccgaccacggcaccgacggcttccgcatcgacgtggcgcacggcctggccaaggacctcgaatccaagccgttggaagagctcggccgcgaatacagcgtggtcggcgtgctgaatcatgacttcagccacccgctgttcgaccgtcgcgaggtgcacgatatctaccgcgaatggcgcaaggtgttcaacgagtacaacccgccgcgctttgccgtggccgaggcgtgggtggtgcccgagcaccagcacctgtacgcttcgatggacgagctgggccagtccttcaacttcgacttcgcgcaagccaactggtatgccgacgagttccgcgaggccatcgccgccggactcaaggcggcggccgaaaccggcggttccaccaccacgtgggtcatgaacaatcacgacgtgccgcgcagcccctcccgttacggcctgccgcagatcaagggcgcgccctaccaccagctgccgcacgactggctgctgcgcaacggcactacctatcccgaggatcgcgagcttggcactcgccgcgcccgcgccgccgctttgatggagctcggcctgcccggcgccgcctatatctatcagggcgaggagctgggcctgtttgaggtggccgatattccgtgggatcacttggaggatccgaccgctttccacactgctcaggccacgatggacaagggccgcgacggctgccgcgtgccgctgccgtggaccgccgccgatgagccggccttggccgacttcagccgtccgactccggccgatgacggtaccggcgagaaccatgtgccgctgtgcgccgccggccagttcggcacgggcgcttccttcggcttctcgccggctacgcgcgctgagggcgtgacgccggccgccgacccgcacctgccgcaaccgctgtggttcaaggattacgcggtggacgtggagcaagccgacccggactcgatgctcgcgctgtatcgcgccgcactggcgattcgccaggagtcgctgaccgccacgcgcgacaccacggccgagcaggtggacatgggcgacgatgtggtggcgtacacccgcgcggcggttggcgggcgggtgttcacctcaatcaccaacttcggcaatgccccggtcgcgctgcccgatggctccgtggtgctggcgtccggcccgctgacccccgaaggccagctccccaccgacacttctgcgtgggttattcagtagagcttttgcgagcttacccgacgccagtcatccatcttctccggatgctggcgtcgtcctttttcccggctaagctgtctccatttcggggatgactgccctttctttccattcgcgacatgccaaccccgaaatacttaataatattctatatacttaacaagagatgtgaatcttacagattttcgttaaggattgaggtcgacatggatgccgagcattacattcgcgagacacttggtctgccctgccaaatcacttcttgggatggcactgcctcactgccgctatttctgaccaacggacggacattcagcaaactcaccatcgacaacacgagcatgctaatcgcgagcggagaggctcacccattcagcatcacacgcgtcaccgccgacgccagcaggcttgagcagcggacggatctgcccattgtctttcagtttccccggctttctgcataccagcgaaaagccttgattcagaatcacgttcctttcatcgtgcccggtacccaactgtatatcccttcactgggcatggtgttcacccagcgcatctcctcacggccgctggagaacgcacaggatatcgaggtgcgacccttctcccccgcaacacagctggtctggctgtatttgctctactccaacgagagcaaagtccaatcagatattgcccgagcgcttcagtttaccgaagctcaggtcagcgttgccgtgacgctgttagaacagctggcattcgtgcaccgcaccaagcaaggccgcagcaatagcgtcgaactactgacttcaaggcagaccagccgacttgatttactgaaatcatcttggcatctcctgaagtcaccaatattcagcaaatataccgtcacgaatcgcaatcgccagatgattgccgacgagctgattccggccggcgaatttgctctttcgcgcaggacgcaactggccaccccaaaactgcgaatctatgccgttgaacgtcattggctcaagcagcacaacaaggaactatgcattatcgaccccgctttggaaaaggtgccagataatgcatatattctggagctgtggaggtacgatccccgcctacttgctcaatatacgcaggaagactaccttgccgaccccatttccacggccttgactcttggcgagattgccgacgaacgtttggaagacgccatacaagaatccatccgcaatactttctcaggagcgacaatatgacacaaggcttgcagctcatcagaacggcctttgccggctacgaggattcttacgtaatcatcggcggcaccgcttgtgacatcatcatgaccgacaacgacctggacttccgagccaccaaagatattgacatggtgctgattgccgagggacatcttcgcgagtttgcacaacgattgtggtctttcattcgcgatggcggatacacctctatcacgaagaactccgcacagcctcacctgtaccgtttcatgcaccccagtacgtacgggtatcccactatgatcgagctattttcacgtcaccctgacttccctattgtgccgaactcgttcctgacgccattgcatattgcaaacgacgtttccagcctgtcagccatcatgctgaacgacagctactatcggctactgcagcaaggccgcgaatcaatacaaggcatcagcgtgcttaacgagaaatatctcattcctttcaaggcgaaagcatggttggatctcaacgcccgagaacaacatggcgagcacgtagacggaaaagatctcaagaagcataaatatgatgtattccgtttggctcaactacttgctccagaggatcgcgtgtctctcaacgacgaggcctaccatgatctcgctgattttcttgggaaatatcccatgaaacgcttccgatgaagcagctcggcatacggggaacacagcaaggcatcattgatttgatagccggcgtatatcaactgtctatcccaccacgcgatgaactgcccaccacgcgatgaatcttctaccacgatgtcagcgtaattttgtattccgcggaataaagccgttttgcgtcaccacgtggtgggtagtttgctacgtcgtggggattttactacgtggtggaggtttgactatatggtgggaccatgcgaaaggccgccgttccgaatgaatcggagcggcggccttttggtacgtgctgggtactctcctcaggcgcttatgcgccagcgggagctacaggggctcactgaacctgggcgcgggcgatcttgccggtgaaggagttggcctcgtcggcatccttgacgccatccttgttccaggagaacatggcgcgcagcttcgggccgacggtctcgatgcgctcgttggagtacttctcctgcagttccttgaagtgcggggcgccggcatcctgatcgtcgatgaactccttggcgaaggagccgtcctggatgcgctgcaggtggtattccatgcgcttgcggcagtcctcgttgatgacggtgttgacgtagtcgccgtactgggcggtgtcggagcaggaccaacgagccttgttcaggccgccctcgttcatcagatcgacgagcatcttgagctcgtggcagacctcgaagtaggcgatctccggctggtagccggcgtcggtcaggacttcgaagcccatctcgacgagcttgttcacgccacccatgagcacgttctgctcgccgaagagatcggtctcggtctcttccttgaaggtggtcttgatggcaccggcgcgcagagcaccgagggccttggcgtaagccagggtcagagcccaaccatcgccacgcggatcctgctcgacggccacgacgaccggcacgccacggccagcggcgtactcacgacgaacgatgtgacccgggcccttcggggcaaccatgaacaccgggtgatcctcagtgggcttgatgtagccgtagtgaatgttgaagccgtgagcgaaggcgacggcggcacccggcttgatgttgggctcgatgtcgttggcccagatggtgcgctggtactggtcgggggccaggatcatgatcacgtcggcctcggcggaagcctcggccacggacttgacctcgaggccctgctccttggcgaagtcgaccgacttggaggtcggacgcaggccgacgaccacgtcgacaccggaatcgcgaaggttcagcgcgtgggcgtggccctgagagccgtagccgatgattgcgaccttcttgccttcgaggacggaaagatcaccgtcgttctcataccagatctgtgctgccattattggcactccttttcagtagtggggtgtggcgccgctgggcgccggggtatctacggtgtgcagataagtcctgtgttgcgaggattgtgtccttcaaaccgaaatcaatcctaccgagaacgccgtcacagccccgctggagtccacaacgtgagctaggtcactattggagtatggacagccgtgtgcagagaacgattctcgataacaactctgcacccttttgaacagaatcgcacaatcccacatatggggaaaggctgagatatcaacgatcttgcatattcggtgttcgtttgcctgcaagaaatcagcgcacagttgttattgagaatgattcgctgcgcgcaacaacacaaaaccgccgctcccgtatgggcgggaacggcggtttgctagcttaaatccccttcaggggcggcaatcactgaacctgggtacgagcgatcttgccgttgaaggactcggcctcgtccttgtccttggcctcggcgttgttccaggagaacatggcgcgcagcttcgggccgacggtctcgaggtgcgggtgagagtactcttcctgcagcttcttgaacttcggggcgccagcggcctggtcgtccatgaactccttggcgaaggagccgtcctgaatgcgcttgagctggtactgcatgcgcttcttggtctcctcggtgatgacggtggaggtgtagtcgccgtactgagcggtgtcggagcaggaccagcgagccttgttcaggccaccctcgttagccaggtcgaccagcatcttcagctcgtggaagacctcgaagtaagcgatctccggctggtagccagcctcggtcagcacgtcgaaaccgaggtcgcacaggtggttgatgccacccatgaggacgtcctgctcaccgaacagatcggtctcggtctcctcggtgaaggtggtcttgatggcacctgcacgcagagcgcccagagccttggcgtaagccaggcacagcggccaggtcttgccgtccgggtcctgctcgacggcaacgacgaccgggacgccacggccagcggcgtactcacgacgaacgatgtggcccgggcccttcggggcaaccatgaacaccgggtgatcctcggacggcttgatgtagccgtagtggatgttgaagccgtgggcgaaggccagggcagcgcccggcttcaggttcggctcaacttcttccttgtagaccttggcctggtactggtcaggcagaaggatcatcacaacgtcagcctcggcgacggcctcgccaaccggcttgacctcgaggccctgctccttggcgaactcgacagacttggaggtcggacgcaggccgacgaccacgtcgacaccggagtcacgcaggttcagcgcgtgagcgtgaccctgagagccgtagcccaagatggcgaccttcttgccatcgaacacggacagatcggcgtccttctcgtaccagatagttgctgccatttttggcgctccttttatttatttgtttatgggggtgaaatctttaattgttattgtgctctgctggttctgcagaaactgtttttagttttggctttccttgtgggcttttccgatatgcaggtttagtcctgttgacccggaaaagccctgcagaggttcacttagtggaattgagatttttcacgttgtgaacttggcgatatttagttatggaggatttcacttggtaaagtcagcgtccttcgtctcgcggcaggtcaggaccgacaccaggcagcacacggccatcacggcgagatagaggcccacggagtgaacgccccaatgggagctcagccaagtggcgatggtcggcacgaacgccgcgccgacgatggcggccaggttgtagccgatgccggagccggagtagcgcacgttcgcctcgaacagttcaggcaggaacgcgccgatcgggccgaaggcgacgcccatcagggcaaagccgacgcacaggaacaccatgttggcgaagaagttcttctggccgaccagaccaccgtccagcaggaacgggaagagcacggcgaacacgacgagtgcgcaggaggagaaggtcagcacgcgcttgcggccgatcttgtccgcgtacaggcaggacagcacgatgaacagggcgaacacgcagatggagatcatgagcatgagcaggtattcctggttggtgaagccaaggccgccgccgccttcgccctgctccttggtgccccaagcgagggaccaggtggcgagcgtgtagaacagcgtgtaggtcacggccacgaggaaggtggcctgcagcacctgacgccaagacttgcggaagacctcggtcagcggggacttgacgaccttcttctgctcctgagccatacggaagatcggggtctcctccatgtgaacgcgaaccacgaggccgacgatcaccaggatggcggacagcaggaacggcacacgccagccccaagccagcatcgcgtcctgattgttgaaggattcgagcacgaagtaggtgccgttggacaggaagaagccgatcggggcaccgagctccgggaaggagccgtacagtgcgcgcttgtcttcaggcgcgttctcggtggcgaccagtgccgcgccggaccattcgccgcccaggccgatgccctggatgaagcgcagcaggcagaggatggcgactgcgccaacgccgacctgatcgtaggtgggcaggcagccaatcaggaaggtgccgacacccatggtcatcaggctgacgaccagcgtggtcttgcggcccatgcggtcaccgaagtggccgaagatcagcgagcccagcgggcgggcgatgaaggcgatggcgaaggtcagcaagctcatcagcagtgcgacggtggggttgtccttcgcggagaagaagatgtgcgggaagtagtttgccgcggcggtgccgtaggcgtagaagtcatagaattcgatggcggtaccgaccatcgatgcggcgatcacggtcttgaccgaatcgcgtaccaaggtagcggctttacctgccgcctgccctaagccagtctcttcgactgctgcagtcattgttactcctgttttgctctcgttcactctcattggcgggcgattatttcgtctcacagggaggttgttgttctgttgctgtgttgttgccgtgtactgtccgctaccgtttccgtctgcgggattctgccgtaagccttgtgagcgcaacaaaaaaagccccgcaacttgcagggccttaccgattgtgtcagcttgattggccctgccttcgttgacggggcttcaagcatcaatgccgaattagtccgccagcgaagacgggctaataattcgtgcggatacaaacgcagaagcattgaatccagtcatcgcgtggcctcctttcggtatttcctcaggccgttcgacctgaactgaaatgtaaacataggtttggctgtcttgccaatccagcaagggttcacattgtggacgccacgtcgccgagacgaacgcccccgccgcggggaggaacgccgccggcggccggggagccggatcggcccgtcattgcgcggactcggcggtgagggtgacgattccggccagcagcaccatgacgatggcggacgggaagagcaggtaatagccgaagctgtgctcgaaggcgttcaccagtagcgcgccgatgatggcggcgagcgccagaccggccgagttggcgagcgcataaatgccgaggtcgtggccggctcggcgcgggtcgggcaaagagtccattaccagttcaaggcctaacgcatcgtagacgccgaaggcgaatccggagatcagcgcgaagagcagcatgccgttttcgcgtgccgtgccggtggaccagacgccgagcccccatgccaccgccacgccgatggcatacagcaggcaggatgccgccaccactgcagtggtggcgatgttccgttcctcgatcttctcggagatcggcccagcggcccaggacgcgagcgcagcaccgatgagcgttgccgcggccatgccggcgatgaggaggcccgcgggaatggtcaatggcgcggaagtgaacaccacagccttgccatacacccaaaagcgcacgagataccacagaaagaccccggtcagcccaacgcccgtcatcatgcacacgcgagcggcgaacacacgggcgaatgcaggcgcatgtgccggcggacgcagctggtcaaacacctggctcgactcgaatcgttgatgtggctgctcctggctggaaggctccttgggcagcatgatcacggtcaggatgccggaaaccgcaaacagcacggcggtgtaggcaaacggcgtgaaggagtcgaacatcacgccgagcgcacccatgcatacaccaagcgcttggccaagcatcacgccgataccgtgccagcgctcaatgcgcggacggaatttgtccggaacccgttcgctgatggcgctggccaacggcacggaaatcatcgcataggcaaactgcatgagcgcccagaagaaacacagcactacgaggcctgtgttccgccccagaaccagcgtgatcagcgcgcacagcacgccacccgccaccatccacggggtacggcggcccagaggaatacgtgtgcggtcggacagcgcggagaccaagggcatcgcgaacatggaggccaccacgccaacgactaccagcacggccagaggcaccaccaagtcagtggcgacgggcagcggacggccggtggacggattgatggtgaccgatatggcagaagcggtgtcgtagtcgaacaatcgcgccacggcgttgggcatggcgatggtgttcaacgccgcccaaggcgcgccgaccagaatcgaagccacgaaaaagccccaattaagacgggaaatctgaacagcggtgggtcgctgaccattggcggcgaccatcggatcgcgcatatcgagatatgcagacgacagatcaggcgcaggggcatccacgctggccgcggcagcggcagcagccgacgaaccggcggccgccagacgcacggcctgggcctcgggctgatcggcggatgcctcgggaggacgccgacgatctttgatggccagtcgggccacggcatccttgtcttcgggactcaatgccttgtcgagatccgggcggtcgtcaatacccgggcgcacgtacggttccaacatgttgctgctctttctttgctctcatcaccggcgggaggtaccggccagctccgactgagcatgacccgcaaccccgccacatgcaaaaccgcccgagcgcactagcttcagtgcactgcgggcggtttgttttccatggacccagcttacgccggacgcactacttggagcgcgcacagcggagtggcgtttatgggccaacggttagtcgatatcggcaatcggcgggttgctcagcagatcatcagtctcgtggtcaccggcggcatcggtccaggcgaggctggcgaccggagtggtgttatccgtgccgagtccgcggccgggctcgaagatgagggcggccttggtcttgccgtcggcagcgatccagcggaaggtgatggatgtgtcgccgtcggcttcgtagctgaactcgccattgaatgcaggcagttcgttgcggaacttggccagggcgttcagggccttcaccaccgggcgctcgaggttttcgtcgatttcggcggtggagtagtaatggcgattgatgtcacggccgttgttggtcttgcgcagcagttccatgtcgttgcggccggcgagcgcgcccacgtagtagacctgcggcactccgggcaggaagaactggactgcgcgggcggccagatagtgctggtcgttgcagccgagcgcggagtagtacgtgctgttgacctgatagaggtcgaggttgctggcggcggcaccggtggcggcctgggattcgccgtgggtgttggcgtggatggtgttgaccagattatcgacgtcctcgtcgggcacgaggcccttgaggctgcggtcgagctgatcggagccgatgtcgatcacgccgatgccgtcgtgcgtatcgagcacggtgacggcgttgtccgggcggatttcggtccagtggaccacgggttccacgtgaccggtgaacagcgagtgcaggagcagcggcggcagggcgaagtcgtagacgcggtccaccttggaggcgatttcaacctgcttcttgtagtagctatgcacctcaatgagaatttcgaggcctcgcttgacgccttcctcgcgtaggcgggagatgagcttgaacgtcttcggagtcatgaagcagctggtgccggcctccttggcgccgtagcccacggcgtcgagacggatgtagctgacgtgggatgcggccatctgatcgaagatggacatgaggtattcccagcccttgtcggaatcggtgtcaatatcaacctgctgcggagtgaagctgacccagaccaggcgggtcttgccggcgaacttgtagtgggtgaacggcaggcccgggcgcgggcggtagatgccggccagttcctcttcggtggcgccgttcgggaagacggagctcatggtcagaaacatcgggtaatactcggattcctcacctttttcaagcacgtcttggaactgcttggattcccagctcatgtggttgacgatggcatcgaccatgatgccgtgggtcttggaaagttcagcgacgtcgtcccagctgccgagacgcgggtcgactttggtgtggtcgatcgggtc

SEQ ID NO: 276 - DNA, 6388 bp, Unknown
  R101_18m  MAG No. k141_68151
cgagcctcttcctcgctacaaatcgcgcccgctaaccggtgggcgcgcactatacctaagaacacagaggtgaatgacaatggctaagagcgccgacatccgtccgggcatcacgctggcctgcaccgagtgcaaggagcgtaactacattacgactaagaaccgtcgtaatacgcccgaccgtcttgagctcaagaagttctgcccgcgctgcggcaagcagaccgtgcaccgcgagactcgttgatcgcaagcatcacagctttacaaaacccggcccattcggccgggtttttgcgtattgactccagagccgagtggtagggtgcggaatcagtatccgcatcgcgtgagaaatggcagaaatcccgcgtctgaacgaacccctcgcgggcgttctgccgtttcagccgatgattgccccgatatcgcacctgcgccactaagataggaagtcatgacaagctttgcagacatcaccaccatgggcgtgggcggccccatcgcccatttcatcgagccgaccacgcgcgtggggctcatcgaagccgtggaggatgccgattccaaaggcctgcccttggtcgttatcggtggcggctccaacctgcttgtttccgataagccttttgacggcgtggtggttcgagacgcccgacgcctcatcactgtgccggacgaggctgcaccggtagagggcgaggatcgcaccgtgcatgtcaatgccgaggccggtgccaattgggatgatttcgtggccttcaccgtagagctcgggctcgagggcgtcgagggactgtccggcattcccggcacagtcggcgcttccgtggtgcagaacatcggtgcctacggacaggaagtcgccacttcggtcgaatcggtggaagtctgggatcgagacaccaaaacaacgcgcgacctcacacccgccgatcttcgattcggctatcgatactccgcactgaaggccagcatgtacgccggtcccggccagccggccgaccgattcttcccgacgccacgttacgtggtgctctccgtcacctttgccctgacccactcggccgaaggcacggtaggttacggacagcttgccaaagcgcttggcgtcgaagtgggcgaccgtatggccaccgccgacatccgcaaagccgtgctcgcagtacgtgccgccaagggcatgctcgaggaccctactcgctacgccttgcctgacatggccaccgccaagcgcgaggccaatatcctgaccgatctggagcgtctggcctccctcaatgaggccgccggcattcccgttggcgatgacggtctgcctgctcccgactacaatcgccacagctgcggctcgttctttatgaatccgattctgaccgccggccaagcggcggccctgcccgaagatgcgccgaagttcgacgcgactctgcctgacggcactcccggcaccaagacgtccgccgcctggctcatcgaccatgccggctgccataagggatataaggtcgatgcgtacgcgccggccagtctatccacgcagcacacgctggccttgaccaatcgtgggggagcgagcgcagccgatatcgcagctttggcgcgcgcggttcagcaggcggtcaagagcgcgttcggagtggacttggtgcccgaaccggtctgcgtcggcgtgctgtaatcgcgctattgatcgatggagtggggtattaatcccatatattgcgggctctaagtcttattaatagacaagacacgcgggctcttctatactcgattgtcggtattgtgcgcattcggtgcgcaaacaacagagaaaaagaagagcactatgcaactgttccgtacgaaatccgtcgaacagaccattgccgaaacgggtgaagagggccgcaagctcaagcgcaacctgacttggtgggatctgtcaatcatgggcgtggccgtagccgtgggcgccggcatcttctcggtgggcgcgcaggccgccgccttccacgccggcccggctgtgatcatcagcttcctgatcgccggcatcgtgtgcggcgcagccgtgatgtgctacgccgaattcgcttcgatgattccggtggccggctccgcctacaccttcacctacaccacggtcggcgagatcatggcctggatcatcggctgggatctgattctggaaatgctgatggccggctccgtgatttccaaatattggggcgtatacctcaacgatttcatgcgcctgatgggctggaacgccaacaccaacctggcgttcggctccttccatatcgatatcgccccgatcatcatcgtggcgttctttaccacgctgctcgtattcggcaccaagatcggcgcccgcgtggacggtgctatgaccgtgctcaagatcgccatcgtgttctttgtggtgatcgtcggcttcttctacgtcaaggcctccaacttcaccccgttcattccaccgagccagccggcctccaccgtggaaggttcctccgccgtcaccggcgtgatgacccagccgctgtggcagttcgccaccggcatgaccccatccgtgtacggcgttcccggcatcctttcgggcgcggcgctcgtgttcttcgcgttcatcggcttcgacgtggtggccaccgcctccgaggagaccaagaacccgcacaagaacgtgccgctcggcatcggcgtgggcatgctgctcatcatcgtcatgtacatgctcgtggccgtggtgaccaccggcatggtctcctatgccgatctcgccaagcaagacagcccctcgctggccaccgccttcgaactggtgggtgccgactgggccgccaagatcatcagcttcggcatcgtgctgggcctggccaccgtggtcatggtgctgttgctcggcctgacccgtatcgtcttcgccatgagccgcgatggtctgctgccgcgcggcctgtccaagaccggcaagcatggcaccccggccgctctgcagatcgtcgtcggcgcggtggtggcgctcgtggccgccttcttcgacatcggcgtgctctccgacatggtcaacatcggcaccctgtccgccttcacgctggtggccatctccatcccgattatgcgcaagaagcgccccgacctgccgcgcgccttcaagatgcccggcgacccgtggattccgatcctcatcgccgtggccaacttctggttgatgctcaacctgtccgtgctcacctggattcgtttcgtggtgtggctcgtggtcggcgtcgccatctacttcggctacggctactggcatgcgcgcctcggcaagggcgacctgaccgaaacgctgtccgccgaaaccgataaggccgttaacggctgagagcgaggagcgtcccaacgggcgcgtacccttgtatcagtatctgttaaggaggattccatgccatatgtgatcgctcagccttgcgtggatgtcaaggacaaggcttgcgtggacgagtgccccgtcgactgcatttacgagggttcccgctcgctgtacatcaaccccaacgagtgcgtcgattgcggtgcatgcgaaccggtgtgccccaccgaggccatcttctatgaggatgatctgccggacgagtgggcttggtacaaggatgccgctgtcaacttcttcgctgaagtcggcgatttgggcggcgcttccgccaatggcccaatcggcaaagacccggaacaggtcgccgcgctgccgccgcagaaccagtaagctgatttgcggataagcgctgcacacagcgcatagttcggattgaaccctcggtctatcacggccgagggttcgtcgtatcttaggaacataccgtccaagaaaggggttctcatgggcttccacgcatattcgtcgccatacgactggtctcgtatcgccggcttcaaagccaccgccaaaaccgtgccgggtggcatgatcgacctgtccgtaggctcgcccgtggacccggtgccgagcagtgtccagcaggcgctggttgccggcgcagacgcccccaacgcccatggatacccggtcaccgccggcagcgccgaccttaaggccgctatcgatacatggttccgcgaactgcgcggtgtggatctgaagtccatcaacgctgccgccgtacccaccgtgggttccaaggaggccgtggcgctgatggccagcctgctgcaccttggcgaaggcgatgtggtcgtccaaccggctgtctcctacccgacttacgaaatcggtacccaacttgccggcgccaccgtggtcaaagtcgatgatgtgaccgacgtcgattcctgggtgaatattccgaacgtcaaggccatctggatcaactcgccgtgtaatccctccggcgaggtcatctccgctgactggctgaccgacatcgtggctgctgcccgtcgcatcggtgccgtggtgctctccgacgaatgctatgcgttgatggactggcgttcggtgcgccgcaatacagccgcgtcctctgcgcctgccgcgtctgcatctgctgcgtctgtgcctgccgcaccggtggccgaatccaacgagcccgcctccgataccgcattcagtctctccgccacgccatgtgccctgaattcacatgtgtgtgaaggttcggcagctggcatcctggtgctctactcgctgtccaagcagtccaacatggccggctaccgtacggctctgattgccggcgattaccggctggtcaaggaaatggccgaataccgcaagcagatcggccagattatccccggcccggtgcaggccgccatggccgcaggcctgaaggacacagccgctgtgcacgagcaatgggggcgttaccgtcgccgcctatccgcgctggttgacgcactgaaggcatatggttattcggcacaaatgccctccggcgcgctgtacgtatgggtcaaggccaagtccggcgactgctgggccgatatggccgagctcgccaagatcggcatcatccccagccccggcgaattctacggcgctcccgcctacctgcgtttctccgccaccgccaccgacgaggccatccgttccgcctgcgaacgtctcacggcgtaatgagatcgcaagtggcgttgagccgttcacgccccaaactgggcggccttgctgccgaatttgcggcgtacggcatccagtgcggcctcggcatcatgcaaacgtgcctgtgaggtctggccgcgggcattgtaggcctcttcgagcatgtcatccagtgaaggctgcacggccgtagccgccgcctcactgagcgaagacgtgctcataccggccaagcgaatagttttgggcaggggagtggcagactccgccgaggccggtagccccagcatgacttttagctgccgcacgcattccgggtacagcacgccggccgtatcggtcggccgctccatcgtaaaagaccgggtctgatagctcaggtcggcgaaccgcaacttcaccgtcagcgtgcgcgccaccagccccttgcgccgcagcgtgctggctacttcgtcgcaggccgaacgcagtagcccacacaccacgcgcatatcgcgtgtatcctcggccaaggtttcctcggacccaatggatttctcctcgcgcaccgtggtgattttgcgggaatccaacccgtgcgaggccgcccataatccacgtgccgcagccggggagccagtggcgcgagtcaatgcagcttcatccagctgagccaattcagccaccgaatgcacgccccaagcattaagccgcttctccaaagacggcccgatgcctggaatgccgcgcaatggcatcatctgcacgaactcagccgagcgggccgccggaatcagcagcatgccgtccggcttggcattggtcgaggccattttggccaccagtttgttgcaggcgatgcccaccgaacacgttacgtggaagcgctcggccacctgagcgcgaatccacgcgccgattgcgctcggccgcccccactccagcagtgcggcggacacatccatatagccctcgtccaccgaaacctgctcgaaccggtcggtgacggtcaaaaacacctcgtgcatgattcggtgcgacatcatgcggtaatacgccatatccaccggcagaaagacgccgttcgggcacaactgatgggcgcgcgcggccggcatcgccgaattgatgccgtatttccgggcttcatagctcgcggcggacaccaccgcgcgcggcccggtgccgatgatcaccggcttgcctttgagcccggggttgcgcgccacctccaatgaggcatagaaggcatccatgtcgatatgcagcacggtgcatccggtctcgtcgtggccccaatcgcgtttggcggcctcaagtctcggtgcggtgctc

SEQ ID NO: 277 - DNA, 3889 bp, Unknown
  R101_18m  MAG No. k141_68196
aaaccgtacgctgagttactttcagcgtacggtttttgcgatatgcacgagtttgaacgggcggccgacggaccgtacgtgcgcgacgacgtggaccttacctgaccagctcgaacgccgaccaggccatcgccgacaaccatcccaagacgctgctgaccatggaccgcatcggaggcggtggcttcgccggcatcaagcaggtcagcatcctcgactggccgctggagaaatagcgggccttgccgcggatcattccgccgttggaacactcgaggatgccagaccggacagttgatcccgccggtgtgggcaccaccatggcctagggagattggccatcacccgcaattcctgtgacggtcgacgctatctcaaatacgattttactttgtcaagaaaataccgcacattcgtggaatagttcggatatgcaatggcaagctgctctgcattgcgggcatacaccagcacggcattgtcatactcggtttcgctgctgatatcatcaatcgcgccagacatcttgatatgctgctctacgtcatcgtatctacggagcgccttgtccagctcctccgccgaaaacgcctcgacatcaagatactggctctctctggagagcttcagcaagaacaactctgccaaaggttccggcatctctacgacgaacacgctatctatcgcagcgctcagatcgtccaatattccttgcgtacagtcgaggtcacacaactgtctgattaaggactcatacgttccggcgaatcccggtaccaacggtgtgcactcctccaacgcgaacagactggatacaagtctgaagaaacgcaaccgccgctcatcatcgccactggcgactgcccgtacagccggactcttgtattctgtgccataaatttctcccgctgcctcaactgcggtagaccagcaatgctgtaaacgtgtcctaatctgcacctccacatggtatgaggcggaatcggatttgacgttacacagcaggtgccttgatcggtatccgctggactgtgggtgttcgatatagtccttatcggtggagccattcttcaacggcagttttccggcaagccatgtggccgcgcgctgtacttgttcgtttgattccacaatcaatcggcaaccgccgatatcgtccaattcgccaagtttgaaatgcgtatcgggccgttgaattttgcgcacgatggaaatcatgcgcttcatccgaaacgttgccacggaatgctgtatgccctgcgaacatgccaacacctgtgagaagcactgctcggtcggcttgacatgctgggcacgccactgttgggcaatcagcatcgcttgcgcataatcgtcagcatcatcatgctgcaatccggcactcagcattcggccgtccatattggcccgattcctactgatgcgcgcaatgccgttgtctgaagccatgctctacaatataacccttagaaaggaggagcaccatggcaaccattatcgatgttgcggcctatattcttcgcgaatatggtccgatgaccacaatgaaactgcaaaaactggccttttactcgcaagcggagtcattgtctcattatggagctcctctttttgaggaggatttccaagcatggcgcggaggccccgtgtgcgttgccctctactcgcagcaccgcggaaagttcctcattcgggacggcgaactacgagcagatccgagtatgttgaagggtacggaacagcgtgttatcgatgccgcatgttccgcacttgcagcgcttactggcaatcagcttagtgcgcgcacccacagtgaaacaccttggattgaggctcgcaacggattgtcggcctctgccccatgcaataccgtaatcagtaaaagcagtatggcgagctactaccgccgcaaccctattacgacgaacggcatgaatcctcgattccaataggcattccgccgcttgtcgaacgagtgtatggaatcggcgggtctgatgcggtcgaaggcgtgagcgatctacctgacggtgtcatgttccggttccagtcggcctgacacggacgaattgacggccatgagggtcttacccgcatcctggccatctgcgagcaagaaccgcagcgacgccttcggcaatatgccctcgtggccccgcgtccggtgatttagccggatagctgcgtaaaacgtggcgctgatactatttgaaatatgcaaaacgtgacaattacatcatcatgatttagaaaaacgtgacagatgacgtgttattattaagaaaaacgttacaagacatatgatggcataggggcgtagatgctgtatcgcaaggcatgggatcgactggtcgtttggaaggccaatggggcctcgtcgcatgcgctgatgctcaccggggccaggcagatcggcaagacgacgctggtcagggagttcgccgggcggtattacgggcatttcgccgaactgaacttcctgaccgatcccaacgcctcgacgatcttcgacggtccgttggacgcgaagaccatcatcgccaacttgaccgcatatctgcgcacgccgttggagcccggcgacacgctcgtgctgctcgacgagatccaggagtgcccgcgcgcccgcaccgccatcaaattcctcgtggaggacggccggttcgattacgtggagaccggatccctgctcggcgtgcgcgtgagggacgtgccgtcctatccggtgggcttcgaggagcaatatcgcatgttccccatggatttcgaggagttctgcctggcgaatggcgtccagcgatccaccatcgacttgctgcgcacgcacttccgaagccgtactcccgtcagcgtcgccgtgcacgagacgatgatgaggctgttccgcgcctacatcgtggtgggcgggatgcccgaagtggtccaacggtatgtggacacgcatgacatcgcgcagacctcgcagctgcaacgcgaccttctcgacctttaccggctcgacatcgccaaatacgcgcagcgatcggaccgaacgaagatccgcgcgatcttcgacgccatcccctcccagctcgatgaccgcaaccgcaggttcgtgctcgccgacctgagcaagaacgcccgccagaaccggtatgccagcagcttcctatggctcgcggacgcgggcacggccctcccctgctataacgtgtcctcgccgaccgcgccccttgcggccaacgaaaagcacagcctgttcaagctgttcatgaacgacgtcggtctgctgtgcgcggcgtcgatgggcaacatccagttcgcactcctgcagggcgagctcgacgtcaacctcggatcaatcgcggagaacgtggtagcccaggagctgaccgcccacggatatgccgcgcactacttcgacgccaagaaatacggcgagatcgacttcgtcgtccagtcgggcacccgggtcacgccggtcgaggtgaagtccggcaacgactggacccgtcacaaggcgttggacaacgtgctcgccgtggacgaatggaacatcgaccaggcctgggtgctatgcaaaggcaacataagccaggatggggccatcacctatctgccgctgtacatgaccatgttcctcgaacccgagcagccacccgattcgatgccattcacagtggacctgagcgcactggatacaccggacgagcaatgaacgccaatggaggcccgacggctccaccgcagaaacgagcacatcagccggcagccacactcaccactcgtggcgctgataggcgattctggtggtgtcgaccggccggtcgagcagctggatcaggccgcaacgggcgaagccggagctttcgagcacgtgctgcatggccttgttattggggtgggtgtc

SEQ ID NO: 278 - DNA, 4106 bp, Unknown
  R101_18m  MAG No. k141_69889
aatagccatgcgtgtggttggtcgtacgctggcggcggaatatcgcgaagcgcaccgtcgcacagattccactgacaggattcagcggcaaatggctgaatgagtcaaaaaccaatcgtcgtaaggccatttgccgactgctcggtgtcgaaacgttgggtctgtcaaaacggccgaccgaactgcggttccgttatctcgatccgggccacgacgattttggtaccgatcgtactgaacgcagcgcgaagattgctatgcgggagcctaagccgacgcccggccttcaatcggcggagcgacgtctttatgaacgactgtgtgctgacaaaaccatcgcttatcggcgtatcgaacaggaacgcattcccatgcgtgatgcagttgacgaattacgcaagcttggcatccccgtggagtccattgaagattttgtcccggttcgaacatcaatcgtttgacggacgtaccggggcagaatccgttgtcccggtttgtgatttcgggtgtttttcgcgaaccgggacatgttgtgttgccccggtatgggcgtcaatcgtttgatgcgagaatcgggacaacatggcgattctgagattggctttattccgccgtttccgttcgcgttttatgtggttcgtggaaactggaatgtcctggttctcgaaaacaggccaaaatcacgaaccgggacagcgggttttgccccgatgcggacgtcaaacgattgacatgtgaaccggggcaaatcagaggaggagaggtcttcgggatagagcttgactggggctgggcgcacggttgatgtcgcgtgggccggctcttgcgtttcggtccactgatggtccggaattttgcatactatggttcggttttccggcctgacacgccatcgaacaagcgttcgaatttggtcgtgtgttcgggtatccttgggacagatttggcgcgcgcataaccgtgcgcgcgggaacggtgagatggaaggtggggtgtggctgtggcggcaacgcggactggcgcaaggcgcgcaacaagcgcaaagggcgcgaaaaccagcaagggcaagaacggtgaggtcatcgtcgaaaaggtgatgaccagcgactccttcctgagccgggaaatcaaaaaggcgccgctgatcgaacacgatggttcgctggtagctgatatctcgcacatcccgaacgatctcaagatcacgattcagggtgcgcgcgaacacaacctcaagaatgtcgacctggcgattccacgcaaccgtatggtcgtgttcaccggcctgtccggttccggcaaatcctcgctcgcgtttgacaccctgttcgccgaaggccagcgacgctacgtcgaatccctgtccgcctacgcccgccagttcctgggtcagatggacaagcccgatgttgacttcatcgagggcctgagcccggccgtctccatcgatcagaagaccaccaaccgcaacccgcgttcgaccgtcggcaccatcaccgaaatctacgattacctgcgactcctcttcgcccgcaccggcatcccgcactgccccgaatgcggcgagcccgtcgcctcccagaccccgcagcagatcgtcgacacgctgctcggctacccggagcgcactcgattccagattctctcgcccgtggtcaagggccgcaagggcgagttcgtggacatgatcgagctgctgcgctccgacggctacgcccgcgcgctcatcgacggcgagatgacacagctgtccgacgacatcaaactcaccaagcagaagaagcacaccatcgaggtcgtggtcgaccgactcgtggtcaaggacggtatccgccaacgtttgactgattcggtggaaaccgccctcaagctcgccaacggcagcatcgtcatcgacttcgtggacgaggaggaaggcagcccggcccgccgccagccgttctccgaacaccgcagctgcccgaacgggcacacgctcgaactcgatgaggtcgagccgcgcaccttctccttcaacgccccctacggtgcctgccccgcctgcaccggtctcggcttcaaactggaaatcgacccggacctcatcatctccgacccggacaagtcactggccgacggcgtcatcgaaccgtggagcggcaccaagatgacctcccagtactacggccacatcctcgagggcttggccaaggaaatgggcttctccatgaagaccccttggaaggacctgccggacgacgtcaagcacgacatcctctacggccacgacttcaaggtcaacgtctcctaccgcaatcgctggggacgcctgcgtgaatactccaccggcttcgaaggcgtgatccgcacgctcatgcgacgccacgacgaaaccgattcgcagtccatgcgcgaatactacgagtcgtacatgcgcgaagtgccctgccaggtctgccacggacgtcgtctgaagcccgaggtgctctctgtcaccgtggacggcaaatccatcttcgacgtatgtgacatgcccgtcgtacgcgaactcgcctggatcaacggcctgaaactcgaaggctcggcacagctgatcgccggcgaagtgctcaaggagatcaaggcccgactcggcttcctgaacgacgtcggcctcgactacctgaccctctcgcgcgcggccgccaccctgtccggcggagaagcgcagcgcatccgactcgccacgcagatcggctccggcctggtcggcgtcatgtacgtgctcgacgagccgtccatcggcctgcaccagcgtgacaacgaacgcctcatcgaaaccctgcaccacctgcgcgatctcggcaacacgctgatcgtcgtcgaacacgacgaggacacgatacgccgcgccgactgggtggtcgacatcggccccggcgccggcgaacacggcggcgaagtcatctactccggccccgccaagcacctcatcgaagccaagcgctccatcaccggcgactacatcgcccaccggcgagagatcgccgtgcccgccaagcgccgcaagatccacaagacccaggtgctcaaagtcgtgggtgcccgcgagaacaacctcaagaacatcgacgtgagcttcccgctcggcgtgctcaccgtggtcaccggcgtctccggctccggcaaatcctcgctggtcaacacgatcctctacccggtgctcgccgacaagctcaacggtgcacgcatcgtacccggccgccacaggcgcgtggaaggcgtggaccaggtgcgcaaggtgatccacgtcgaccagaacccgatcggccgcacgccgagatccaaccccgccacctacaccggtgtgtgggacaagatccgcacccttttcgccaagactcccgaagcccaggtgcgcggctacggccccggccgcttcagtttcaacgtcaaaggcggccgatgcgaggcctgccacggcgacggcacgctgaagatcgaaatgaacttcctgcccgacgtctacgtggactgcgaggtctgccacggcaaacgatacaaccgcgagacccttgaagtcacgtacaacggcaagaccgtggccgacatcctcaacatgcccatcgaggaggccgccgacttcttcaaggcgtacaccggcatctcccgatacctgaagaccctcgtggacgtcggcctcggctacatccgactcggccagcccgcacccaccctgtccggcggtgaatcgcagcgcgtcaagcttgccaccgagctgcagcgccgatccgacggcaaaaccgtgtacatcctcgacgagccgaccaccggcctgcacttcgaagacgtgaacaagctgctcaaggtgctgcagtccctggtggacaagggcaatacggtcatcgtcatcgaacataatctggatgtgatcaaggaggccgactggctgatcgatctcggtccggagggtggcgacggaggcggcaccatcgtcacgcagggcacgcccgaacaggttgccgaatgcgaagcctcatggaccggcaagttcctgaagcccatgctttagccttccattgcagctgacctcgggtgggtgggggtggtatgttgctggacatgctccgggccgctcaggccaagtc

SEQ ID NO: 279 - DNA, 19849 bp, Unknown
  R101_18m  MAG No. k141_71123
caaacggctgatgccgaatgtcgacaggctctcggacgatgaggcgttggccaatgcggtgctcgatgtgcgcgaagtgtacgaggacaccgtctatcaggtggcgcatgacgtgatcgccgtgctcaaggcttatgccgaagtcgacaaggccactagcggcaaggctgatctgccgatgctttcggtgctgcagtcggtgcgcgagcacatcgccacgctggtgttccccggattcgtcggcgccgctcccccggacgcgctggcgaacatctcccgatacctgcaggccgatctcatgcgcctggccaaggcgaagaccgacaagaaccgcgacgtgcgatgggcgtgggaggccgacgaggcccgcacgctggtcgacaaggcgatggccaaggccaaggcggagccggccggtccccgccacgagacgctgatgaagcaggcgaccgccgcccgctggatgctcgaggaattctacgtgtccctgtgggcgcaggaactcggcaccgccaagccggtgagcctgcagcgcatcaagaaggcactggcgtagcgatggcgacgacgcaacggcgcaagccggccaatccgcgcggcagggcgaacgtgattgtcgcggggcggggcgtgtcaggcagcaatcgcaaacgtcgcccgggcaaacgcccgcgcaatcgcaggtatccgctcagcccggcgcgctggtggaagcgggccgggttggcgcagcgcgtcgcggctgtgctggtcaccgtggtggcggccgcatgcgtggtcgcgctggtcgtgggcactgtgcgggtcgtccagtggcgtcgcgacgtgcaggaggccgaggcccgccagctgcagctgacgcagcaatacgacttcaatcccggcgacatcatctcggacggccagttcttcaacgccaatgcgatgagcgaggccgaggtccagtcgttcctcgacaagcagggcgcggcgtgcagcggttcccggtgcctgaaaaccatgaccttcgacaccgaggaccaggcggcgaacgagtattgcgcggcgtacgagggcgcgagaaaggagaccgcggccgcgatcatcgacaagtcggcgcgcgcgtgcggcatcagccagaaggtgctgctcaccgtgatgcagaaggagcagcacctggtcacggccgtcgatccgacggacttccagtacaaggccgccatggggctgagctgcccggacaacgcgaactgcgatccggcctatgccggcttcttcagacaggtgtacggggcggcgcaccgctaccaatactacgtggcgcatgaaagcgcctacggctatcacgccaacgcgctgaactacatccagtaccacccggatgccgggtgcggcggcaccaacgtgtacatcgagaacaaggcgaccgcgctgctctacatctacacgccctaccagccgaacgacgcctcgctggcggccgggttcggcgagggcgactcatgctccagctacggcaaccgcaacttcgccctcatatacaccaactggttcggtgccgcgcgccgataggggcgggaacggcaaaaaaccgaaaccacggtaaggctaggtgtcatccgcgccgtcgccgccccgccgcacggccggagaaccggccggatgacgggcggcacggctcacaggtcgatcttcggggaggcgtcgagcagggtacgcgtgtactcggccttgggatggttgagcacgcggccggtctccccgctctccacgacgcgcccgtggcgcagcaccgtgatcacatcggacatctcctgcacgatgcccaggtcatgggtgatgaacaggcatgcgaaaccgtgctcgcgctgcagccggcgcagcaggtcgagcaccttgcgctgcacggtcacgtccagcgacgacgtcggctcgtcggcgatgagcagcgacgggttgagcgccaaggcgcgcgcgatgccgacgcgctggcgctggccgcccgacagctggtgcgggaaccggccggccacatcggcgggcagctccacctgatcaagcaattcaaggacgcgcttgcgccggtccgtctcgctgagcccgccctgcacgagcatcggctcgccgatgctccatgccacggacttgcgcgggttgagcgccgatccgctgtcctggaacacatagcccatatgcttcaggatctcgcgcttgcgcctgccatgcgccttggcgagatcctccccctcgatgagcaccgtgcccgaggttggcgcgagctggccggagatcaccttggcgatcgtggtcttgccggctcccgattcgcccaccagcgcgcgggtcctgccggccaccagatcgaacgagatgtccttgacggcgaagctgccggccttgtacgacacggccacgtcgttcacctgcgtgatgcgcctgccgccgccgggcgcgtcactttccgtgatgcgttcgccgccggccgcatgttcgccgtctgccgcatgctcgtcgatgcgcaggcgcggcacggcgtcgagcagcatccgcgtgtagtcgtcggacgggtggcggaagacctgcgcgacgctcccctgctcgacgatcacgccgttgtgcatcacgtacacgtcctgcgcggcctgccacaccacgcccatgtcgtgggtgatgagcagcacggccagatcgaggtcgaccgccagcgaggagatcagggcgagaatcgccttctgcgtggtcacgtcgagcgcggtggtcggctcgtcggcgatgagtaccttgggtcggttgatgatcgccatggcgatcatcacgcgctgcagctggccgcccgacagctcatgcgggtacgacgaccacacgcgttcggcgtcgtcgagcccgacctcgcgcagctgttcgagcaccttggccttgcgctcggcggcgctgagctgcttctggtggtatttgagcgattccgcgacctgtacgccgagcgtgaacaccggattgaacgcggtggacggttcctggaacaccgtgccgatgtattcgccgcggatgcgttgcagcggcgcgtcggcggccagcagatcgatgccgcggccggcggcgtccttgccgtcgccgcccggaccggagtccggcccgtcatccacaagggcgtcgtcgaggtacgcgtggcccttcacgctggccaccgacggatcgagacggggcagcgccatcgccgtcaccgacttgccggagccggattcgccgaccagagcggtgatgcgccccgggaacagcctgaggctgacgccgtgggtcacctcccgctcgtcgaagctgacggccagaccgtccacggtcacgatcgcgcgtggttcactcattggaagctccttggatgcacaagcgttggaatgcgtccggcgcgcgccagcggaccatgccgccggcgcgcgccggatgcggatgccggctcagttcgcgctggcgagcgagacctgcgtgtagtccgggtacgccgggaagttgccgatgacgaagttggtcacgttcgatccgtggatgaacgtgttcttcgaatagatcagcggcacgaccggcgcgtcggccatgatcgtcttgtcggcctcggcccagatcttgccggcctcggtctgatcgatggtctcggtggccttcttgatcagctcgtcgaccttcgggttcgcgtaacgggccaggttgtagttgccgtggccgatctgcgaggagtcgaacagcggggagatgttggcgtagggcgacgggaagtcgggctgccacgagctgatggccagatcgtagtcgcccttgtcgttggtcagcgtatcggaatacacatcgtcgttgagtgtctggatgtccaccttgacgccggcccgcttgaggctcgtctggatcgaggaggcggtttcggcctgagcggaggtggcgatgagcttgagggtcggggcctgctcgcccgactccttgatcagctgcttggccttgtccacgtcgccggtcggatcggccttgtacaggtcgtagtcctcgcggccctcgatgccgggcgtgatgagcgtggtggcgaagttgccggcgatctcgccgccggaagccgtctggtaggccttcttgtcgaccgcgtactgcagcgcttggcgaatcttcgcgttcttcacgtgttgggtgttgatggcgaggtattccagcgcgccgtcgccgctggtggtcagcagcttcttgtagttcgggttggcctgcgcctgcgcgagctgcgcggccggcacgaatccggacaggaacgagttcttgccttcaccggtgccctgcatgatcgactgggcggccaccgaggtgtcctgtcccatcttgaacacgatcttgtcggggcccgcggtgcgcaccggatcggtcttcttgtcccagtaggtgttgcgcacgaagacggcctgcttgccagcctcgttcgactcgaccttgtacgggccggaggccaccggcagcttgccgtagccggacgccgggcccttgccgtcgggcacgggggtgaacgcggcgagcgagacgacccacggccagtcgccgaacggcgcgttgaggtggaagatgatggtcttgtcgttcggcgtctcgatggagctgagctcctggccgtcgaacgggccgtggtagtcctgcgcgccctcgagcagcgtcttgtggtagctcaggccgccggtcagcgagtcggcgaaggaacgctccagcccgtacttgacgtccttggaggtgatgggcgtgccgtcggagaacttgagcccgttcttgagcgtgtacgtccacgtcttgccgtcgtcgctcgacttgccggtgtcggtggccagatcgggcacgaccttcgtctcgcccttgtcggtgatcttccacgcggtcaggcggcggaagatgttgccgttcgtggtggtcggcagaccctggctcttggccgggtccagatccatctccgtgctggacagcagcacgttcagcgtgccgcccttgacggtggtgccgctcgccgagccggtggcggcgttgtcgttggacgcgccgcagccggacagcgccagtaccgcggcacaagcccccgccgcgaatacgcgccatgcgttgttcttcatgatggttttcctctctatcggtgccggtccgtggagcagaccggcaagtatcgcgtgttgcggccgcagccgcactacttcgtgccgagcgcgaccctggggtcgagcaggctgtagcagatgtccacgatcaggttggcgacgatgaccagcacggcggcgaacatcgtcgcgccgaccagcacctgcaggtcgaggttcgacacggaatcgagcagcagcgagccgagcccctgcatcgagaacaccttctcggtgagcaccgcgccgccgagcagcccgcccagatcgaggccgaacatggtcatcacgggcagcagcgcgttgcgcagcgcgtgcttgaagatgatcaccgattcgggcacgcccttggagcgggcggtgcggatgtagtcctggctcagctcgccgatcatctgcgtgcgggtgaccctggtgtagccggcggcgctgagcacggccagcaccagccacggcagcagcagatgcgtgaaccagccgacagggtcgtcgtggaagttcacgtacccgccgctggggaatatctgcagcaccagcgaaaaggcgatcaccgtcagcaggccgatcaggtatgacggtgccgaaacgcccacgatcgacagcccgagcagcgtgcggtcgatcagcgtatcgcgcttgagggccgcccacacgccggtcgccacgccgatgaccagccacagcacggccgcgccgaccgcgatcgacgcggtgatcgggaagcggtcgaggatcagctggctcaccgattcgttgagacggaacgaatacccgaggcatggtgccgagcagaccacggcgccgccgccgctgccgaaggtgcgcccgacgaagatgcccgccacgtaattgcccatctgctcgtaccacggcttatcggtgcccatgaaggcggagacccgctgcagctgctcgggcgtgcacggcttgccgcacgacagctgcgccggattggtcggcagcaggaagaagatcaggaacagcgccagcgtgatgagcaggatgacgacgatcgagctcgccacgcgcttgccgatgtattgcaggattctcatgcacgcacccccttgcgcgggtcgatggcgtcgctcaggccatcgccaagcaggttgaagccgaaggtcagcaggaacagggcggcgcccgggaagatcagatacatcgggtcgaccagggcccactgcacggcgtcggagatggaccggccccatgagggcgtcggcgggttcatgccgacgccgaggaacgacaggcccgcctcggcgccgatgcgcccgggaatcgacagcgtgatgttgacgatgagcagcggcatgaggttcggcaggatctgatgccacagcacatgggcaggcgaggcgcccatcaccttggacgcgacggcgaaattgcgcttgctcagcgtcagcgtctgcccccggacaagacgcgcgatgccgggccatccgaagaatccgagcactagcgtcagcagcaccggcctcgggaagccctgcggcaccaccgccgacagcgcgatcgcgaagatcaggaacgggaagccgaagaagacgtccatcgtgcgcgagatcagcgcatcgaccaacccggggaaatagccggccagcagcccgagcgccacgccgatgaccagcgagatgaccgacgagacgacgccgatgcccagcgagatccgtgagccgtacgccacgatggagaacaggtcgacgccgcgcagcggggtgacgccgaaccagtgccgggcactgatgccgccgccgaatccggccggcaccgacccggcacccaaggcctcgggatgctcggcgtacgggtcgttgccggtgatggccgacaacggcccggccagcggcgccagcagcacgaagaacagcacgatggcgccgccgaccactatcgatgagcgagcgccggaacggagaacgcgccgccgtctttccgccttcggcgcggctttcgcagtcgcatccgtcatattgtcatccccattttcacgctgaacatgccgataatcatcaatccgcgcaggtgggcgcccgtgagccgggtccccctgcagccggtgtcctaacattaaggtttcgcagcaggatgacatgctgtggccttatcggttatttggatagcaggttatcaatggacggcaatcggcggataaggcatgccgcggggacacgcgggaaaaacccttcgttcccgcgcgtcacgccacccgtcattccccgaccgggctgacgtacggacgcagcagtgtcgtggtgccgaccgcgagcagcgcgaaaatcgcgccgaacgggccgagccaggtcaggccaaggaggtcgttgaccaggccgccgaccgcggagccgatggcgatgccgatgttgaacgacatggaattcagggaggcggccagattcaccgaaccgggatgggattggtaggccacatccatatacagcacctgggaagcggaattctgcagatacatgagcatgccaagcgccaccagcagcagtgcgccgccggccggcaccagcgaggcgaaagccagcaggcacaggcagacggcctgcacgcagtagatcggtcgaatgtgggtcagcggctcgacccccctgccccgatcggccagcttgcctccgtacaggttgctccacaggcaggcacagccgtagaccaccaagccgacgctgatatagcgttcgggcacaccgatttcgtcgcgcatgatcggcgagagatacgtgtagaagacgtaggaggcggctgcgccaaagaccacatccgccacgccgagctggatgcggcggtcgaagaacagacggaattgcctcaggaaaccgatcttcgccggatgtgagttgcgtggcagagacactgccatcgatgccatcagcacggcggtgagcaccgaaaccaaggcaaaggtgacacgccagccgaaagtattggccacccaagtgccggccggtacgccgaccacagaggcgatggagaaacccgagaatacccaggcaatgaacttggtgcggtatttgtcggtggtcacgtcgggcgcgaaggtcatggagatggccaccagcgtgccggacaccgaggcgatgagcagtcgggcgatgagcagcaccggatagttcggcgcgaaggcgcacaggatattgccgacgaggaacacgcccatcaacgtcagataggtgagaaagcgcgggaatcgggcggataatgcggatccgagcggcgtgcagggcgcgtacacgaatgcgaagatggccaccagattacccacggtcacttcggagaccttaagtccggatgcgatgtccggcaggatgcccactaccacgaattcgctcatgcccagcatgaagctggcgaagatcaggatggtgaccggcagattgaagaagcggtcggtgcgcgcggtgttcgcaggtgtgttcgtcatgggtgctctcttgagtgctctcgctcgtactacaagctgattcgtcggttacgtcaatcgtttttcgtatcaactcagcgacaacactattcccacctctgcccgctacccaccaccacgacacgctatagaaaaccccgccgatgaccaatcatcgacggggttcggcacatgtgcaacgcttgcgattacagcttcggcagatacttcttcagctcgtaaggcgtgacctgctggttgtactcctcccattcctggtgcttgttgtccaggaagtagccgaaggcgtgttcgccgagcacgtcggccacgaagtcggatttctccatgatcttcagcgcctcgtccagcgagcgcggcagcggctgaatgcccatagcctgacgttcgccgtcggtgagctcccacacgtcatcactggtgggttcgcccagctgcatctgcttatcgatgccatcgagaccggcggccagcagcaccgagtaggcaaggtatgggttggccaccgggtcgagcgcacggaactccatgcgcgcggagttgcccttgcccggcttgtactgcgggatgcgcagcagcgcggaacggttgttgtggccccagcagatgtagcttggtgcctcattgccgccccacaggcgcttgtacgagttgacgtactggtcggtgaccgcgcagatttcggccgcatggtacaggatgccggcggcgaactggcgggcggtcagggacatgttgaactcctgaccggcctcgtagaaggcgttggaatcgccttcgaacaggctcaggtgcgtgtgcatgccggaaccaggcgcgtcggccaggggcttgggcatgaagctggcgtgaatgccacgctccaaggaaatctccttgaccaccgtacggaatgtcatgatgttgtcggccatggtgagcgcgtccgcgtatcgcagatcgatctcgttctggcctggccccgcctcatggtgcgagtattccaccgagatgcccatttgctcgagcatgttcacggtggcgcggcggaagtccatgcctgggctgcgcggcacatggtcgaagtagccgccctcgtcgatcggggtcggggccttggaccagtcgtcctggctttcgaacaggtagaactcgatttccggatgcacgtagaacgtgaagcccttgtccttggccttggcgagcgtacgcttcaacacgtgacgtggatcgccgagcgaaggctcgccgtctggggtcagaatgtcgcagaacatgcgggcggtaccttgcgggccaccgcgccacggcaggatctggaacgtcgcgggatcgggttgaacgatcatgtcgtcttcggacacgcgggtcatgccctcgatggcggaaccgtcgaagccgagaccctcctcaaacgcggcttccagttcggccggagcaatcgccacggacttcagtgttcccaacacgtccgtgaaccacagacgaataaagcgcacgtcgcgttcttcgaccgtgcgcagcgcaaactcctgctgtttatccatagtcgcctatcgttccataaccgtgttacgaggggcgttaacatctcactgtttgtcacctgcgagtcgcgagatttcatcaacatgccccggtccgcatgtcaggcatggttcgggcccatgccggcacggcactatggtagtgactatgagcgaagatcatctcaccccatccgccaatccgcccgagctggtgccgatatcagctggatgattacgccgacttggatgcgttgcaggcacgtatagacacgctgttcgagagctaccggcattccctgtacgacgatcgccgttgggtgttcgatcatttgcgctatcaggacgcggcccgcaaggtggtgggcgtgggctcggtgggccagcgcgcgtggacgtcggtgtggatcgcgcgtgatatcgacgatccgatgatgattcagatgaaggaggccacgtattccgtgctcgagcattactgcggcgcgtcgccgtacgccacgcacggtgagcgcgtggttcaggggcagaagctgattcagaatacggccgacgtgctgttgggttggtcgagctttatggccgaggatggccgaccgcgcgactattacgtgcgccagttgtggaatggcaagggttcgattgatatcgacaatctcaacgcttcgggattgagcgatctgtcgcgcatgtgcgcatggtcgttggcgcatgcccacgcccgcaccggcgattcgatcgcgatcgccaattacatgggtggcaccgacgaattcgatcaggccattgcctcgttcgccgtcagctacgccgaacagaatgatgaagactacaccgtcttcaaaaagctcctcaaatccggcgaccttccttgctgagccgttaagcggacagcccagtgggctgtccgtaggcgaggcctgagtgaagcgatagctgagcaaaggtagcttaacagtctcgctaaggcgagtcctttgcctacttcgcgactgcgagcgcttcctggagcgtgaacgcacgtgcgtataacgacttgccgaggatggcggaatcgacgccgatctcggccagttccttgatggcgcgcaaatcgtccagcttggagataccaccggaggccgtgaccttggcgtcggtgcgttcggcgacttcacgcagcagttggatgttcgggccggacatcatgccgtccttggccacgtcggtgaccacgtaacgcgagcagcccacggagtcaaggaacttcatggtctcaaacaggtcgccgccttcgcgcgtccagccgcgcgccgccagtgtgtgaccgcgcacatccagaccaacagccacacggtcgccgtacttcttgatgaccgaagcggtccaatccgggttctccaaagcggcggtgccgatgttcactcgggcggcaccggcctcaagggccgcgtccaacgaagcgtcatcgcgcacgccgccggacagttcgatgttcacgcggtcgccaagctcatgaacgatttcacgcagctgatcgcgattgttgcccgtaccgaaagcggcatcaaggtcgaccaggtgaatccattcggcaccggcctcaacccaggtacgggcggcctcaaacggcgaaccgtaatcggtttcggaaccggattcgccttggcgcaggcgcacggccttgccatcgcgtacatcgacggcgggcagcagagtcaacgacataagaagagcctttcttcagttacttatacataatttgagctctctcgtcagaggggagcttcatgctttttacagcgtggcgatccagttcttgaggagctgggagccagcgtccccggacttttccgggtggaattgcgtggcggacagcgggccgtgttcgtaggcggccacgaaacgcgaccggccgtacgagcaccagctcacgcgttcgggcgcaccgctcagatcaatgtcgaagcgggacgtatccgccggcttcacttccatcgcggcgtaggagtgcacgaagtaaaaccgttcattctccacgccgttgagcagcaccgaatcgggggcggcctcgatcgtgtcccatcccatgtgaggcaccacgtcggcgtccagcaggttcaccgttccgccgatcagcccgatgcccgcggcatgggccccgtgctccagaccgtgttcgaacatgatctgctcgcccacgcacacgccaagcaccgggcggccggcgcggatgcgatcatagatcacacggtcgccgtcgaccttcttcagtccttctatgcatgcggcgaacgcgcccacgcccggcacgaccagaccgtcggcctccaacgactgccggtagtcggaggtgagggtggtgtcgacgccaagattggcgagcgcacgcaccatggaacgtacattgccgaaaccgtaatcgaaaacaaccgctgtggtcatattctctcctatcccctactggttggttggcgtctattcgatgcgggagccgcgtccgccacgcccacgcttggtatggttggcgagaatctgcatcgcctggtcatggtcgagtccagcggaatccaccacttcgaacccttgggtcttgagttggttcagggttacgatgccgagcatcaggtcctcgacgaagcgcggtgtggaggtgaacagcacgggcggcgcgaaactttgtccggcctctccctgcacgtacatggccacttcgagcttgtcggcacgattgactgcaagaatcacggccatgccggataccacggtggtcaggtccttggctgcggcttccgggccgtcgccgtccagattcttcagcaccgcgacggccccctgattggcaccgacgcatgcggcggagatgtccgacagctggcagaacgcggccaacagttcggcggaggcaagacgggtgacgatcagcgccaccttcgccttgttacccaacagtccagcgagttcgttgtcgaagccgagcgaggggtcgaccacgtcggccatggcctcattcaccgcatcagcgaccgacccggtgacgtcgtcggccataggctggccggaatcagcggaagccttatcagccgtatcatcattcgcgtcggaatcggacttcgctgaagcagcgtccgccgttttatcggcatcactggtatcactggcatcgccggatgccgaatcgtccgcgaattctttctcgaatccggcgagcgcggcctcaagctcctcgtcggagaagtgcgattcgtccggatcgaacttgtcgtcggccatcacagggctcccttggtgctgggcacgccgtctacacgcgggtcgatttccacggcgaagcgcagcgcacgggccagcgccttgaattcggcttcggcgatgtgatgcggatcacggccggcgagcacctgcatgtgcaggcagatgccggcgtggaaggcgatggattccatgacgtggcggaccagagagccggtgaagtggccgccgatcatgcagaattcgtagccttcgggctcgccgctgcacacgcagtacgggcggccggaaatgtcgaccacggccttggccagcgcctcgtcgagcggcacggtggcgtcggcgaagcggcggatgcctttcttgtcgccgagggcccgcttcagagcttcgccgaacacgatggccgtatcttccacggtgtggtgcacgtcgatgtcggtgtcgccgtgggcgtggatggtcaggtcgatcagcgaatgcttgccgagcgcggtcatcatatggttgtagaacggcacggatgtatcgatatcggttttgccggtgccgtcgaggttcagttcgaggtcgatgtgtgattcgctggtttcgcggacgatgtgcgcggttcttgccatcatgtctcctgtgtgattcgtcatattggattgcggcgggactcgaatcgcttcgggtctcgccgcaatcggaaagaaacgtcccttatgctgcttccactatacgaagcgcttcaacaagggcgttacggaaggtttccatctcctcgtcggtacccatgcacacgcgcagccaaccgtccggtccgaccacgcggatgagtacgccgcgcttcaggagctcgtcgaagatggcttcgcgcttgtcgaagtgcccgccgaacagcaggaagttcgagccggattcggccacttcaagcggctggtccttgtaggtctgttccttgagccatgcggcggtggcctcgcgggtttcgcgcagatgctcgacacggctcagctgttcatcggtgtgttcgaaggcggccagtgcggcggcctgggtcatggcggacaggtggtacggcatacgtacgatgcgcacgcagtcgatgatgcccttggatgcggctaggtagccgactcgcgcgccggcgaaggcaaaggccttgctcatggtgcggcttacggccaggttcgggtggtccttgatcaggctcacggcgctcggggtgccgggcttgcggaattccacgtacgcttcatcgatgacgagaatcgggtgcacgccctcacccgcgccggccacttcggcggtttcgcaggcggcgagaatacgctcgatatcctccatcggcaacggggtgccggtcgggttgttcggactggtgagcagcaccatcgagggcttgacctcggcgatggcctcaagcaccttgtcgacgttcaacgtgaagtcggcgttgcggtgggcgagcttccaaccggtgaaggtgtcgcgagcgtactccgggtacatggagtacgtcgggtcggcaccgagtgcggtgcggcccgggccgccgaaagcctggaacagctggagcatgatctcgttggagccgttcgcgccccacagctcgtccacgtccagacgggtaccggattcacgggccaggtaatcggagaatgcctgacgcaattcaatgtgctcacggtccgggtatcggttgagtgtgggggcgatttcacgcacacgcttggcgatggtgtcgcatacggccgggtccggcgcatacgggttctcgttgacgttcaggcacaccggcacgtccagctggggagcgccgtacggctcctcaccgatcaggtcgttgcgcagcggcaggttttcgggaatcgagctcatcgcagaccggctcccttctcctgctcgcgcagggtggccttgtcatacggatccttgacgaagcgggagagcacgcactcgccgtgggcgggcaggtcctcggacaccgcgaaggcgttgatgcgggcggcgagggccttgaggccttcctcgtcgtattcgatgacttcgaccggcttcatgaaggtgtgcacgccgaggcctgcggcgaagcgggcggtgccgccggtgggcagcacgtggttggagccggacatgtagtcgcccagcggcaccggggagtacgggccgcggaagatggcaccggcgttcttgatgcgcttgacgacagcatcggcatccttggtctgaatctcaaggtgttcggcggcgtaggcgttggccgcgtcgatggactggtcaagaccgtcggtcagcacgatggcagactgggtgccggacagcgacgtgtggacgcgctcggcgtgctcggtacgcggcacgcggtacttgagattctcctgcaccttgtccgcgatgccggtggagtcggtgaacagcacggagccggcaagctcatcgtgttcggcctggccaatcaggtcggctgccagcaggctcgggttggcggtcttgtcggcgatgatgccgatttcggtcgggccggcgaccgcgtcgatgcccacgaatgcggagacgagcgacttggcggtggccacgaagatgttgcccgggccggtgatcttgtcaaccggatcgcacaggatgtcgccgtcctgcggctcgctgcccttggcgccgtatgcgaacatggcgatggcctgggcgccgccgaccgcgtatacctcgtcaacaccgaggatggcgcaggtggcgaggatggtcttgttcggcaggccttcctcattgtcgcgggcgggcggggtggcgatggccaacgattcgacgccggcggcctgggccggcacagcgttcatgatgacggagctcgggtagacggccttgccgccgggcacatacaggccgacgcgctgaatcggaatccagcgttcggccacgcgggcgccttcggcgaggtcggtgtagaagtccttcggcacctggttggcggccacggcgcgggcgcggcgcaccgattcctcgatggcggcgcgcacttcggagtcgagcgtggtcagggcgtccttgatcgcctcgaccggcacgcgcaggtttttcgggcgcacgtgatcgaacttctcctcgaagtcgcgcagggccgcggcaccgcgttccttgacatcgtccagaatcggacgcaccagatcggtggcttcggaagtgcccattgcagcacgcggcatcgcggcgagcagttcggcacgagacaggttctgaccacgcaggtcaatgattcgcatgatgttctcactcataaagccccatcgtaccaatgtgagggtcctaagcgtcgaggaacgcccatgttcacccgtatcgtgagattatcgtgcgtgatgtggattcgtgatgcaggttattgacgcacgccaaatgcccgagcggtctcatcgataatcggcatgtcatgtacggcgacgtgactcacttcggaccatcgcggaccaatggctaattgctcaaccaaggcttgcactgcgtcgctactgccttgtgcttccagctcaaccgagccatcgcggcaattgcgcacccagccctgtacaccaagtcgacgtgcctgagtcaccgtaaaataacggaatcccacgccttgcaccagtccggtgaccgctatatgtttgcggaccaaattcgctgattgcctcatgatgctcagttcctaatccatcgttcgcagcatcgggtagaggctcaggaatcgccggtatgcgtcggcatatgtgcgtgcggtgtcaggattcggctggtatacagtgcattcgcatactgattgcagcaggtctggtacattgaataccaacgaggccattgccactgctggcagaatatcggcattggcgaacacttcgatgggatgctccaacacatcggccagaatctggcaccacgcattttctctggctccgccgccaatcagggaaatctcgctgggtttggcgtcaaaactttccataccttgacgaatggagaaggccacgccctcaagcgcggcacgcatcatgtctgccttggtggtgtctggatcgaggcctacataggccccgcgaatattcgggttcattacggggaaccgctcccccaccagatatggcaggcacatcacaccgttggagccgggtttggatgtttcgataagctgatgtgcttccgcgtaatcgccatcagcgaatacgccggtaacccatttatgcacgtcaccggcgttgaggaatggcacggcattcacgaagacttcttccacaccaaatgccagattcgcagcaccgggcttgccggtgaacggttcgggcgaaacggtggcgatccaacctgaggtgccgatattgatgttgtattgaccagggcggctgacaccgctggccagcgtggtggcacccgcatcgccaatgcccgcgtataccgcagttccggcggagaaaccggtgcgttgtgcagcggattccgtcactgtgccaatgttgtcttgcggattgtgcaggtgtggcaacatggccatgtcgattcctgcggcctcgcacaattcggcatcccattggccattacggatattcatggcaccggctgtggaacaagccgccacatcgcccacgcattcgccggtcaattgggcgatcaagtagtccttggaactgatcaatacatgacgaatgcgcgcgtacgtttccggctcgtgttcacgcagccacatcaacttgggcaacggcaagcagccttcgagccggttgccaacggtgttcaggaaacgttctactccaccctgatatgtcttggcgagttgcttggcctgttcctcggctcggccatccgaatacagaatggcattgcggacgggattgagctcgccgttcaaagcaataacatcctgcatctgaccgctgaaaatgatgccacgaatgcgagtcacattgaattctgactcggattgccgcgtctgctcaatcatgtgcctggaggccgcgcagaaagcttgccaccattgatcggggctctgttcccgatagtcgccgttgataataaggttaagctcactactcgcactggctacgatacggccttgcctatcaaccaaggcacccttcaacgccgtggtccctgcatcgaatgcagccacatattcctctgccacgtgctctccccttcaatctgggttgtgattctactggttattatcgtagccgcttactcgttgcattcattaggtcgatttcacgttcattaggtcggtatgccgtaagacggctcttcaggaatggcgtaatgactgggttctgatgccgaagaccctgggcccattgacctaatgaatgcaataatgacctaatgaacgagaatcacgccatcattacgcaattctttgcccgcgaaacgcggctcattgcatcgtcttgtttctaaaataggaaattggatgaacactacgaatagtgaggcattatggcaattcaatcgacaattatgctgaacaacggcactgtcatcccgcaggtgggcttgggcgtattccagacaccggatggtgatactacagtgaacgcggtgcagacggctctggagaatggctaccgccatatcgataccgcaatgatttaccgcaacgaagcctcagtaggtgaaggtattcgccgtgctggtgtgccgcgcagcgatttcttcttgaccaccaagctgtggaatgacgatattcgcgcacgccacggcaaggatgcattccaagaaagcctcgaccgcttgggcgtggattatgtggatctgtatctgattcactggccggcagacggctggcagcaagcctgggatgacttgcaggagatttatgcctctggccgtgccaaggccattggcgtcagtaacttccaaaagcatcatattgatgagctgctgacccacagcgatatggtacctgccgtagaccagattgagtcttccccacaattcaccaatcaagagctcattggccagctgcgtgccaagggcatcgcaaccgaggcttggagtccgctcggcggtaccggcggcaacctgctgagcaacccagtattggccgagatcagtgccaagtacggcaagtcacctgcccaagtggtgattcgctggcacatccagcgcggtatcgtcgtgctgccgaaatccactcatgccgagcgtatcaagcagaacttcgaggtcttcgacttcaacctatcagtcgatgatatgaccgccatctccgccatcaacaccggcaagcgtaacggtgctgatcctgacaatttcaatttctagacctttatcggtccagatacgcaaagagggaactcttcgtcattggagggttccctcttctatatgctttcgattcggccacaccctaggtgcgagagcctatgtcttgttggtttcggatatagggaaagccccttggagcgtgtgctccgaggggcttcctgtacgtgtggtgcggcggcgtgctactctcccacaccctgtcgggtgcagtaccatcgccgtgccaggccttagcttccgggttcggaatgggaccgggcgtctctcctgggccatggccgccgcaaatc

SEQ ID NO: 280 - DNA, 16699 bp, Unknown
  R101_18m  MAG No. k141_71621
ccgatacggggattcaggggtgatttccagctgtgaagcaccctttgccttggcatggcgtttcagcgcatccatgaagaaggtcaatgcttcggtgtcgtgatagtcgcacatcgggccatcatggatggccgcaaatgtagagaatcgagagcggtgagtttcgaacagcgccgccgcgacgatcttctcgccctccttgagggccagatattcgacgtcgatcccctgcgcggcgcgaaggcgtcccatcgccgaggtctgttggaaattgccttgtggatgcctggcggagaaatcatcgaactcttcgtctgtcaacttcaccagcacaaaatcacgcatgcttccctctgcctccgagtcaatcaggctcaccatgctagcataacgcgcacacgacgaatggggtccgagcagatgaggtgtgcacatcgttcgcactattgcctccacaatggctcaaagaacaatggcccgaagatgctgaacgtccggcttgcgttgaatcaaacgcagtgctatattctctacttggctcttggagccacgccaccttagctcagtggtagagcatccccctcgttcgtgggaaggtcggtagttcgattctatcgggtggctcttgttcatcaagaaggccgacgcactaagcgccggccttctttcgtatcgcccttgctaggtcataggcgcttgctagacacttgcccgattcgggaggggctgagttgctgagccgcgactcaactgtggcttagtcgcggctcagtgcagttagacagcctagacgacttagtgcagcagcgcctcgatagcggggaccaaggctttcagcgccttgcctcggtgggaaatcgcattcttctcggccggagtcatttcggcgctggtcagcggctcgccttcatggtcaggctcagtgctgacgcgaccggcaggctggtcgtccgggacgaacagcggatcgtaaccgaaaccgtgttcgccacgagcctcgcggatgatacgacctggcatgtcgccgagttccactgtctccgacttgatggcgtaccgggcatgcaccggggcagggctcccatctgcagccgtggtgtaaacggtgatgccgtcggcagccactccaccggtcacgtcggcactggcctcggtgtccgggaccaccagcgcggcggcgcagcggaagcgcgcggtacgcttgtcatccggaatatcttcgatttgggcgagcagcagcgcattattggccttgtcgtggccgtgagcacccgcccagcgagcagacagaatgcccggagcgttacccatcacatcgacgatgagacctgaatcatccgcgacagcgggcagaccggtacggatggccacggcgcgggccttgagcagcgcgttctcctggaaggtgacgccggtttccaccgggtccggcaggtgaaggctaccagcggacaccagttcgatgttttcggcatccgcgccaagatcctcttcgagaatgcggcggatttccacaagcttgccttcgttatgggttgcgacgacgatttgcatgggttctcctttaagaaggctccccttgtcaggggagctggacattgcagaccgtacggcttccagccgacaacctcccctaaaggaaggggagctggcttagtctagggacaaagcggcacgctgggcggcttgcagttccttgttgcccttttcggccaagtcaagcagggtgccgagttcggcacggttgaacggacggtgttctgcggtgccctgaatctcgatgaaggtgccggaaccggtcatggccacgttcatgtcggtcatggcctgactgtcttcaatgtatggcaggtcaagcatcggggtgccgttgatcacgcccaccgatacggcggacacatagtccttaagcacgcggctggcggacttgatatggcggtgcttctccgcccaattgactgcgtcgaccaaagccacgtacgcaccggttacggaagccgtgcgagtgccgccatcggcctgaagcacatcgcagtcaagctgaatctgattttcgccgagcgccttcatatcgatgacgccacgcaggcagcggccaatcagtcggctgatttcgtgggtacggccaccgattttgccacgtacggattcacggtcggtgcgttcggcggtggcacgcggcagcatcgagtattcggcggtgacccagccgaggccggagtccttgcgccaacgcggcacaccgggagtaaaagtggcggtgcacatcacgcgcgtgttaccgcattcgatgagcacggagccttcgggggcgtcggtgaagtggcgggtgatgcgcacggggcgcagctcgtcgaccttgcggccgtcggcacgaattatttggtgattgccaagcatgtctttgatttcaaccatgcgccccagcatacgccatccgctctatgcctggatagcaactcgtcaaccatcatcaaaccccagcgcaatgtcattccctgcttacatatccattccatgacacttggctgcacgccactattttcttatgcaccactcgcttacagagtcaatgcctgcgtacctgatgaggattgggaaagatcgtccgctggaataagaatgccatattccatgaaatcttggttgaattgcttgcgctgcatagcgttgagttcgtaatcgattaacggcaaatatgtatagtccatgtcatgcaacggctcttcatatcgatgaagcacgtgcataattgccgcgctcggcagtggggaccaccatccatccaagccataccggtacggaggaaccaatgtcaagcgtctgttccttgggttgatatcccaacgcagaaaacggtataaaccagcgagaaacgcaatccagcacgcatcgttcacccgtgcaaccgctcggacgaacgatatacgttgatgttgaacattccgagcatgaatcagattgacgcagagcatcttcaacgtagaccaggtcgctccgctttctattgcatcgaaatcaggaggcctacgcagttgcgccaacaacatgtgcaattcgtcttccggaatcgtttgcgagggggccacggcttctaggtgaagaccaaaaccagcccgctcaagcccctcggccaaaacatcaaacaacatacctctttgcccacgcaatacgcgaccaattgcagaccgatccaaaccagtacgctgtgcaagctcataggcattccaaccagtctgcgacatcacttcattcagcacagccgcacacgaattaacagggcaaccagataccacaccgtgatgcacgacatcgcactgttctaacgctcgatgctctacagcgcgccgctctgatacgtcatcgttgcccgccgcgttctcatcattgagagtttcactcatcgaagtcaccttgcctcggccgatttcccggtcatttcatcaaaccgcaatcatcatatcccacaatcccatgacgatacgattcgtcatatcccacaattcagagacggtatgattcgtatcgcatcagttcacacgattcttcaacgattgctccgcaaacgattgctctgcacgcatcacggcattctatcggcacactattcctcccaatcagcccaacgcaacatcacacgcaacatcacacgcaacacccctcacgcaacacccctcacgcaacacccctcacgcaacactgcgccatctctgtaacatcaccgacaacacggcaatcccacaacgtctcggtgcaatatcctctgaaatggtttggttttttcactccacctcgtcggcatcctgaccaggataggaatatgtgtcgttccgcaccatgtacaaaacgttgtcaactgacaacgttcttcaaatcaattggataagacaaatggccatttcccgccaattcatctgaatcaagacgttgtcacctgacaacaaaatgtacattgcaacagcatgcacatatacatatttccccggtgaacagtaccccccccccaaaaaaaaacaaggggggccaccctcagctggaaccacgtccggcgaaccgggacgcagttcagcccgaggggacgcggccaatacagccccgggacacagccacagggggtgcaaacacgggggtgcgaccggggttggatctccccgcctcggcggcgatcacaggagtgcggccaacacagacagaggggcacagacagagggaagagtagccaatgtaaccaaagggatgcggccagtgagatacggtcagagaacctgagtctccgtaggaatcactggctcgcccttcatgaggctctgcgcggtgatgggcagttcggacaacgccttggcgtggtagtcgtgggcggccatgatggcgtcatggccctgccactgagcgtcgatctgcccatgatccacaaagtcgaccagcaggttcttccacgtcggttcaggcgtgaaaccggccagcttctcctccgagccggaaatcacgtgttcggcttcggctaacgcgtattcgtaggagcggaatgccagtttgcgaccgggcactgtggccttgtccttggatttcttcatgaccggaaccatcgtgccgtcagcgccttcacgttcggtgagcttgtacaccatcgcacaagtgggagcgccggagccggtgaccagcatggtgcccacaccataggagtcgaccggcgcggtctgcaatgcggcgagcgcgtactcatccaaatcgttggtcacggtaatggtggtgttcgtggcgcccagggcgtccagctggttgcgcacacgctgggccatggcggctaggtcgccggagtcgatgcgcacgccacccagttcgggaccggccacctcgacggcggttttcacggcttcctcgatgttgtaggtgtccaccagcagcgtggtgttcttgcccaatgcctcgatctgcgattcgaaggcgtcacgctcggaatcatgcaccaacgtgaagcaatgcgcggcggtgccaatggccttcagaccatacagctgggcggccagcagattggcggtacccttgaatccgcccactacggcggctcgagcggcggccacggcggcccactcgttagtgcggcgtccgcccatatccatgcaaggacgatccttggctgccgacgccatacgtgaggcggcggaggccactgcggaatcgtagttcagcacggatagaatcaacgtctccagtagcgtgcattcgccgaacgtgccttcgacctgcaaaatcggggagttcgggaagaacatctcaccttcgcggtaaccgcgaatcgtaccggagaagtggaagttctccagccacttgatggtctcggggcttaccacgtgacggtcggccaggaacttcaggtccgcttcgtccaagtggaaatgttccagcgcatccagaatgcggccggtgccggccaccacgccatagcgacggccttcgggcaggcgacgcgtgaacacctcgaacacgcatttgcggtcggcggtaccgtctttcagagcggcgtcgagcatcgtgtattcatacatgtcggtcatcagagccggcgaataatcgaccattgcaaggcctttcctacataagtggtgaagttgcacctaagtgtagtccgggcaaagccatacagcccactggcgaagcggtagactcgatgcatgagattcatcgtggcgttgtggcgctttgcgatcgccggtttctgcttcgtgggcacatatgaggcatggtccaaaccgcagttctgggtgtatttcacgttccagaccggtttcgtgctgggcatcgtgatgctgtgggccggcgcggccacactgctcaaaggtattcagccgcctgcatggcctaagggatgcctgactgtgtacgccatagtcaccgcactggtggcgttcttcctgatgcctccggacgacccggcatacgtgccacaggttattggcatcatgaccaatacgatgctgcacaaaatcgccccgattatggcggttatcgatttcgtgctattcgacccgcaccggcgtttccgctggcattacatgttctcgtggctggcgtacttccctgcatacttggtcttcgtgctggcccgtgcgacgatttggccggggtccggaccggcggccggcggcagtccgtatccgtacgacttcatcaacctcgacgcactcggctggcaagggttcggcattagctgcggcaagctggccatagcgttcttcgtgatatcgctcgttgtctggctgctcgaccgcgcactgccgagcaaggccttactcggatagacgcgcccacgatcgacgcacatcggtcttagtgcccagccggcatccagctcggcactcgatggcctcagcattcaatggaataggcgcggtttttgtactcgcgccaatccggccagtcttcaccggcgtagagggctgcatatggaactgcgtggccacctgacgaatggtgtaggacatcatgactccttactgcggcgacacgccgaagcgtcgcagccgtttgcattcaagttcacttgaactggaaccttagtatccaagaacacttacgaataccactcgatcggcgtcggtttgcccatcgcagaccagcattcgtaagaacaaaaatgacattgtaaggagactcaatgttcgagccaaccaccacctacgctcccaacccgcaccgttacgacacgatgacctacaaccacgccggcacctccggcctcaagctgccggccgtctcactcggcttctggcacaacttcggcgacatcacgccattcgaccagatgaagtccctggtcttcaccgccttcgacaacggcatcacccacttcgatctggccaacaactatggccccgaacccggccaggccgagaagaactgcggcctgctgctcgccaagtacttcaggcaccaccgcgacgaactcgtcatctccaccaaggccggctacgaaatgtgggccggcccctatggcgacctcggcagccgcaagtacctgctcgccagcctcgaccagtcgctcgaacgcctgggcctggattatgtggacatcttctaccatcaccacccggacccggaaaccccgcttgaggagacgatgggcgcgctggctcaggccgtgaactccggcaaggccctgtacgtgggtctgtccaactacgatggtccgacgatggagaaggccgccgcgattctcgccgacctgcacgtgccgttcatcatcaaccagaacaaatacaacatcctcgaccgcaccgtcgaggagaacggtctgaaggagaccgccttcaagctgggcaagggcctcatcaccttctgcccgctggcacagggcctgctgaccaaccgctatctcaacggcattccggccgacagccgcatggctcacgatccgcgattcctcaacgattccgccctgaccgagaaactgcacaagcaggtcgtggacctgaacaatctggccgccgaacgcggccagacgctggccgagatgagcctggcatggctgctgcacgatggtaaggtgacctccgtgctgaccggagcctccaagcctcagcagattctcgacaacatcggcgcgctgaagaacacccacttcagcgacgaggagctcaagctgatcgacgagatttcggctcggtgaccattttggcttccctcgctgaggggagccaagtaccacctttagcgcgtcatttcttcgtagatgcgcttgcaatcggggcaaaccgggtacttggacggatcgtgcttgggcacccagaccttgccgcacagggcgaccaccggacgaccggtcgcgcgtgattcggcgatacggtccttagaaacataatgtgcgaatcgatccgcgtcgccgccatcgtcacgaaccggagactccttggtttccgggcgttccagcaccgacgtgccggcaccttggtccgggttgcgcagcggttcggcatcatcaacgaacatctcggcaaaagtcatggtgcacttctttcctcgtattcaacgattcgactgcactccatcatagattcccgtcgttacccgcgaaacccattggcgcgtaatccgcacacctccacacacccatgtcgcgcatcacgccaccccgccacatacaatgccacataacaatgccgcacacaacgccgcaccgacgccacatacggcaccgcacacactgcctcatacgccgacgcgacaacaatgcacgctcggcagcacgaagcacaccattcgcggtaggctataaggcatgactatcgcagtatgccccggctcgtatgaccccgttaccgccggacacttggatgtaatcgagcgctcggcgcggtttttcgacgaggtgcatgtggtggtggccgtcaacgccgcgaaaacaccgatgttttccgaagccaccagagtcgacgtgatccgccgtgcccttgacaaagccggttgcaagaacgtcactgtttcttccaccgacggcctgatcaccgactactgcaagaaggtcggcgccaccgttatcgtcaagggtctgcgccagaacggcgactatgaagccgagctcggcatggcgctggtcaatcgcaagctcgccggcatcgaaaccctgtttttgccggccgatccgattcttgaacacatctccagttccatcgtcaaggacgtggcccgccatggaggcgacgtgaccggcatggtgcccgattgtgtcgtgccgatgctggccgatgccctggccgaggaacgtcagcggaaggactgatgcactaatgactatgagcgatgaccaccccactggatacgtcgatctgaccaaaccgaatgcggacgccgcatcgtccactccggagccgtccgccccggaaccgcccgcgtctacgcaagccgcgccggcacccaccgaagaggccgatgttctcgccggatcgccgcccgccgcgcctacccctactccggcacagatgcaggccaaagcgcaggcccaagcagctcagcagacccgggcacaagctcagaccgctcaggccgccggcactcgcccctcgttcatgaacgaaatgcccgacctgcgagaaaccacggacgacgacccggccacggtcaagagccgcgaggaattcaccacggtgtatgacatcatcgaccagctcgaggcggcactgggcgaagcgaagtccagcatattcgcccccggcatggtgaaggttgaccgcgacgaattcaccgaccagctttccgagttgaagaaaatgctgccggtgcagttggagcgcgcctccgccctcatgcgcgaggccgagcgccgtctggaatcggcacagacccagtccaacgccatcgtcgcctccgcacaaagccgcgcagccgacatgatcaaggacgccaacgaacaggcacagttcctggccggccaagagaacgtcaccgagcttgcacggcagaaagcgcgcgcgattcttgaccaggcacagaccagagccgaccatctgacccaaggcgcggaccagtactgcactacggtgatgaaagggctgtcccagcagctcggcaaactcagtcgggatgtgcaggccggtcttaacgtgctggaagagcgccagcgtgcggccggcgaacagatgccgcacctgacgctgaacgactatcccgaagcccagtaacgccagcaacgccggcaacatcagtaacgcgaataacgccagtaacgaataactccagccaacatacgaaaggcaccaagaacataccatggcacgagttgaagattccccgtgggccattccggtagcgcagattgcttcgcgcgccggtcaatccaagccgattgacgccgatttcccggccccttccggcattggcgacagcatcgtcggcatcaaggatggtgagcccgtacatgtgagcgggcagttcgattcgattgtggacggcctgatcttcaccggccgcctggtcgcgccattcgtcagcgagtgcacgcgctgcctgaagccgattgacgaggactggccggttgatgtgacggtgttcttcccgtatgagtcgggtcaggacaaggccaacggcaagggcggcaagaacaagaaggacgacgagatcgacatcatcgccggcgaggacgagtcggaagacacgtatccgctgctggagaacggcgcattcgcggacatcgaggcgatgatccgcgacacgctggtcgaatcgctgccgttgcagccactgtgccgaccggattgcaagggcctgtgctcgcagtgcggtgccgatctgaacgaggatcccgaccatcatcacgatgtgacggatatccgttttgccggattggcggggctcaaagcccagctcgaggccgagcagaacggcgagcaggccgagtgacgcgcgcctgaacggagtttgtacgagccgtgcgttaagataacggacgcttaagctcaattgttcgaacgaaatagaggatactcaaatggcactgcctaagtacaagacctcgcgcgccaacacgcactcgcgtcgcgcgaactggaaggccaccgctgctgcgaccgtgaactgcccgaactgtggcgctccggccctgccgcacatggcttgcccgagctgcggtaactaccgcggccgcacctaccgctccgccatccagccggctcacaccaagtgagtcctgcgataacggcttgaatgaaggccctgccatcgacgggtggcggggtcttcgcataagtgcaccattacgtacaccatcgcatcgcaaacaacacaacacaacacacaacacatcaccatcgcgtgaaggaccatacaacaatcatgagcaatgaaaccccacagcagccgacgccggccaacgagcttcttgaagcgttgggcaccactctcagcccggatctgctcgtgcaggcactcacccaccgctccttctcgcatgagcaccccggcgtggccaattacgaacgcctcgaattcctgggagacgcggtgctcgaactggtctccactgaaacgctgttcaccattcacccggatatgaccgaggggcaactggccaagatgcgcgccaaggccgtctccgaagacgcgctgagcgccatcgccaaaaccaagctcaaggtgggcccctacattctgctgggtcacggggaaaccgagcagggcggcgcggagaagaactccattctgtgcgacatcgtggaatcgctcatcggcgcgaccttcctggaacacggcatcgacgaggcacgcaaggtgattcaccggcttattgacgacacgctcgccgaagtggccaccgagggcccggcacttgactggaagacctcgctgaccgtcaaggcgcacggcctcggcaaggatgagccggtctaccatatggaggtctccggcccggagtacgcgcagatcttcaccgcgcgcgtctcattgggcgagaacggcgacatcatcggcatcggtaagggctccagcaagcgtaaggcgcagctggcggccgccgaagcgggctggaagtcactggactcgctcaagacgcggactaagtaagcccgctgtcagatttgcgaatagactgataccaacatgagcgacgagtcgtgccggggccacaagtctcggagaagcgactggaatcagacacgcgggcacccggccccatcccaaggtcgggcaggttcgcggcaaaatctatgaggtgagaggaatcatggctttacccacgcctttgcaggcattcagcggcgtgccgaaaatcaacgcggcccccgataagcagaccatcgtcgatggcgagaagatgactggcgcccaagcgctggtgcgttcgctggaggatctcggcgtcgaggacgtcttcggcattcctggcggcgcgattctgcccgtctaccacgagatcaaagacaacacgaagttccgcttcgtgcttatgcgccatgagcaggccgccggccacgccgccgaaggctacgcactggccactggcaaggtgggcgtgtgcatcgtgacttccggcccgggtgccacgaacgtggtcacggccattgcggacgcgaatatggactccgtgcccatggtcgtgattaccggtcaggtgggcgtgcaggccatcggcactgacgccttccaggaggcggatatcgtgggcatcacctacccggtgtccaagcactccttcctcgtgacccgcgcgcaggacattcctcgcgtgctttccgaggcgtactacatcgccaacaccggccgccccggcccggtggtcgtggatctgaccaagaccgcacagaccggcgacatgtactactcatggccgcagcgcatgattctgcccggctacaaccccaccaccaaggcgcacggccgtgtgctgtccgacgcggcgaagctgttctctcagtcgtaccgcccggtgctgtatgtgggtggcggcgccgcccgctccaacgccggcgcacaggtcaaggctctggccgacctgaccggcgcccccgtggtcacgaccctgcccgcacgcggcatcattcccgactccgacccgaagaacctcggcatgctgggcatgcacggtacgattgccgcaaccggtgccgtgcagcgcgctgacctgcttgtggccatcggtgcacgtttcgacgaccgcgtgaccggcaagctcgacgccttcgcaccgaccgcccgcgtgattcatattgacatcgacccggctgaaatcggcaagaaccgtcagcccgacgtgccgatcgtgggcgatgcggctaccgtgctcgacgacttgattcccgaaatccagcgcacgcaggccattcagggcaagccgaatctggccccctggtggaaggcgatcgacggctggcgcgaggaatacccgatgacgtgggatgagccgaccgacggatcaatggccccgcagtgggtcatcaaaaagctctctgagatggccgatccgtccaccatctgggtgaccggtgtgggacagcaccagatgtgggcttcgcagttcatcgatttcgagaaccagcacgcttggatctcctccggaggcctcggcacgatgggctacggtctgccagccgccatcggcgcatccgtgggctcggcccgcgagttcgagggcaagaagccggtgtggctgatcgatggtgacggttccttccagatgacctctgaggagctggccgccgcgttcctggaccacgctccggtgaagatcgcgattctgaacaactccgtgtacggcatggtccgtcagtggcagacgctgttctacgagcaccactactcgcagaccaacctgctcgatggcgaggcgcacggtgccgatggtgcggcggcactggtcgacggcgatgcgccgctcgaagtgcctgatttcatcaagttggccgaggcatacggctgcgtgggtatccgcgcgttcaccgaggaagaggcgattgccgccatcgaaaaggcgaaccagatcaacgaccgcccggtactgattgatttccgcgtgtggaaggatgcgatggtgtggccgatggtagccgccggcgcttccaacgacgaggtgacgtacaagcccggcatcaagccgctgaccggcggcaccccggctccgggaaccggtccggacgagcatgcgaccggcgtgttcgagcacgagaccgccgctgccgctgcgagcgagcactgaggagaggagaacactcatggctaactatcctgcatcccagcctggttcccagcgtcatacgctgtccgtgctggtggagaatcgcccaggcgtgctggcgcgtatcgccggcctgttcgcccgtcgtgcgttcaacatcaactcactgtccgtctcccccaccgagcgtccggacatctcacgcgtcacggtgaccgccgacgtggaggccgtgccactggagcagatcatcaagcagctcaacaagctgctgcacgtgctgaagatcgtggagctcgacccgaactccaccgtggaacgcgaactggtgctcatcaaggtggccgccgacgaatccaaccgttccgacgtgctggagatcgtgcgcctcttccgcgtgcgtgtggtggacgtgaatccggaatcgctgaccattgaggccaccggtgccgaaggtaagatcgatgcgctgctggggcttttggagcattacggtgtgattgagctggtgcgctccggtgccgtagccgtgacccgcggcccgcgcgccctaagcgaaaaggtcgtcggttccgaggttaccgggcgctgattcggcgactgcggggagacccagtccaagctcaaagggcggatgtgcatgatgcatatccgcctttttcatgcgtgcatacctcatcacccgtgctgcaagcaaaatgacagcaccttatgctagcattatgacagcaacaaggaggtgcatcatggcaacattgaccatccgaaaaatacccgatgagcagattcaacagctcaaagaagtggctgagaaaaacaaccgctccatggaatctcaggtgcgatccattcttgaagaatggctggccggcacggtggcgcatgaaatcacacgaaagaccaatttctatgacgagatccgcgaattcatgaagaacatggattttgagggacttgacaagggggaactcccactatccgagcgaaattccgccgattcccgaccgccagtatcttttgaataggaatcggccatgattattctggacaccaacgtcatcagcgaaatcatcaagaaacagccagacgaacacgttgccaattggctgaggaaccaagatacaagcaatctggcaaccaccgccatcaccgtcgccgagttgttggtcggaatatgtcgcatgcctgaaggcaaacgacgaaagtacacagatacgaccgtcaagctggcgcttatgacattagaggacaggacgttcgcatttgacacccaggcagctgcggattatgcccatatccttgtcgaacgcgaacgcaggggcacacctaccagtattcaagacgccatgattgcggcaattgcctgttcctgggatgcggccatagccacgcgcaatatcaaggacttcgaaggtaccgacgtggaattgattaatccgtgggagtttgcatagcggtaggccccggcaaactaccgaggccttgtgaacgttacggtttctcccgctactccaattgttcggagagttcgagccattcggcttcgagattatcgctttcagtattgacggcggtgagttgttcattgagcttgttgagaccctcgtagtcgctcgggtcatgggcggccatctgtgcctcaagttcggtcttccgctcttccagtttggcaagcttgcgctcgatggcattcacgcgcttggatgcctcgtggaaggccttgccggtgagcttcgaggtggagtcctcaccgttattggctccctctgacgagggagctgtccgcgaagtggactgagggagagatgcagcaacattgacggcggccgccttacccctaccagacttcgccgagctgttaccggtgcccgcgaagccaggcgtgtcagccggcaatcccttgccgttcttaatagcctcaaccatatcgaggtaatcctgcacaccaccgggcagatggcgtaccttgccgccaatcagcgcgaactgctgatcggtgacgcgctccagcaggtaccggtcgtgggatacgacgatcaacgtacccggccaagtatcgagcaaatcctccatgacggcgagcatatcagtgtccagatcgttgccgggctcgtccatgatgagcacgttcggctcgtcgagcaggatgagcagcaactgcatgcggcgcttctgtccgccggagaggtcgcgaatcggcgtcatcaactgggcggattcaaagccgagacgctccatcaactgtcccggcgttacttccttgccatccacaatgtagctcggcttatagcgggaaagcacttccttgatcttgtactggcccagtttctccagctcatcgaggcgctgcgagagtacggcgaacttcacggttttgccgatgttcacatggcccacggtcggagtaatcgaaccgtcaatcaacttcagcaatgtggacttgccggcaccgttcgcaccgacgatgccgaagcggtcgccggggccaatcagccaagtcacatcgtcaagaatctcgcggccggaaaccgtcaccttgcgtgcagccgaggtgacaccggctgcagcagtgccatcatccgaattcgttgcagcagtgtcaccgccgatggtttcaccacccgtgttcatgcgacgaacctcgcgatcgtcagcaagctgcggattgccgctctcagcctcggccttcttacgcgcttcctcagcggcctcgacggcttccggcacgccggcgtccaccaggcgcaggtcagtcatgtcggtgaccgccacctcaacggaaccgtgcagctgcggctcggcgtacatggcgttgaccacatccacgcgggaagcggacgcggagagcgccgccacatccgggtcgatatcggccatgccctgcggtttttcgaaaatctgcgtcacgtcgaccaaatcgaccacctgtttgccgaggcgtgaggtggccatttgcttcagttcaagtgtgttacgcatcggcggcacatcggcaatcaattcgcgtgcggccttgacgtggaacttctgcttggtgga

SEQ ID NO: 281 - DNA, 26052 bp, Unknown
  R101_18m  MAG No. k141_71888
ctatggcgtgcgtaaggcggcggtgcgcttcctgcaacacggtcacacccgtgtgggcgcggcgttcaccgatacaccgacttcggagctgattcaggatggctggaagcaaatcgtgacggaaagcgacgccatcgaatgcccgttcaccatcaccggcattcagccgtacaacaccagggacgtcaaccaaatcgtggacaccattctggattcgggcgtgacggccatgctggtgcactccgattatctggcgatcgccatcgcgcagaccctggagcgccgcggcaagcgcgtaccggacgatatctcgatgatctccgtcaacggctttgccacgcccagctcccgcccgctgaccgtactgcgctcgtccgataaggatctggccgaggcggccatcaacctgctgatcaaccgcatccaaaacccggattctacaacccgccacatctacgtggacccgacgctgaccgatcgcggctcggtaatcgataagcagtaaccccacctccctctgacgagggaggtggcatcgcaaagcgatgacggagggagaggcaccaggcctctaaccgttacgagcgaagcatcggccagagcaacgcccttactctttacaactccacggtctctttgccgggatcatccttgacatgcgcgaacttggcggccagagcctccttattgcgcttttcgtcttcttccttggcctgacgcttagcctcgtccgggttccagagcacatcctcacggtgcttgttccattcggcaacggccagaggagcgatgtattcggcggtggcggtcagggtgtctgcgtcggcggctttggcacgggcattaagcaacccgaggatctgctcgtcggtcaggcagatgcgcggcaccgagcactgctcgcgcagttcgttgacgtagagcagaatcggcagaatcttggcggcagcattggcgacactgtccgctgaaccatcggccacagcatcaccggacacctcacccaataacgcatcgcacacggcgagcgcggtggcgaaccgaacagccacatcggcgggcttggcagacgtggccagacgaccatcggcttcagcgtcggcctcgacctgggcttccatggccgcgaccgcctccctcaccgattccgccgtcgcggaatcccagtcgattcccaacacgtcggccgcctcaacgatcagcctggcatcaccggactcggcgtagtcggccatcgtgtcgtaggcgtcattggcggcgagcagggcgtccacgatgctctgcgggcgaccgggaatctcatcggcaccttcgtagacgaactcggcgtccggcacggtgacgtcctcgccggtcaggatgcgggcgaatgcacgggtgacgcgcacctgcaggttctccgcgtactttgcgtcattgtccatctgcatggcttcggtcagcggccacaggccgatcagcgccgagccggcttcggcggcctcagttaccgccggcaatgccgcgacctgtgcgattgcctcacgattgagttcaatggtcatctatgctcctttgcgtccaccactcgattgcagtgcgtcttggctcccctctctgaggggagccaatgtcctaacaccagtgtgccgttacttgacgttggctgctgggtcgacatacgtgattgacatcacacggccggtttcgttgtcgtacgtcaccgaggtcacggaggcgagcgccgtgtgccgcaggaacatccagtgctcggggtggccggtctccagataatggcgataactgaaaatcggcgattcgtggctgaccaccacaatctgctcgccggggtgctgggccaccttctcgcgggcgaagtcgtccatacgcgccgcgatgtgctgataggactcaccccagctcggcttgtacaggttggtgacgagcttccagttgccgttcttccacagcgcgccctcgccatggccgatgcgcttgccacggaactcgttgccggcctcgatcacccgttcatcagtggtgagcgtgagcgaagcctcgccacgagcctcgcgcacggggttcagcgcatcgagaatcgcgccggcggtctcgcgcgtacggtcgagcggcgaggagtagacggctgcaatcgtattggtttggggattcttagccaagtacgtggcggtggcttgagccatgcgacggccaaggtcggaaagatggaagtcgggcagtcgctcatagagcagatggtcggggttatataccttgccatgccggacgaaatggatggtggtagcgctcatgagccgcctttctgcttcccgccctgaagggcatgagaacgttgtcttaatatctccaatctaccgcgtgtcgcggagtggacacccgtagagtatccgtgacgcaaatatgcggatgggaaaatccgacgcaaactttgcgcgaccatggacaacacatcattcgatgagggcttcgccggcaacgccacgccagcgggggacatccaatcgggagcggaaaggagcgtagtgctgttatgtccaataactcgtccaactcgaactcgagcaccattctggccggcatcaaggaagtaggccacaaagtctttggtgggtatgcggaactactgcgcattccgcataccgcccgttattccatcggctcggtcatcgcctgcatgccattcccgatggtcggcatgaccatcaccatttccgtacagcattattacggcaactattcgctggccggcatgctcaccgccattcaggcgattgcgctggccgtggccacgccgctgctgggcaagctgaccgacaagttcggccagaggcaggtctcgattccgacgattatcgtttggattgtggccgccatcgcgctggtgacggcgattaccaaccgcgcgccggaatgggtgctgtactgtctgacgccgttcctggccgccattccgccgtggggcgcgatgagccgcgcgcgctggaccaagattcttaagggtgaccgggagcgcacgaaccgcgcgctgtcgctgtgcggcgtgctcgacgaatgcatgtgggtgatcggtaatccgctggcctccacgctggccgtgatctccggtttgctggcgttctcgttcaccggcatgtgcgtggtggtcggtgcgctgatgttcctgaccgagctgaccactgagccaccgtcgcagaccgcgctggcgcgtgccgagggcatctcccgcaaggaataccgtgagcgcgaggccgccaaggctgaggcgctgaaggtggaaaccgccgccgaggagacccgccgccgtcttgagcgtgaaggcgtgaccgatgaggccacgattaacgcagccattaagcaggcggtcgccgatgcgcgttcgggcaagaaggcgtccatttggggtccgggtctgattgcggtgtgcgtcacctggttcggtttgggcgcgttccagtcggctacgggcatctccatcatcgcgtttgccaccgaagcgaatatgaagcagtacacgggctttgtgtttgcctgcttctccttcagctcgctgatgggcgcattggtgtatggcgcgaagaactggtcgattgccctgtggaagcgcttctacttctgcctggccgtggtgaacatcggcatcagtacgttcctgttcgccaagcatctgtgggtgatcatgatcatctacttgattattggcgtatgccaggccccgacgtggatcaacggcaaccagctcatgttgcatctggtgccgccctctcgcttgaccgagggcatggcgtggatgggtgcgatgaattctatcggctcctccgccggttcggcgattgccggccagttcatcgaccgcatgggctcgcacggaggcttcatggtggtgaccaccttggcactggcctcgctggtgattgcactgatcggcttcaagcagatcaagggctccaccgagcagccgaccctgactgaagtgagtgtgtgagacgtatgctaagccccctctgacgagggggcttagcatacgtcaaaacgctacttcggccagcctttgggcgtgtgctccaaggaccagatgccgagcttgtgggagaagctgttctgccacttggcttcaagctcctcggcattcagtcgattttcagcggacttcagacggttcatcgcattggtgtgcgtatcgtcgagcagccacttgcgaatcaagaagttccagatcattaccacggcagtggccaccaacttgccgatattggtgcgcaacagatattcggcatgctgcgatacataggcatcatggttcataccataggtggaaatccagataatcgcgtcattcatgaacagaccgactacagcgcccgccacgaagataaggatctccatccagcgtgccatgtcatcacgatgcttgaatacgaatttcatgctcgccagatagttgaaaatcagcgagatgatgaaagagatggtggcagccagcacgttgtgcatgtggaatatgccaaccaataggttgaggataccccagtcgataacaaaggcgataacgcccacaatgccgaacttcatcagctgttcaatcagttttctcacaagagtattcaacactattgggctgactgcggaacgtgtattggctggaaaggccaataatctccccaattggccttgccccggtccgttctgcgagcaggttcctacgtccgcatgccatgttcaacagcagccgctgaggctagactggaagtgaaccgaatcaaggaggaattatgcccgttattcacactcatgtgtccgtgtccaccacccccgagcagcgtgaggcactgaaggccgcctacggcaaggcgattaccgctgtgccgggcaagtccgaaggctggctgatgtgcccgttcgaggacaatatgccaatctacttcggtggtagcgatgaccagcccgccgcctatgtggaggtcaacgtattcggccgctctgtgccgggctctgcttgggaaaagctgaccgaaagcattatggccgcgctgaactccacactcggcattcccgaggaccgcacctacatccgctacaccgccaccaccgattggggctggaatggcggcaacttctagttgccaccattcccctcgcagcatagctgttcgcatcgcctacggaaagcccagtgggctttccgtttaatggctcagggtggcaactagtttgcgtattctggctcccctcagtcagcttagctgacagctccccctcaaagagggaagctcagatgtagaaagcccgccggtggcgggctttctacgtttcaaggggctgatttccaacattcagaagctctactagcgtttcaaggggcttttaaaacaagaaacccggagtataaacattgcaatttcaatggtcatactccgggtttcgcaatcgaagagcccctcgaaacgcagatagacctccggaaaaccggaaatccgcccctcgaaagcgagttacctcacctcatgcctgtcatcacacaatcttgggcatgggggtggtgaggctggtggtcaggttgacgtggaccagaccggcaccggcatgcacctcgaccttcttcagggtcacggtgcgctcttcttcgggggcgcggtcgttgtcggtcatggtcgccggggacttgaccgccacgaacgccagatcatccagcgagatgcctgcgctctggcacagttccatggcctcggacacggactcggtgaagcccggcttgtagatcacgcgctcggccggtacgccgtaggcgttctcggccacccacttggcgttctcggtcagggccatgcccttgtgcgaatgcggttcggccggcatggagccgttctgcaacgcatcgacgaaaccgtcaagctgcggggccagcgcctcgccgccgtcgcggaacaggttgccgatgatcggcgtacggaagcccagctcgtcggcggtggcctgcagggacgggacctgatcgtcctcgccttcccacaggttgatgagcgggaaggtcggaatgtccaggttctccaggcgctgcacgtggaacgggtagcgccaggccagctcgggatcgtcgcgccaggtggaggcgcgggtcaccacgatggcggcggacggccactgcgcgccatactcgcgacaggcgatgtccagccacttctgggcaccggcgtcggtgccgtaaccggcttcgaccacaaccacatcatgcagagcgcaggccatttccacggaaaccagcgtcggaatgccgatggacacgttggcgaacgggccaccgtgcacgtagaccggggagccgttcacggtctcggtcttggccggcttgaccgcgtcggccagaatgccggtgatgcgccacagatccacgaactcgccgaaggtcacggccttgccgtccttggtaccggcgatcatcttggatacgcgctcggaaatctcgtccatcgagcgggagagcaccatgatctgcatgagctcgcaggtcggcgtgagcacgaccttctccggcacgttgcccttgccgtagtccacggcggtggagcgcagggagcggctcggcacctcggagacacgcggcacgagaatcgtgtcaagcttgccttcatcgatggccttctcggcgaaggagacgagcaggttctgggccgcctcgatggcgcccatttcgccgcacagaccccagtcgatgagctcggggtgggtcagggatgccttgccgccgccggaggcaccgcccttggaaccggctgcggtgatgcccatgctcggctgacgcagcacggcggccgcatcaatgccacgcttgttcagggcgtcgatcaaggcgatggtcgtggtggtcttgccttcgccgcgcgatgccttgagcggcgtatcggcggtgacgagcaccaccttgccgtgcttgcgcggggcgtccgggttctcagccaggtacttcatgtaaccgaatgcgtcgatcttctggaccaggccgtactggctggtgaagtcttcgatggtggtcatttaatgcctttctgtgttgatgatggcggagcggggtggtggggcggccgccgccgcctcttcgcctagaaacagcccactgggctgtttcttaacagcttagcctctcagtccgcttcgcggtcagttcccctcagggaggggagctcaatacggactaaaagtcggacatgtggaagccgttcttcatttccatgctgcgagtgtacagcacggagtcaagcagcttgtcggtttcctccttgagctggtcggccatggtctggttggcggcggcgagaatctcgcgcacctcggggttacgcagcgcggcgatggtctcgtccggggtcatcggctgcacatcgccatccacgttgtcggcctcgaattcctcttcagcggcagactgcgcggcttcctcggcggccgtcaagcccagacgggcgatctgctcgtcggtggcggcgaccaagcggtgacccatcgcaccggtcttctcctggtagcgctcgacggcgttggacgtggagcggaaggcgccatcgcacagggcggcgatgatgcggttggcccagtagaagttctcggacgtcacgcgggtggtggtgtcctcaaggtaagcgggcgtggtgtccacgttcgggaagaacggtaccagcgtgttgaacgggttggacccgtatgccatccactggatggcgcgggaggcctgcgggcggtacgggcggatctgcatcaccgcaagctggctctggcggttgatgccgatcgtgcggtacatgtggcgggtgcgctcatcgcccagctggccgtatggatcgaacggggtgccctggtagtgggagctcaacacgtacttgatgtcctcgatggtcaccttgcgctcgggctggcgggcccacgggatgtcgtcggaggtgggcttgtggtcggcgtccgggccgtcccacacctcgtcgtacgggttgaggaagcgctgcatgtaccaggcgcgcggggtgttgtacacgtggtcggagtcggagtgggagccaaaggcgtcgcgcgggttgaacggggtggtgttctccaccgcgaggtccaaatggttggtttcgatgaattcggcgagatcttcggagcacatgtgcgcttcctggtcgcccagagcgtcctcaaggtcgaattcgtcgataccgagctggttcggcatggtcacgtaggcctcgtccggcacgcgcttggcaatccagtgatggccgcccacggtttccagccaccagatttcgttggagtcagagaaggcgacgccgttcatctcgtaggtgccgaactcctcgagcagtgagccgagacgctggacgccctcgcgcgcggtcttgacatacggcagcacgatggtcaggaagtcctcttcgccgatgccgccgggcacctcgagctcatcgcccctggccggcgtgtattccacgaacgggtcggcgccgagcacgcgctcgttggtggtcagggtctcggtggcgctcatcgccacgttcgcctcgttgacgccggcctcgccccagatgccttccttgaggtccgcgttcggcacggcggtgtactgcagcgggtcgtccggcagagtgatggtcaggtgggagatcactgatttgtattcgcgcggctgttcctccggtttcacgacgatgaagcgcttcgggttgaactcgccgttcgcggaatcctcgttgcgggcaatgatggtcgaaccgtcatagctcgcgtctttgcctaccagaatcgtggtgcaggccatagtgtgatggtgtcctttctcttattcaagctccccttgtcaggctgagccgttcagcaaacagcccggtgggctgtttgtaggcgagggtgggagataagtcccaccacagatgttgcgggcggtagcccgtccgtaattgcaggacgagctgtctcgcaaagcgagactgaggggtagtcactctagctgtctctcccccagtccgcctacggcggccagctccctcatcagagggagctcacatacgccaactaaaaatcacgccttaccggtcaggaagatgccgtcggtgtcgggcgcttcgccgctgttgcgcagcgcgtgcaacagctcgttgagccagaagccctgattcaagccgggcaacggcttcttggtggcccacacctgcaggtagtactcgtggtccttgtccggcggctgcggaccgttgtaccgcatgatcaccgttgggtcagtgctgcggcccaagaacttggaggccgaagaattgcggccttgcacggtctcgggaatcatggccggcagctgacgggagaagtccggcgggatggccaacgcatgcgaatcattgaagtcgtacatcagcgcgtcaatcggcagattggccacggaccagtgaatccactcgaagccacagaccggaatcgaatccgggtccacgaactcccagtgcaggtaacgggcctcggggttcacatcaccgatgtagaacgggaaggagacgaccggcacgccgccgttgaagtactcaggcgcggcggccttggcaaaatcgtccggaatgacggtgaaatcggcggaaatcttcatatgtcccagtatcgctcatatgtgtgacgtactgggggctgtgcgttacgggggtctctcccccagtctcgccgcgctcgacagccccctcgtcagagggggctggttgcgtcgggttatggaattagggcgcagaagagggattcgaataccagtagcgggttgccgttgccggctagacgcttgcgggcgtgggccacttcgtccagacgggtcacggcaccggcccggttcaaccgcaccgacaattcggtgatcggcgagcggttctccaggttgatgaggcccaccgaatcctccgcattgttctgcagcaccgccacatcccggtagatggaggcgatggagttcagcgcacgatccaatacgtcgcgcgtacggcgggtgaccaaacgcttcacatcgtctttcttggcgatctggttgaacgcgccacgcagtttcggcgggatgcggtcgttcggtgccagtccgttgatgcggcggaattccgcttcctggccggcggtgatgcggcttgcgtccgcctcggcctgggccttggcattgtcgataaggctgccggccagcagcaccgcgtccgaggcgcgagcgaggttcagtacgcccaccaccaattcgtcgcgatccgtcatcacctgctcgtcagtggcgtacaacttggcgatgccgatgtgtccctcggccaaacgggccgcacgctgcgccacttttggctcgacattggtggtggaggtcaggaatccggccaccgcctgggtggagggcacggcgaggttcacgatgcgcgtgcgcgagcggatggtgggcagtacatcctgggcactcggcgcacacagcagccagatgcagtgttcagccggctcctcgatctccttcagcagcacgttggtggtgcgctccagcatgcggtccacatcctcgatgatgatgatgcgccatggtgccgtggcaggcatttgctcggaggcggtgatgatctcgcgcacctggtcgatgccgatggtcactttgttggtggccagcactgtgacatccgggtgggtgccagcgagcacctgttgggtgacgcgcgtgggctcatcgttcatgccgtggtcggggctttccagcgccgccgcgaatgctcgggccatattggaacggccggagccgggaggcccgcaaatcagccacgactgggtgatctgacccgggtcgccctgcgcgatgcgactgagcatgtcgattaccggctgctggccgactagtgaatcccatacgctcatcggacaccgcccatcgtcacggctcctgtagacgccccggatcgcgccatcaccgtatccacatctgcaacattgtcccgcagcagtgtctgaatgtccgcttcgatggcggaccacacctgttcgatggactggctggcatcgatcacgtggaaacgattcggctcggccacggccaagtcgaggaacgcctgacgggtgcgggactggaagtcgctgccggccgactccatgcgatcttcggcatgctcaagacgattgtgggaaagcgccggatccatatccagcagatatgtgcggtcgggcagcaggttgttggtggcccacatgcttaaggctcgaatctcttctggcgtaagttcgcggccaccggcctgataagccaaggaagagtctaaatagcggtcggtgatcaccacttcaccgcgctccaatgccgggcggatggtttcggcaacgtgctgggctcggtctgcagcgaatagcagcgcctcggcgcgcggtgcgatgtcgacggcgcccccatccacaccgtgcaacagcagttggcgaatggccttgcctagcgcagtgcctcccggctcacgggtaacgaccacggtacgcccctgagcctcaagatacgcacgcagccgctcgacttgcgtggtcttgcccacgccatcgacaccttcaaacgaaacaaacagaccgctcatgctattgaccttagcgttaggcgcagagttgtgcccaacaggcagttaaaccagctctacctccgtttcaaggggctgatttggtcttttctgaaggtctacttccgtttcgaggggctgttacccaagtagacaacgtcccaaaacggcggaatgacgttggcgcggagccgttcatactcgtggttcagcagatgaccagccccttgaagcggaagtagatattctcaaaacgagaaatcagccccttgaaacgcaagtagagcaataattccgctcagccacgcttgggaattacggcggggcgctcgtagccctcgttggcggtcagccagtcgacatccttcttgacggtggcggcggtggagctgagcttttcggcgatgcgctggttggaccagcccttgtttgccagcttcttcacctcggcacggcgtccggcgcgcttggcctcggcggcattggtcgcagccgaagcagcgcccttcttggctcccttggctcccgacttcgcggcacctgcacgcccagcaccgcgacggccacgggtggagggaccagccgcacgcttttcggcgagcagtcggaaggcgtcatcaggggtgatggattcaggcgtgtactgacgcggcaccgtgcggttggtctcgccatcggtgatgtacgcgccgaaacggccgtccttgatggtcacgttcttgccggtgttcgggtccttgcccaaatcacgcagcggcggcttggcggcaccacggccacgcccgcggccgtacttaggctgcgagaacagttctttggccttgtcgatatcgaccgtgaagatctcgtcttccgaggccagcgagcgggtctccgacttgccgtcggcacccgtcttggtcagataggggccgtagcgaccgttgttggcggccaccgtgcattcggatacctcgccggtttcggcgttggtttcctcgtatgtgcccacttcgcgcggcaggctcagcagctttagcgcgtcttccagcgacagcgattcagggctcatcgtcttgaacaacgaggccatcttcgggcgcgacgcggcggcggccgcggccttcttcgaacccttcttggccgcagaagcaccagcagtatcgccagcagcgccagccgaagcctcagccggcggcaccagcgccacatacgggccgaaacgcccattgcgcacctcgacggtaccgccggataccgggtcaacgcccagctcgcgcggtccaccggagtggttgtcgatcaaatcgcgggccacggccaccgtcagctcatccggcgcgatggtgtccggcagggaggcgcgcttcgggttgccttcggcgtccagatgctccatatcttccagatacgggccgtaacggccgacgcgcacgtgcaggccgtcgccgatgtcgatggtgttgatggcgcgcgcgtcgatctcgccgagctgcgcgacctgctgttgcaggccttcgtgcgcctcgtcggcgttgcgggcggcgccctcgccggaaccgaagtagaagtgggtgagccagtcgcggccggattcctcgccgtgggcgatgcggtcaaggccgttttccatctcggcggtgaactggtagtcgaccagcttggggaagttcgtctcgagcaacttggtcacggagaaggcgagccagctggggatcagcgcacggccacgctcgtatacgtaaccgcgatccatgattgtggagatgatgctcgcgtaagtggacgggcgaccgatttccttggcttccagcgtcttgaccagcgtggcctcggtataacgggccggcggctgggtttcatggccgtccggttcgatgtcgcttgcctcgacctgttggccgacgctcatcggcggcagggaggtgttggattcggaggcgtcacccctgacggccttgacgtccgtcttgccggcggcagcagcctggtccgagccagccccagcgccgggagcggcggctttgggcttgcgcccctcccccgtggccttcataaagccggggaattcgatgacggtgccggacgcttggaacacggcctcgccctcggtggggccggccggcgcagacaggcgcacggtggcggtggagccggtggcgtcagccatctggcaggcgagcgtgcgctgccagatcagcgtgtataggcgcagctggtcgccgggaagtttggaagccagctcatccgggtcgtggaagcgcgagcccgccgggcgaatacactcgtgggcttcctgcgcgccagcggttttggtggcgtactgcttgggctcggcggagaggaacttgtcgccgaaatggtaggagacggcgttgcgggcggcggtgatggcctcctgcgacagcgtcaccgaatcggttcgcatataggtgatgtagccgttctcgtacaggctttgggccgcgcgcatcacgacgcgagcacccatgccgaggcgattgccggcggtctgctgcaaggtcgaggtggtgaacggcggctgcgggcggcggcggtacggcttggtttccatcgacatcacagtgaaatcggcggtcctcagcgcttcagccacggcagtggcaccagcctcatcaagctggcgaacgttcgccgcgaacccgtccggggtcagctggccgtcggcaccgaaatccttggagccggcgagtcgcttgccgccgagcgcgatcatgcgggcggagaattcggcacgctcccccagcgcgtcaggcgcggccaacatggcgacgatatcccagtacggcacacgcttgaatgccatgcgttcgcgttcgcgttccacgatcaggcgggtggccacggactgcacgcggccggcggacaggcccgggcccaccttgcgccacagcaccggcgacagctcatagccgtacagacggtcgaggatgcggcgggtctcctgtgcgtcgaccatattgccgtccacgtcgcgcgtgttgttcagggaggcgttgatggcgttcttggtgatctcgtggaacaccatgcgcttgaccggcaccttgggtttcaaggtctgcaccaagtgccacgcgatggcctcgccctcgcgatcctcatcagtcgccagatagagttcgtcggcgttcttcagggccgatttgagttcgctgaccgtacgcttcttgtcgccgtcgacgatgtaatacggcttgaacccgtcgttgacgtccacgccgaacttgccgaacttggccttgtctgccgcgggcacctggctgggctgcgcgaggtcgcggatatgaccgaccgacgccatgacggtgtaccccttgcccaggtagtcaccgatcttgtgggccttggtcggagactccacaatcaccagtttggtagccatacccactccttatgtattgcgcgaaacacacgacgtttctggcgtcataatactcatgaatcatatccaactgccaaattccgccgttgtgccgggcaaattcggccgttcgcacctcatgttttaccgtttgggcggtgccggcggagcgccgatcaggcccagcctgcttaagggcgctgcagtgatctgacgtagggccagcaacagtccgaatgcgagcatggccacacccgtaatgcccacaacagcgctgacattcgccccctgaaccgcccaactggcgctgacattgagccccggcaccacctgccagatcacataaccgctgtaggcgagcaacagcaggcccccggtaatcaacacgctgccgacgatctgcacactcactgaggagacgcggtggcccggctcgtccatgccggacttgcgtgtaaccgccagagcgagcagggccaatcccgccaccagcaggatggacatcgccacatccgaagggcgatgccattgcccgtatatcacagagacaccgacggtcgccgcccaaaccacgccgatgacgcccgccaaagctcgaaccgcgcgaggcacggtaagcagcagaatcaccgcacaggctgcggccagcatcgtgtgtccggaaggcgcggaattagcggcaggcgattcagtgttgatgatgaacggacgcggcaacagacccttgatacgggtgacggccaagcagaccacggcgaacacggcgatttgcccggccaaccaccagcggcgtcgaatcagcgccgtaataatgccgattgcggcaattgtgcagctgacagcgataaccagccaggattgtgcgacggcgttcatcatgccggtggtccaggacggtacatcgttgtgcaggtttttccagaccagttcgtcgtacgattgtccgttttcggtaaacacgcacccccaccacacgccgaagccaatagcgatcaggagcagaccgaataccacgcacagtacgcggctggagattcgcgggcgcacggtaagcgggtcaagccgggccaagccacggtcgatatcagatgccccatccgcatcgtccatgcccagcggcctgaaatcccctaaggagcctgatgtggatgccgatgcatctgaaccggagaccgggccgagcgcagccaatgggtcaacaacgttcgacgacgagtcaggctgcgctgcgcctgagccgaccagattgaccgccgcatgcgggtcgcgaattctaggggtctgtgcgtcattcatacgttcgactgtacggccgcgccccggacagggagccgtgctcgtgccagctcacggccaaatccgcacaaatggaaaacctccacgcacccgtcagaggccacttacccttgctgcattcctgccctgggggagttgggtgacatagcgccgcgtggaggctggggataagtctatggagacgtatggaccagcgcagcgacacgaaacgtgcgcgccgggtcgcacggcaggccaaccagcgcattcaggcaatattcatgcagcatcaaggaacgtgcccaattgtaagaattccggaaaaataccggcataaatgcgtgtggttacgctcacgtcaaacgattgttcaaggccaacagttacggtggacaccatggcttcttatactcgtcgtgcacattcgggaggcaatggccccgctctgaggcaaccgcgcaccgcgcaaagcagagccgaccactccgcacaggagggcccctatacgccccaggagagccgttcccgccacgcaagccacaaggcttccaatagccatcgagccccgaacaggaagaaaaagaacacaggaaaaggcaagcaccgtgtactgaaatgggtgctgggcatcttcttctccctgattggactgggcttgctggccggtatcgcagtattcgcatacctgtacaccaccaccgaggtcccgcaacccgaaaagttcgcgttggccgagaaaaccaccgtgtattacgcggacggcaccaccgcgatcggctcctacgcggaacagaatcgttcaatcatctcttgcgaggggctgccggactacatcggcaacgcgattgtggcgtccgaaaaccgtacgttctacacggataaaggtcttgatctgaagggcatcgcccgcgcattcattaataatgtgaccaagggcacgcgccaaggtggttccaccatcacccagcagtatgccgagcggtattacatgggcgaaaccacatcctatgtgggcaaggcgcgcgaggccatcgtggccatcaaaatcgcgcaaaccgagtccaaggacgaggtgctgtgcaattacatgaacaccatctatctgggccgcaactcctacggcatccaggcagcggccaaggcatacttcaataaggacgccaaggatctgacgctgtctgaagcggcgatgatcgccggcattattccgtcaccgtccacgtgggatccggccgataacgccgatatggccaaatcgcgcttcaagcgtgtgctgaacatcatgcaggaggatggttacatcactgccaagcagcacactgatgccaagttcccgcagactgccgcggtggcgcagcaaaacgaatacgcggggccgaacggttatctgctggatatggtgcgccgtgagctggtgcagtccaaggcctttaccaaagaggatttggataccggcggatacaagatcatcaccaccatcgacaagagcaagcaggaccttatgcagtccatcggcgacacccgtctggacgacatgcctgaatccctgcaaatcggcggcatagcgctggacccgaagaccggtgaagtattgtccgtatacgccggttcagattatctgtccaagcagctcaacaatgccgatcaggccgtattcgaaccgggttcgactatgaagccgttcgctttgctgggggccgcgcaatccggcgtcagcttcgatacgttgttcaacggcaattcccaccagcacttcaccggcttggatcaagaggtgaataacgctctggagaacaactggggcaacatcaatctgtatcaggccaccgccaactcggtgaacacggtgttcatgaacgtcaatgagcatctgacgccgaagcgcacggccgcaatcgcccatgaagcgggcattcagggcgatatcgatgaaaactccatgtacaacgtgctgggcatcaacgccctgaccgtgtgggatttggcgcaaggccattcgaccatcgccaacaatggtgtgaagagcaccttgcacatggtgtccaaagtgcttgattccaacaataaggacatgtacaacgcgcccagcaaaggcaccaaggtgttcgatgccaacgactgcgctttggtgcagaaggccatgcagggcaccaccacgtacggtacggcggccggcacatccaacatgctgggccgacccatcgccggcaagtccggtaccgccaacgacgaaatggcttcgtcgttcgtgggatacacccccagcatgatgaatgtgtgggctatctggaacccggacgataagggcaatccgcaggcggtgccggccttctccggatacggcatctcttccactggataccccgcccacctgttccaggagttcatggctcaggccttgcaaggtaccgaggtggagcagttcccgaccgctaaagacaatggcaagatcggtggacccgacggcacttggggcttgggcaagggacagagcagcggcctgtccaacaacaccaacaagcagtccaccgaagacgcgcagaagcaggctgagcaggacgcacagcagaaggcggccgaagaggaagccaagaagcaacagcaggcccaggagttcgcccagcagtgcctcgccaatccgagctattccaccgagtgtccgaattatcccggcaccactaccggcggagatggcaacaatggcaacaatggcaacaatcccggcaataccggcgggaacaacgggaacaataccggcaacgataatggtaattccggaggcaccggcgggaacaccggcaccaacggcgtcacccagtagtaagtaagcacagacaacaaagctccctctgatgcaatcagagggagctttgttttgttgttagcgctcagcgcttgcgctgggaacggttgatggcagagataatcgacttcagagcgctggtggtgatcgacgaatcgatgccgacgccccacacgatctgcgcatcatcggcctcgccgacctggcattccacgtacgaggcggccatggcgtcggtgccgacggacatggtgtgctccacgtaatccataatcgaggcgtcaacgccaaagttggaaatggcgttgaggaaggcggcgatcggaccgttgccgatgccggagacctcgcgctccacgggcgcatcgaccccgacgttcacgccgcggtcgagcaggcgagccttgagcacggtatcggagccatcctcaccggagctgacggccaccttgagcagcttcaagcggccccacggcgcgagcgaggcgtcatgagtatcgcccacaaccacaccggcggcggtcatgccggactgttcgatcggcaggtactcgtccttgaacagacgccagatatcctcgtccttgacttccttcttggtcgtgtcagcgtagtcctgcacgatcttgtcgaattcaatctgcagacgcttgggcaggtcaagattgtggttggtcttgagcaggtaggccatgccgcccttgccggactgcgagttgacgcgaatgatggcctcgtacgtgcggccgatgtccttcgggtcgatcggcaggtacggcacaagccacacgaagctgtcgagatcggcgccagcgcgctcggcggccacctgacgagcctcgagacccttcttgatggcatcctgatgcgagccggagaacgcggtgaacacgaagttgccggcgtacgggtgacgctcggagatcttgatctggttgcagtactcaaccgtcttgcggatctcgggcacgttggacaggtcaagctgcgggtcgatgccttgggtgagccagttgaggcccagcgtgaccaagtcgacgttgccggtacgctcgccgttgcccagcaggcagccttccacgcggtcggcgccggccagcacggccagctcggtggcggccacgcccatgccttcgtcgttgtgcgggtggagggagagcactacggagtcacggtcgtcgaggtgggtggagacgtactccacttcgtcggcgaacacgttcggcgtggtcatttccacggtggcgggcaggttgatgatcatcgggtgctcgggagtcggcttgataacaccgatcacggcgttgcacacctcgacggcgtactccggctcggtgccggtgaaggattccggcgagtactcgtagtacaggtcgatgcccttggcctcgttctcgaggtccttgcacagttcggcggcgtcggtggcgagcttcttgatctcttccttgttcttgcggaacacgacctcgcgctgcagcacagacacggagttgtagaagtgcacgatggcgcgcttggcacccttgagcgcctcgtaagtacggcggatgaggtgctcgcggcactgggtgagcaccacgatggtcacgtcgtccggaatcagctcacgctcgatgagcatacggatgaagtcgaaatcggtttcggaagcggacgggaagcccacctcgatctccttgaatcccatggagacgagcaggttccagaaacgcagcttgcgctcggaatccatcgggttgacgagggcctgattgccgtcgcgaagatcgacggagcaccagcgcggcgcgcgctgcagtcgcttgcccggccacgtgcgctccgggtaatcaaacgggatctgcttgtcgtaggcggcgtacttgttatacggcatacgactcggcttctgcggatcgccgatgaatcgtgccggaggcagcagcgggtcgttgttccccccattggacgccgcagccactgccgcgagatcaaaaacggatgattgaccctgacccattgttcctcctttactgtgcgaaccattcatacaatcgcttattggatattcgtttacgcattggtaacatgcgtaacttcctccatcctagcgacggcccattccaacaccccgttcatctcacaatatgccagcacacgtagcgcttcccggcgcagtactactagacttgcaactatgcgtggaggcgcatgggcttccacagcgagagaagaggtccattatgacaaatccaagtatgcctccgatgccgcaaatccctcaaccgaacggtcagcggcccgcagctccgcaatttacagcaccgcagccggtcttccagcagcctgcagcaccacgccccgcgcagcccgcagcgccgcagttcgcggcgccacaatatgctcagcctgccgcgccgcagttcccggcgcaggctccggctgccgtacagccgacattcccacagcagcccgcagcacagcaagccgcctataacccgcgcccggtcaaccaactgcgcaccaagcgcagcctgctgaagtacatcctgctcggcattattactttcggcatttacgatatctggcaaatgagcgaagtgggcgagaccctgaacctcatcgcttcgcgccgtgacggcaagcgcacgatgcactactgcctgatgttcttcctgatcggtggcctgacgctgggcatcggctggctggtgtggtaccaccgcctcagcgcccgtattggcgatgagcagcaggcccgcggcatgactcccaccgttaccgcagccaccttctggctgtgggacgtcttgggaattttcatcatcgtgggaccgctggtctacttctacaagctgctgcatgcgatgaacgatctgtccgccgactacaacgcgcgcggctgaaacaatcccgtccttctacacttgccgacatatttgccggggcagtgtttttactgcgtttgccgatggccgcaccagtcagaccattattgttcggctccgcagtctcgttgattcataggagattccatttatgctttgccccaattgccataccgacaacgcggaaggtagcaagttctgcgaaacatgcggcacgccgctcaccgccaccgaagcgaatactgcagcgtcgagtgcttccatgacaccgcaggacgcgccggttgcgcccacgccagcgggagcgactcccgctccggctgccgcttcagtccccggccccggcggtgcggcagtgccgccgattcctatgccgcagggtgctgctggcatgtcggctccggcggtcgtctccgcaccggcggctacgcagcccactgcgaccgttgccacggccacgcagacggccccggcaacggcaaccacaaccgccgcgaccaagcccggcccaaacaaactcatcatcatgctggtggcggtgctggcggccctgatcatcgcgggtgtcgctttgttcctgacatatcgttccgaggtgtggggcggcaagtcgctgcctgacccggcatccatcgcctccagcgtcaccgataagaacggcaagaaggcgtcggccgtcaaggccaaggatgtcacggccgcgctgaaggccaagggactcaacgcgaaaacggagaaggtgttctcaggcaaggattcgggtgagttcatcggctataagaacgccgctccgggcgctcgtgtcaaggccggctccacggtcgtggtgcaggaatccgccggccccggcgtgccgaaagacactctgggcgcacaggtcaataaggtgactgagacgttcgccgatatgggcgttccggtccactataagaaggtgtttgtctctgacgccaagaagaaccccgaaggttcggttgtggccacctatcctgccgccggcactggggtcaaggacgacgagaaagacaagggcatctacattggcgtggccgccaagggtgacgacaccgctctgcccatcgacgtgatgggtcaggatgtggataccgtcaaatcccagctcgagtctgagggccacacagttaccgttgaacagcgtttctcttccaaggattacgtgggtaaggtttccggcgccagccccgctccgggatcgtccctgtcttccggcgaagacgtgaccctgtatcagggcatcgatgccagcgacaccaaagaagcctttacaggccatgatttggccgaaacaggcggtgacgcgctgctcggtaccacacgcgcagccgacggccagtggtgcactaatgatgggaagtgcatcaccatcgacaattacaaggtgactgaaggcggcagtgataatgctgactataccagcgattacgacggtactctgattgcctgcgacgccattcagcaggcgtactgcaacagtccgaaagccgactacctagtcacacaagattatggcgccttcgagctcatgccgcatatcagcctgaccaacttttgggccaacggcaaaatgtatgacggcaatggcgtgcatatgggtgattcttggcccacatccggcgaataccacatgcaggatctgttcctcgtagtgcctaccggctccgacttgcaggggttggaagataagggctacttcgacaaagacgcgcttgccgcagccaagaagcagaaggcggtggacaccaatcgaccgttcattctgtaccgcgatccgaagctctacgacactaccaccgctccatacaacggtgccgggaacggcgccaatccgttcctgccctacaacggatacaacggcagtaagtccgacatcgtcaagatgaagccggccccaagcgacgccgacgcctactatctggtcgaagcgtccgaacccgattgggattccctgccggacgcggacgtgaaggcgcccagcaccaaggacaagggcaactccaaggattccaaggattccaaggattccaacaagagcagtaagaaatccggcacaccggatgcggcctcactgaaggtgttttctgatttggccggtgcccaatacgcttacacgattgctggcgatggcagcgccttcaccaccatttcgttggatgatcggggcaacttctccggcactgtggacgaggcagatatgagcagtggcgattccgcagcgaatgcgccacgtatccagaccaagttcagcggtaagtttgcatccgccacatccaattcagatggcacggtaacgctgaagtgtgatgcgtcggctttcaaaattgacgacaaatccaaatccgacaagtcaggattcagcccgtgtggcaccttcaccggatatccatctggaacctccagcgatgcgttgccatctgaagcacaggccatgctcgtcaagcgtggaacgccggatggaccatccgattggatgctgattaacaccgaaggctctggtgtttttatccgcacccagaaataaataacagttaagcagggttcaggcggatccaacgcttaatactcagtgaggccagttcataccggcctcacgtgtttttatcgcttcttcaccaacgagcggatgacggccataaaaccgaggctcatggcaccggccagcactgcgaatacctgcgggcggcgcaattcgttacgcatgctgatggcaccggtcacgcagtggtcctcgaaccagacgcgcacctcgttgctggagtatcggcccaccagatcaccccaggtgagcatgcgggtcacgtagccggccgggttgctttcatggaattcaaacaggcggatgcctcgatagcgcgacttggggccatagcattcgaatccgcaggtgggtgcgtagcccaaatcaatgccatgcgcgtggcccacgaaggcgttcttgtgatcgtgaccacagaacagcgcgaagtagccgcctgcttcacgcaaggcgtccacttcaccgacgttctcgtctgcacagccaatcgcctcacccagccgcgatcccggccggcagatctcatggttgagcacgtagcaatgaccggcgtgggtacgtgcgccttccaccgcgttcggcgtccatgcgggaacctctttgaggcaatcgtagaattcctgcggcggaatgtgctggaaggcgatggcaggcaccggcttaccgtcgccgttgcgttcgccaagttcggactgtacggctcccagccaatcgatcgcctcggggcttggcgtgccatacccatcggaatcagccaaatcaagaccacgcggattgaccacataggccgggtattgggcgtcgttctcttcgggcttgccggcgtaatcgccggaattcaccatcatgacggacatagctacgcgcccggatccgtcggaagcctcaatgggcagggcaaaagtgcctggctcgaggctgtcgaccgggttcaggcagccggggaattcgcggtagatgccgtcctgctcgtcggccaggatgccgcactggaaatcgtgattgccgtaggtggcagcgaacggcacttccgcttcgatgaccgggccaaggaagccggcaaacgtgcggcggactttgtcacgggtctcgtccatgagctcgtccaaagtcgtcggcacatcctgtggatcggatgttgtggagtagaccagcgtggacgcggtggacgcggtttgttgggcgtcggaatcgctgccgtcggacttcatggccagcagacgattgttcacgcggtctctggcccgccgcttgattccgcgcagcttggcctcgacctcggtgaccgcacgcacgcgagcgcccggttcctcgccacggcggcgcaggaaagtgtcgatgtaggcaggatcgtaaccgcggatctggtcgccggtgaacaccaccagatccgggtcggctttgcgaatggcttcacggataaggcggatggtatcggggagcacgttggggccgtcttggatgtcggccatttgcagcacgcggaagctgccgttttcgcggaatcgcaggttcgtcatgcctcaccagtctagggacgtaatgctgtttcgcacagcatacgcgccggtccttcacgttccccgccgctccgcacggcagctgaatcactacgagaaatcgtagaacgtgtatcc

SEQ ID NO: 282 - DNA, 6447 bp, Unknown
  R101_18m  MAG No. k141_72339
ccgctactgcgggcgaggccgtcacgattattcgtgacggcttttcgtttatccgccgtcgtgccctacggggccgcatatccgatcggggcgatgatgtcctgtgaaaaaacaacatccaagcccgctctgggcagaatcaatcaatctatggctcgaccccctcaaggcggcgggctactcccccaacacgatcagcacgcgccgatgccagatgtccgcattgtcgagggcgcttaagggcgatctagggacgtggagggcgacgacctcgccctgctgatccgatccgccaacggctatctgttccccggccggtggagcggccacgcctcggtcgagaccacgcaacggtacatcgccatgcccgacgaccagctgcgcgccgccgtggaagccacgcgcctcgccgcctaggaggatcacgatgttccgtttccccgactcgattgtggtactaaattgattgtggtactaaattatggtaccataataagcatgatcgaatgcgaaccgtcagccttcaagcactggttcacacagccacagatcgactacatattccggcatccggtggccgtgttcgaggtgcagtcgagacacgccggcgacagggtcatggcgatcctcggacacccggacgagttcagggaacgccccgtggagctgctggtatcccagcgcacccgcaaggtgttccacgcgatggactgccgccgcgaatggctctacaagttcgacgactaaaaacaccaaggaggacatcatgagcaacgaaacagactgggacgagctctcggacgaatacaccgagcacacccccgccatcatcggcgagaccatccgcccgcaaagggcgatcacgatggatgacatcgacgacatcttcgccggccgccccctcgccgaccagccccgccggaaggccgacgtgctctacaaggcatacctcacgcccgacatggacgcacaggtgcgggcacaggccgaacgagagcacatcggcaagagcgctctgatccgcaaggcactggccgcatacctgaccgccaatcaggcacagcccgcgatggcctgacccatatacggcgaaaagcccccgaacctgccgcgtgatacggttcaggttcgggggcttcttgttattcggccttggatgccttggccttgaggacgctggcgccgatgacgacgccgatggtcagggcgacggcgctgatggtcgtcgcggccggatcggcccacgtccagccccatacggggccgagggtctgcacggacggtcacggtacgggacggtggggcgttgctgccggtggcgacgctgccgccgccgttgtaggtgacgacctgaccggggcgatatggatgaaaggcgatcaggcagctacggtgcccagggaagtcggcgatcataaacgtctcgtcgttttcatcgcggaccttcagttgtctaatccacgggaggcgacaggcgtgaagtttctcaacgaagcggaagccgggcacaagtcgtatgtcacaatcgacttcgtgcccagctcccgtccttctgctcagaagcggagtgcggttcaccatccagccgacatcatcggcatcatgccgcagcgggtcaacgtatcggccagcgcatcgtccagtgcttggatcggtcatagcaacgacgccaccgaacgacgatggacagtatggcgcctatcgccagagctgacacggccagaaccgaggcaagcgacacatcgccacccgtgacgggcagtgacgggcgagtgttgggcgtggttgcctccgccggcgccggtggcgtctcgggtttctccggttcgcacggtttctccgactcgcatgggggcaacacccgcacacgctcccaggcatcgtcataccggctggacgccggggaaacacggtcatccccctcgaaccgccaaacgaacacgtaccacccatgccgttcggcggtcagatgcatgggagcgccatgcgcgtccaacgccccggcgccgattttgaacgtgccgttcatcgcgggaatctcccaggtggccagcaaccggtggttgtcgtcttccgtggggacctctcccccggatggcttgtacgcctcatcgttggaggggttgtcgggatcgccggaccaccatacgctcaccgtcgcatacggctgatccgccgcgaaaccataggtttcatcgcccgtgaactggccgtggtccgccgggaaccccgatacggtgatggtgtcgctgagttcggcgccgatatccgccgaatgttcggtaaccgtcgacatgacttcgaccttcccgcgccccacgttgctttccgaagcctccatgaacgggctcacccagtcgccggtaaggtattcctgcgcccgtttgctttgctcgctccgccggaacacccacacccaggtgccaaagccgccggtcttcggagtcagataggcggcgtcaccgtccggcttggccatggcccgcacacgaacccgctgccccacaccggtgaaggacgccttgccataagcactcggctcataacccgaggacgccaaccgggcgagaaaagcgtccgcgctctcccgcgcgttcggcgcgatgaccttgcccagatcgtccttgccgagcccgtcgaaatagtatccacgcgcctgcagcttcagaccgggcacccaatgactgccctcgtcccccacgccgctggtcacatcatcgaacaccggcgaagccgcatcaagcaccttatcggacacctgcgtggacaccgacggaacgaaatccttgcgcacctggaacgtcgacgacgaaccgccggcggaagccatcgaatcgaaggccagcatgtcctgagtgctgtccatgacgtgcatccgcccatactcgtatgtggtgttcgccgtcacctcgccggcgccggtcgcctcccacgcgatcgaggatccggcgctcgtcgacacccccgagaacgtgttgccgccttggatgaaccgcgccggcccctgcaaggtgacggtgaacggcactcccgcgatcgcgtcaccgtcgcggttcaccactttcaccgagatggaaccgctgcgcaaagcctcggcatcggtgcgttccaccgtcgtgcccgcaggcgtcttgccggccgattgatcccatatccgggccgccttcgccacgatctcgggataccggccttgaatgaccgccatctgtctcgcccactcgtcccgatcgcgcccgaagtgatcctgcacgatgatgccgatcgccgcatgggtggcggcatccgtgtcgcggtaccggtcaaggatccatgccatacgccgggcgttctcatcggaggcaagcaccgtggtggggcctatcacatagtcgctcagtttccccgcttcgatgcagtagtacttgttgcccgaagcgtccagccccgcgacaccgacgtaatattccatatcgttgtatggaaacatcacgtgatatctttcgtcggcgggcgtcaacgtcgcggcatacgccgtattcgccgagccgaacaccactcccaccattattatcagaccggtcagcatcgctacgatggccatgccccgttgccgccatgtcgttatcatcattcgtcctttcctggtacgttccccgcatactgcactgtgtgcgggtaggccacgatcatggcagattttcattcgctacagccgatttttcggcctatgtggtccgagcttgccgtttgccggcgagttgtggataactcttccgccgagttatccacctcatgcggttgaccgaacgtttacctgaaagttatccacaatgtgcaacatatgttcaaaagcccctagaatagggccttatggcagcagtacaacatcgcgcgaccacgcgcactagtaataccgataacaacaccacgaagacgaagtcaaagacgacttctgcccgaaagagccccgcaaccaagcgcaagagagtcagcgccgaaacggcacgcgccgcagcagcgctgaaaggcctggctgtcgaagcccccgcaccgtccatcgaagcaaacgagcccggccagttcggccgcatcaatgtcatggacatcactcccgccgaggagcgtggcatcttccccgcccgtgtggaactcggcgaaccgtttgagatgaccgcccaagtgttcatcgaaggccgcaccaaggtgggtgccaccgccatcgtgcgcaacccgcgcggcaaggaaaccatgcgccaggccatgacctgcgtaaatcccggcctcgatcgttggaccgtgatggtcaagtgcggcgagcacagcgatctgaagccttgggaggatggctacgcggccgtcaagcgtcagctcggcgaatggaccgtgaccatcgaaggttgggaagacacgtacgtctcctggctgcatgacgcccgtatcaaggtgcgtgtgatggacgacgtggacaacgcgctcaattccggtgccgaactgctggcccgttgggccgcaaccccggacgccggcctgaccgcacgcgatcgcaagaccttggagaaggccgctgagaccatggccgatcagacgctgagcgccgaggatcgcctcgccgccggcgacaaccctaccatcgccgccctgcacgagactcacccgctgcgcgatggcatctcccccagccagccccagcgtttcaaggtggaacgcccgaagtccagcttcgcggcttggtaccagttcttcccacgttccgaaggcgccaccatcgatccgaacaccggcaagatcattcagggtacgctgaagacctcgatggccggcctcgaacgcgccgctgccgaaggcttcgacatcgtctatctgccgccggtcttcccgattggcgtgaccaaccgcaagggccgcaacaacacgctggtcgccggccccgatgacccgggctccccgttcggcatcggctccgagctaggtggccacgacaccgtggatccactgctcggcaccatggacgatttcaaggccctgtgccagcgtgcacatgaactgggtctggaaatcgcgcttgatttcgcactgcagtgctcgcccgatcacccgtgggtcaaggcccacccgaactggttccgtcacaagccagacggctccatcgccttcgccgagaacccgccgaagaagtatcaggacatctacccgatcgacttcaacgccgacatgcccggcatcgaaaaagaagtcgaacgcatcatgaatctgtggatcgaggcgggcgtcaccatcttccgcatcgataacccgcacaccaagccggtgcgtttctggcaggacgtgattgccgccgtgaccaagaagcacccggagatcctgttcctggctgaggcattcacccgcccgggcatgatgcgtgccctgagctacgtgggcttcacccagtcccactgctacttcccgtggcgcaacaccaaggacgaactggaagagtatctgccgatcaccaatggcgacgacggctactaccagcacaacaccttctggcccaccacgccggatattctcaccgcttacgtgcgagacaacggcgtagccggccactgcgtgcgtgcggtgctggcagccatgggctcgccgtcctggggtatctacaacggttacgaactcatcgagaacaagcagcgccccggcttcgaagagcagatcgacaacgagaagtacgaggtcaaggttcgcgattggagcaaggccaagcagtacggcgtggccgagatgctcaccgcgctcaacaagattcgtcgcgcccacccggccgcgttgagctaccacaacctcaccgtgctgcctacgtccgaccagaatattctggctttcgcacgccacacgccggccgaactgaccggtaccggccaagcggacacgctgattgtggtcgtgaacctcgatggacacaacgcacaccagtcgatgattcacctggaactcggcgagctgggtctgcccaccgaccgcccgctcaacgtgcacgacgagctgaccggccgcgaattccagtggggttgggacaactacgtgtctctggcgccttgggcggatgtggcccacatcctgtccgtgcagtgatgcggtagtgcaacggtaatgccgttgacgtgcatgggtttatcgtgtgcgtaaaccgctagaaatcctccccttgaggggaggatttcgtctgtttagacatagtgtcggcataatctcagcacggtttcttgagttccgcacctgttttgcaggcgcaaacagggtattgtggtgagacgataacgtaactgtcgattttcaaggagaaatgacatggcagaaaccttcaacgtcgttgtggaaattccgcgcggctccaagaacaagtacgaagtcgatcacgagaccggtcgcgtcttcctggaccgtaccctgttcaccgcaatgggttacccggatgactacggctacatc

SEQ ID NO: 283 - DNA, 23817 bp, Unknown
  R101_18m  MAG No. k141_73252
acgtgaatcgaaccggcgtcgcggtggatcatgttgaggatgagtttgatgagggtggatttgccggcgccgttcgggccgatcagtcccatgatgtagcccttgggcaggtcgaaggtcacgtcgtccagcgtgaagccggaatcatagtgtttggtgacgtcggtgacctgcaacgccatcgcgtcggattcggatatggcggtcatggccatggtcctttcttgaggttatttcttgcggtattcctcttcgagcatgcggtccaatgcgtccagcggaatgccggcggctttggcgccctggcttgcctcggccaggctttcgcgaatctgggttttgagctgacgttgcatcagttcgttgcccttgtccatcacgaaagtgcctttgccttggatgttctgcaccacgccctcatcggccagttcgttgtacgccctggtgacggtgagtacggagatgcgcagctccttggcgagtttcctcaaggaaggcagggcctcgcccgccttcaactcgccactgagcaccgccgaatggatttgggttttgatttgctcgtagatgggttcaccggacacggatgagatgatcagtttcacctatgcccctttcgattgtggttgactaacaccccagctgtttagctgttatacaacacagtataactgttctgcttaactgtcaaggtgtgttacataacagctaaacagtgaacaaacaccttgccaacatacagtgtcgaaacatgggccgcgcctacaatggcctcgggaaggggcacctatgccaaacaacgccgttacgccgacagccccgccagcgggggtgtaacttttttatcacagcacgcgcggggcgtcatggaagtcgaagagaacaccgtcggccaggtggcagatttcgggccagtcggaggcggaggagtcgtcgtgcatggcccagaccttcatgccgactgatttggccgacttcatgccgaccagcaggtcttcgaacaccgtgcagtcggccggtgcagcacctaggcgcttggcggcgagcaggtagacgtcgggctggtccttgccgacgtcgttcgcgtcatcgacggagacgatatcgttgaacagatcgaacatgccgacgtggcgtagcgccggctcacgcagatgcgggggcagcgaggtggcgacacccagtttgacaccggaggctttcagatcgcgcagatagccgagcgcgccgggtttggcttcgaccgtggtggaataggcgacgctggccatgtcgtcccattcctgcatgagctcttcgggcgtgtctgtaaggccgaagcgtgcgatggtgtattcggcaatctggcggaattgcatggcggaaactttggtcatgtagtcgggcggcacttcgattccgcgcttgttcaggaagtcgatgtcgacttggtcccagactcccatggagtctaggagggtgccatcgaggtcgaatatggcggctttggtcataggacactttccttcaacagttctcgggcgtggtctagtgaggcttcggattcgctgccggagagcatgcgggcgatttcgtggacgcgggtttcgccgttgactttggcgatggtggtgaccacgcccaaatcgtcgtcatcggcatccggcggctccttggtgaccacgaactgcgcgtccgcccacgaggcgacctgcgccaagtgggtgacaacgatgacctgcgcgctgcgggccagccgtgccagacgtttgcccagttcgaccgcggccttgccacccacgccggcgtcaacctcgtcgaagatgaaggtctggtcggcaccgccgcgcgtatcggcggccaccagctccaaggccagcatcagtcgactcagttcaccgcccgaagcgcttttgcccatcggcaactgcggcgacccctcgaacggcgtaaacaggaacgcgatatcgtcgcgaccatacgggccgagcggatcatcggccttgtctcgcggcgtgacacgcacttccaaggaggcgcccagcatggcgagcgagccgagttcttcagtgacgcgcgcgcccaagtcggcagcggcagccacgcgcgcggtgctcagcacgtcggcggcggcgagggccgcagcgtacagcgtctgccgttcggattcgagttcggcgaccttttccggcgaggcgtccagatcctccagatcgaacgccgccttgtcccgccaagcgagcacgtcggccaaggtggggccccaccgacgggtgaggtcgccaagctcgtggatacggccgttgatctggtccagatcctccacgctgccttcgtcgcccagctcctggctcagggcgaacaccacgtcgcccaaatcggcattgatggattcaagccgatcggcctgctcggcgaacgtgccgccgacgcgaatcgcgcgcaacgaggtcaccgcatgattgatgagttccacggccgaagcgccgtcggcggcatccacatccacctgcgaggcatccagcgcgcccagcgccgaacccacgccttgggcgatgtcggccgcgttttcgatgcgttcgcggcacgccttcagctcctcgtcctcccccggctgcgggtcggttcggttgatgcggtcgatggattcgcgcaggtagtcggcctgttggcgggcagaggattcctgcgagcgcaggcgttccagccgctcatccatggcggccagcgcatcccacgccttgcggtaggcggccagttcggcttcgtctccggccacccggtccagaaactcgcgttgccgtgcggcggccgcgattttcagctgatcggtctggccatgaatggtaaccagttcgccggcgatggcccccagcaccgaacgcggtacggacttgccgccgagcacggcccgcgaacgtccggaagcgcgtacggtgcgggaaaggaacagttcgccgtcttcggggtcgacgcccgcgtcatgggccttggccacggccacggcagcaccggtgagcccgctgtcagaatcgtcagaaccggcatcgtcaccggcatcgttggtgtcgccggaatattcagatgcgacggcatcatccgagagcgcgaaaatcgcctgggcccaagcctcgtccgccccggccgagacgcgcgaggattcggcggccccaccggagaccagtcggatcgcggagagcagcatggatttgccggcgccggtctcaccggtgatggcggtcatgcctgcggccggcgcaatggcggcttctcgaatcggccccagattgcggatatcgagttcttcgagcatcaggctcctgccttgccgtcacgttcgcccggcttgtcgggatcggtaccagcgacgccagcgtcaccggcaacgccagccgcatacgcggccgccgggaacgtgtgcccgtgatgcagcggctggctcgaggcctcgttgcgcgcgtgctcgcgccagccgaccacgggcagatcgaacttggagaccagacggttggtgaacggcacgccggagagtcgggcgaggcgcaaggtatcgcgcgattcgcgcaccatgacgcgcgtaccctgcggcagggcgcgctggcggcggccatcgcagcaaatccagccttcggacatggaatcgtccagaatatcgatggtaaaggtcgaaccggagccgatgatcagcggcctggcgaacagggcatgcgcggccaacggaatcaactgcagggccttgacgttcggccacatgaccggaccgcccgcggagaaggcgtaggcggtggaaccggtgggcgtggagacgatgacgccgtccgcgccgaacgagttcatctccacatcgtccacgcggatggacagttcgaccatcttgccccggtcggcgcgttccagcgtgatgtcgttcagcgcccaatcctcaatgggcttggtggtgccaggcagccagacgtccacatgggcgatcatgcgttcgtcgatcgaatagtcgtgggtggcgacccggcggatcgcctcgtcgatctggaagctttcgaattcggccaggaagccgacatgccccatgttcacgccgagaatcggcacctgggtgcagtggacgagttcggcggcgcgcagtatcgtgccgtcgccgcccaggaccacgacgatttcggtgtcgtccgacacgcacggcggctgcacgccgaaatcgggggcctcggtgttgtcgatgatggtgacttcgaaaccggccactcgcagctggctcaccgcctcggccactacggttccggtctgcctgagcctggtatgcgtcaccaccaccgcgttgcgcttggccatggcatcctcctgtcgattcggtcgcactgctcattattctagccgcagacaccgtcatcactcgtacaggtgttcgaaaaatgccgcttcgtggcgcgtcgccgacaacgttccgcagagtcgattaacgtaaggcttcggcatacaatggcatacagccgcgcgatcaccgtacgcgtgccgtgcgcagcgcgatggcatgccgcatgaccgtacagcagtatcagttgaggagcttgaggacccatggccaatgacttcgacgaatcctccgccaatgaggaggcctcgaagggcctgtcatggtggtattcggccgatgtactgagccgagacaaaagcgataaaaccgccaagcgcattcgccgcatcagcatcaccgaccgtctgctcaggcacccgggccgtctgtccatggtgtatttcggcgcactgatcatcatcgtcaccggcttgctgctgctgccgatctccacatcggacatcatcttcaccaacttcccggtcgcgttcttcaccgccgtctcggccctgtccacctgcggcattccggtggtgaacaccggcgaatactggtcgacgttcggccaagttgtcatcctattctccatccagttcggcggcctgggcgtcatgaccttcgcctcgatggtggctcttggcgcttcccgcagactcaaggtctcccagcgcatgcttaccgcgaacgaactgggcaccacgaagctttccgaggtcaaaggcgtactcaccgtggtattgggcacctccatcatcgccgaggtgcttaccttcgtgctgctgctgcccgacctgttccgcgtgaaccacggcaatatgggacgtacattgtggcaggcgctgttctacgcggtatcggcctacaacaacaccggtttcacgcctgacgccaccggcctgcatgtgaaccgttggggcgtgggactgccgattctcatcagcgcattcataggaacgctcggcttccccgtggtgctgaatctggtgcagtgcgcacgccgacatctcagcccgaaacgttggacgttgcacaccaaactcactttggtgaccaccgctgtgctggtggccacctcactggcttggttcctgctggtcgagtggggcaataccggcctgttccccgcagacggtcccggcatgaagatgcgccgtgcgatgagcgccgccgtcatgccccgctccgccggtttcgatatttcctgggtgcccgaagtcacgaatgagaccaaggtgttcatgagcatactcatgttcatcggcgcaggctcctcatccaccgccggcggcatccgtgtcaccacgttcgcggtgattctcttgatttgccgcgccgcattcaccggccatcgcgatgtcaccgtgttccgccgccgtatcccccgccgcgtccagatgaccgccgtgtccgtgaccacggcctgctttgcgctggttatggtcggtgcgatgatgctgatgttcaccaccggctgcgcgttcgtggacgccgtgttcgaggcctgctcggccttctcgttgggcggttattcggtgggcgtggcaagcgccggcaatccggccagcctgtttattctgtccgccgagatgattgtcggacgacttggcccgttgaccatcgcctactccatcagcagaccgatggctcccgaacctattcgttatccgcaggaaaacattatcgttggctgatcggccattcaatcggcacacagaaatccggcatagagaggaccatcatcatggcagcaaaaccgagcggcaacaaaagcgtgctggtcatcggcctaggccgtttcggcgggtccgtggccgccaccctcgaccagatgggtcaggatgtgctcgccgtggataagaacccggagcttgtggcccgttggtccgcgcatctgcccaccattcaggccgatatgaccgatgtgttggccatcgagcagatcgacgcctcccagttcgacacggccgtcgtggccatcggcgacagcatcgaggcttcggtgatcatcaccggcaacctgctggatgccggcgtttccgatctgtgggccaagtccgtgtcccaggagcatgcgcgcattctgcagcgcatcggcgcccgtcacatcatcaatgcggagaccgatgccggcaagcgcgtgggtcatctggtggccggcaattatctggattacatcgaaatcgacggcccgtacaccgtcgtcaagatccacacgcccctatacgcggtgggtcgcagcatcgaggacgtgcaggtgcacgacaaatacggcgtgaccgtggtgggcctcaaggccccaggcaaggagttccagtacggctccaaggaactggtcatgcatcgcaacgacgaactcatcctcatgggcaagcaggatcagatcgaccacttcatccaaggctaacccccctaactgcgctcgctataccccctatctgctcacatcgtgaccgatataacccccctcaacatggatgcgctcattattggggcaataagccataaagctgtacgtccatattgagggggctttatcatcatggacaagcatacgcagaattgcacgttgataggcaaaggagtctacggcaccataggagtggaccaacgttcccgtcttgccgatggcgcgcattttcacaccatgattgtgaccagcaccctcgaggcctcagttatagaaggggacaaactggtcatcaagagtggcattgtgcggtgtgatggtgatattcgcgtatccagcatcagcggcagcggcgacatcgaagtcggcggcgacattatttgcgatgaaataacctttaccggcaaactgcgatgcaacagcgatatcgtttgttccggaaatctgtccgtcaatggctccctaggcacccgtcatattagcggtcagacagtccgcttgaacggcgtgttgaagggtcatgacgtcaacagcagggctctggaagttcatccactgcgcagtacgatgttttctcgttttgatatggatgggtatgaggatggcagcatggttcgccatatcacagccgtcacggttgaagccaaccatctgcaatgccggactttgacggcggactccgccatgctacgcaacggcagtgcggtggaaagcgccacgtgtgccaccgcaataggcatcgaccgtacctccagcgtgctgctggtgaacggagactgccgacgcattcatctcaagacagcgtaaagcaggtattcctcattaccgtgggtgccgatgatgggactatcggcagtggccaccacgtcaagtccgtgctgttcagcacaggcgaccacgtcgtgcaatgcccgctcccgcaatgccggatcttccacgatgccgtttttgccgagtcctgcccgcccgacctcgaactgcggtttgaccagtaacacaatctgcgcaccgggagccgcgatgcgcgcgattaccggaatcacataggtcagggaaataaaggagacgtcggagacgatcatcgccggccggtaaggcaggtcgtcggcctctacttcgcgaatgttgacgccgctcatttcgatgacgtgctcgtcattggcgatgcgcgggtcgagctggccgtggccgacgtcgagcgccacgactttggccgctcccccgcgcaacagtacatcggtgaagccaccggtggaggcaccgatatccagacattccaagctttccggcccggtaaggccattgccggcaaaggtctcgaacgcgcccaagagtttgtaagcgcctcgggagacgtagtcgtcgcccttatccacggcgagttcgctgtgcccggctttgaccatgaacgatggcttggtgatggtctcgccgtccacgcgcacatgcccggctttgatgagtcgctgcgctttggcccgcgattcgaccagtcccgaagccacgagcatcatgtcgaggcgatcaagtggggtcgcgggatcgatatgttgctcggtcatataccttcctttcgacccaccatccaccaacggggtggctcggcatggacccaccatccagcacttcacgtcatcttccgctggcgggagaatgaatctcctctgctagctgcggctgttatcaagctcgtgttgtaacgattccagcacgttgcgataggtctcaagcttgcggtcgttgtcttgttcatcaatatccgcaagttcggggtatcgctcggtgaccggcgcgtgttcgctatccgtaggcataggactatgcctcgatggcgaacaccggtaccgtggcctcgctgagctgtgcgccttggtcggcggcttcccatgcggcgcatacggcggcgcgcaggccgtccatactggtggggtcgctgacgtgtacctggccgttttcaaaccaagcgctagccttgcggcattcccaagtaccgctctcgtcgcggaccggctccggttgggcttcgccgagttcacgcagatcaagggcgatgaatgtgggcctcaggtgtgccggagccagcatcagttcggtcgggttggtgacaccggtcagcaccgccagcgaatcatagtcaccgcggttaccggcctcgatatcagtgtcgagtcggtcgccaatggcgatggacgcctccttgggcaccagatcgtggccttcggcggcgttcagttcgcgggcctcatcgtacatgtacgcttccggtttgccagcggaggcgaccggttcgacgccagtggccgtgatcacggcgcgaatcatcgatccgcaaccgggggcgatgcccagttcacgaggaatcgtcaggtcgcggttggtcacgaaatacgtggctccggcctcgaccgcgaacgcggcatcggccatcatctgccaagtcatatccggataccagccctgaataacggcctgcgggcggtcctgaggaccgtccacgatggtcaggccgttgcgggtgacctcatcgcgcaaatgctcggcgcccaatacctgtacgcgcgcgccggcgggcaacgccttggccaccacacgggcggccaccaccgaagaggtgatgacctgccacggctccacgtccaagccgaagcccttgagctggtcggccaccacgtgctggaagcgcgaggagttgttcgtggtgtattcgatggtcatgccggcggcttcggccgcacgaatggaatcggctgcgtattcgaccggattcttgccgcgatacaccacgccgtcgaggtccagcagcgcaagctgataggcctcggcgagcgggcgatcggtgcctttgaggaaacgggtcattacgccgctcactcctcggtttcggtctcggtctcgtcggactcagccggttcaacggcatcgtcagcggactcggaagactcctcggcttcagattcctcagattcttccgatgcatcctcggactcagcattttcgacatcggcctcatcagactcggcatcgccgtcttcagcctcgtcgtcctcatcgccgtattcctgctccagatccggggcgtactgcgcctcgtccggatcgatgccgagcttctcgagcacgtcggagtcgtcggtgatgtcttcgagatcgtggtcaatcaccacgtcgtcgctgttttcgtcaatctcctcgtcggcatactgatcctcaagacggtccagcaggtcattaagctgctcggcttccttgctgcggccggcctcttcaaggaagtactgctcggcctgcacggcacgcatacggtactcacccggaagaccctgagagcggccgacggtatgaaccacttcaatggccttgtcccacatctccaaatcgccaagggcaccggcatacaccaggaacatctcgaccttgggagcgccatgcagctgcttgccctcatcggacagcgccagttccacggccttcttcggttcaccgacaccacgctcgcagtcagcgatgaacggcaggtagtcgaggaagccgttcatacggtaggcggtacggaactcacgcagggacagcttgtagtcgccctgacggtaggccacgaacgcgagcgtctcgcgggcaaagtcgatgcgggaggcctgacgggccacccacttggcgtgctccaaggcaagttcgggatcgctctcctccagcgcgaaagcggcgaggatgtgcagaccaatgttctccgcatgctccttggacaggccgcgcagacgttcgcgctcatccttggacagcatcgaccattccatgcccttgggcatcttgggctcgtcgggacgacggtcggtgtacgggttctgcgaggggaagctcatcgtgccgtcggagttacggcgcggacgcctcatgtattcagagcgcttctcctcacggtactggcgcttctcttcctgcgaaaactcgcggaattcgccgtcacgacggttgttgtcgcggcggtcgtccctgcggaagttgcggcgatcgccatcacggcgatcgtcgtcgcggcggaagttgcgacgctcaccatcacgatggaaatcacggcgatcgttatcccttcggtcatcgcggcggaagtcacgacgatcattgtcacgacggaagtcacgacgctcaccatcacgatggaaatcacggcgatcatcgcgacggaaatcacgacgatcgttgtcacggtgctggtagcgcgggttctcgccgttctcgccttcgtgggaacggtagccgccttcgcggcgcggcttgaaaccttcaccgtcacggcgcgaaccactgccgcggtaaccacccttgtggaagccaccggacttgccgtacgacttacggtagccgccgtggccctcgccatcaccatcacggcgcggcgcgtaaccctcaccatcctcacggcggcgcggcttgaagccctcgccatcgcggtcgcggcgcggacggaagccgtcgccatcgcggcgcggaccgttgccgcgatagccgcccttgccaccgaaaccagagcggccgcccttgtggaagtcaccacccttgccgtacgacttgcggtagccgccgtggccctcaccgtcaccatcacggcgcggcgcgtagccttcgccatcctcacgacggcgcggcttgaaaccttcaccgtcatgacgcggcttgaaaccgcccttgccgcgcggcttgaaacccttgccgccgcggttgcccggtcggcgatcgccataccccttatggccgccgccgtaggacttgccggaacgctcgttaccttctgccattacttgttttccttaattcgttgttgattaacggttttccacggcgccgagcgccttcttgccacgacggatgagcgcgaagcggccggccaggaagtcggcttcggccagcacctgctcctcatcctcgatacggttgttgttgagatacacgccaccggacttgatggcgcggcgtgcctcggaagcggacttgaacagtccggcagcctgggcggcgtcgattacgcgatcgcccggcttggagacggggaaggcgtgctcgccgttctcgtcgaccaccttgaagccgtcgagcacggattccagcgtttcctcgtcgatgtcttcgaggttgccaccgcggccgaacagcgcaccggaagcatcgatggcagcctgggtagcggcctcgccatgcacgaagctggtgacctcccaggcgagcgtcttctgggcctcgcgcttgccggggttggtcttggattcctcgaccaatcgttcgatttcggccttgggcaggaaggtgaacgccttcagcaggctttccatctccacgtccgggcggttgatccagaactggtagaacttgtacgggctgagcatcgtggcatcgagccagacggcgttgccctcggacttgccgaacttcttgccggaagcatcagtgatgatcgggctggtgaacacattgacgtccacaccgcgcaccttgtgaatcaggtccaggccggaggtgaggttgccccactggtcggagccgccgagttccagcgtgcagtggtattcgtcaaacaggtggagaaagtcgttgccctgcagcacctggtagctgaactcggtgaaggagatgccttcctcagagttcaggcggcgggcgaccgtgtccttggcgagcatggtgcccagacggaaattcttgccgacgtcacgcaggaagtcgatgacggtcatcgaggcggtccaatcgtaattggacacgaaacgtacggcgttcgcgccttcggtgtccagaatgccgccgatctggttcttcagacgatcggcccagccggccaccacgtccttcgggttgagcgtgcgttcgccggactggcgcgggtcgccgatgagtccggtggcgccgccgaccagagcaatcggatgatggcccgcaagctgcaggtgacgcatgttgatgagctgcacgaggttgccgatatgcaacgatgcagcagtggggtcgaagccgcaataataggtgatgggctcgccgttcagtgcttctgcgagtcgatcccggtccgtggactgggaaatcaacccgcgccattccagttcctcaagcagggtgttgaaacccgcttccttgaagtcggtgacgtgagccatagcttgtcgcttctccctatcgaattgtgaatgagactgcccaattgggcacagtcaagtttcgcagaacatggcgacagtgccgaacaccagccgagccgcgcgattcagtaaaacaccttattctagcggcgcgggcccataagttcgcgcaaagagtcgatgatgtcctgacgatccggcacctggaacttcgggaaggacttgagcatacgcttctgctgtgcgttgatgacgccattgacggcccagcgcagacgctcaaccgtatcctgcgaaaactcacgcatcctgtcggataccgcactggagccccgctgccacgtgccaccggcgcgtgccgccacatcctgcaccacctgagcgacggaatcgagcacctgctcgaatccgagcatgcccgtaaccgtgaccgccaagtcgatgatggtgatcagggccagtaccgtgaccagcgtatgcagcatcggcagcggaatcatatccgtgacccgctcgacatatggctgcgaaccaagtaccacgcccacgccgccgagaccgaaaatcaacgcgcccagcaggcagacgcggccttggaggttgaagcggaaattcgagtaatcccaccagcgggcgtggaacagctgctccatgacccacgaggttgtgtattcgagtatcgtggcgcccaccatcgaaatcaggaagatgatgatcgggttatgtacgttgccgagaatggcgacgccgagtatcgcgccggtgccgtaaatcgggcacagcgggccgttgaggaaccctcggttgaccaagcggtgctgttggcaggagacgagaatggattcgtacatccagccgacgaaactgtagaacagaaaccagaggaaataatgttcgagtgtgatgatcatcgacgggcttcgatctcggcgtagggcttcgcggcgggcaacgcgcgcttgttgaaccggtcgagcgagaaggtctcggcggtggcggagcatttgtccgccaaggtgaccagatagccttcgatatagcgcggcggcaccagggtcatcgggaacatgtggttctcgatgctgttgcgttcgatatcgttgagcttgaagtccttcagggcattgaccagggcggcgtggccatgggtgaagccatgccactggtgttcgccgttatcccagtcgtgccagtcgtacaggaagtaatcgtgcaggagggccgcgcgaatcagggatttgaggtcgacgcggtaccacaggtgcgcgcggtcggccatccacacagccaggcaggcgacacgcacggaatgttcgaacgtggtgacgttgccgtgctggtagtagcagcgttcgatctgcatgtggcgatgctcgatgacctcacggccgtgcttggcgaccaggcgttgaatctgcgttcgggtgagcagatgtcccacggtttcgaccctccgttcgggttggttcagtgcaatcccttgttgtgaattacgattacccgacgatattcaagaatccatcgagtaataccgtgaccgattgtagggcacacgtatgtccgtgcacactcatccaaaagaacgacaacgggaaccgttaatcgtggtgggtttcaagatagtcgagataaccctgaaaaccgccatcgaggcttgctacatcgtaaccgcgatcggcaaggatttcagctacttcctcgctccaccatccttgagcacaatagactacgacagttcgatctgtgggcacggttttgagcacatgggccagagggtcgagtggtgcattgatggcaccttcgaccgggtgggcggcgaagtcggctggttccctcaagtcgagcagcgtgaccgtattcgggtcgagcttggcaaattccgccggcgtgatgcggcggtacgatgcttcactgctctcatcgtcatcgaccgcattacgcaaagcaataggcatgttcttcccctctcgttccgatcttggctcccctcaaggaggggtgccacatagctctaaatcgcgcaggccggctgaatatagttggccggatcaatagcagtaatggtcggctgctcaccgcacaccgggcagtcgggcacatggttcggcaacggcacacggcggatgttcatggtcagggcatccacagtgagcatacgagccacgagcggctcccccacgccggcaatcagcttgacggcctcagtcgcctccagactgccgatcacaccgaccaccgcgcccagcacgccggcctccttgcaggtcggaatttcacctgcggcgggcatatcgcggaagatgcagcggtagcaggggccttcgcctgggatgacggtcatcacctggccggagaacccgaccacgcccgcatggatatacggcttgccggccagtacacatgcgtcattgatgaggaattttgcggcgaagttgtcggtggcatcgatcaccagatcgtacggttcgatgaggccggcgatgttgctggcatcgacgagctcgtagtaggtgtcgaccgtcacatctgggttgagcgcgcggatggccgtggccgcggattccactttgggcgctccgacacgtgcagtggtatggatgatctgacgttgcagattgctcatatccaccacatcgccgtccaccagtccgatatggccgacgccggccgccgccagatacagggcggccggagagccaagcccgcccgctccaatgatgagcacgctggaggccaacaaccgcttctgccctttgacgcccagccccttcaaaatcagatggcgcgcgtaccgctccacctgttcatcagtcaatgccatgttttctccatgtttccagctcccctcagtccgctacgcggccagctcccctcagagaggggagctaataaaagtgtcagtgcaaatatcccgtagtcggactggacggcacggcctgtccctcggtcaccttgcccagaccggacagatacgccgcacgaccagcatcgatggcgtgcttgaacgcctcagccatcagcgggatattgccagcagaggcaacggccgtgtacgccatcaccgcatccgcacccatctccatggcgtcgcatgcctgactcgggcgtccgatgccggcatcgatgatgaccggcacatgcgcattggcgatgatgatctcgatgaagtcacgcatgcgcaggcccatgttggagccgatcagcgaaccgagcggcataacggcggcggcaccggcctcctccagctggcgtgcggcaatcgggtccgggaacatgtagggcatgaccacgaagccttccttggccagcatttcggtggctcggatggtttcggcgttgtccggcaggaggtacttggtctcgtgttcaatttcgaccttgacgaagtcggtgtggcacacttcgcgtgccagtcgggcgatacgcacggcttcctcggcgttgcgcgcaccggaggtgttgggcagcaacgtgatgccttcgggaatgtagtcgagcacgctgttctcggtggtctgcgcgcggcgcagtgccatggtgacgatttgcgtgcctgcatgttcgaccgtggccttgatgaggttcaggtcgtagcggccggagcccagaatgaatcgcgactggaactcgtgaccgcccagggtcagcggcttgtcttccactggcagaatcggcgcggcggtgccgaccggattggtgacggcgggctgcggcggcagcggagtcgcctcaacagatgcttcagtaaccggattaatattgctcatagcttttcctttcatccaccctgtacaaactgcacaatttccatgacgcactggtcgtcgagcatggcgtcggcacgcttatcgcgcgggataatctcaccattgagttcgatggccacacgctcggcgcggaatccgtgcgcttcgagataatcggcgacgctgaccggcgtctcgagcgtgacctgctctccgttgacctgcataatatcctttcagatagtaaaaaagggtgcacgaaacgaaccgtaccttaagtggtgcgcccattcatgaacccaatcatgcgaccgttcgaccgctgtgatgtattggctccatcacgaccgtctcacggctgaattatgcaaacggaatgaaagctgtatcggagaacccggcaaatctgcaacaacgattccttacggcggcatgacccgcgtcaagttccccggtcgaagtctggcgacttcctctcagcctcacggctcccgttcgttacgatttctcagtgtatgccgttgcagtgacaacagcaaaatagagctccctctgacgagggagctctattgggactagaacgtgccgggggctttgtaggcggagccatccgacgtggatgcggggaagagcttgagttcttcgacctcggccttggcgtcggcgatctgctcgcgcacgcgaccgtaagcggtgccgcccttgccgttgcgggagtcgaccgaaccgtggctggagagcacttcgcgtactcccggagccttgtcggccggcaggaacgcggcgaaggtctcgatgaagtcattgtcggtcagatcccacagttcctggccgcggccttcggcgagcttgacgcaggcaccagagagctcgtgcgcatggcggaacggcacaccgttcttgacaagccattcggcgatgtcggtggccagcgcgaagccggtcggggcttcctcttcaagccgctcgctgtcgaagtgcatggtcttgaccatgccggtgaaggcgggcagcagcacttcgagcgtatcgacctggtcgaacacggcctccttgtcctcctgcaggtcgcgagcgtaggcggtgggcaggcccttcagggtggccagcagaccggtcagatcgccgatgagtcggccggacttgccgcgggcgagctcggcgatatccgggttcttcttctgcggcatgatggaggagccggtggaatagccgtcgtcgagcttgacgaaggcgaactcctgggtgttccagatgatgatctcctcggacaggcgggagatgtccacgccggtcatggcggccacgaacgcgaattcggccacgagatcacgtgcggcggtgccatcgatggagttgtcggtcacgcgggagaagccgagctcacgcgccacggcctccgggtcgaggccgagcgtgttgccggccagtgcgccggagccgtacggagaggcgttgatgcgcttgtcccagtcgatcagtcgctgcacgtcgcgaatcagcggccaagcgtgggccatgagctggtgcgcgagcagcacgggctgggcgtgctgcatgtgggtgcggcccggcatcacggtgcggccggccttttcgctctgctcgatcagggcgttgacgaggtcaagcaggagtccggcaatcgcacgggagtggcggcgcagccacatacgaatcaggcaggcgatctggtcgttgcgggagcgtccggcacgcagtttgccgccgagttcgtcgccggcaatgtcgatcagtccgcgttcgagggcggtggcctcgtcctcatcgtcttcgatgggggcgaaggagccgtcatccacatgacgctggagcgtgtcgagcgcatcctccatgcgctgcagctcgtcggcggtcaaaagtcccgcacggccgagagcacgggcgtgggcgcgggaaccggcgatatcgtcgtcggccaagcgccagtcgaactgcgtggacttggacagtcgggccaactccggagacggaccggatgtaaaacgaccaccccacagggccagatgttcgttgttctcagtcatgaaagctccttgaaaagtgaaaatagctgtgtttaagcgtagcaatgtgttcaaacatacagttgcccccgctggcgagggctgtcacatggagtgtgactgaggacagtcctttcaaagaccactcccagtcagctatgccgacagcctcgcagcgggggcgactgagtaagaattactcgacggtgttcttcgggacctcgatgccgttgccgaacttgacgtcgcgggctgcggccacgcgggacggcaggccgtagatgtcgatgaagccgttggaggacttctggtcgaaggtatcgccggaatcgtaggtggcgagcttgtagtcgtacagcgaggagtcggaacgacggccggtcaccacggcgcggccaccgtgcaggaccatgcgaatctcaccggacacgtacttctgggtgtcttcgatgaaggcgttgagcgactgggttgccggggagaaccactgcgcatcgtaaaccagctcgccccagcgcttgtcgatgtcgcgcttgatgcggtgctgttcgcgttcgaggcagcagttttcgagttcctggtgagcggtaatcagggccacggcacccggagcctcgtacagctcgcgggacttgatgccgaccaggcggtcctcgatgaggtcgatgcggccgatgccctgggctccggcgcggcggttcatctcttcgatggcctgcagcggggtgacgtcacgtccgtcgatcttgaccggcacaccttccttgaactcgatgacgacttcatcttcgaccggcgggaaggccgggtcgtcggtgtaggagtagcagtccttggtcgggccgttccacggatcctcgaggaagccggtctcaatggcgcggccccatacgttctggtcgatggagtacggggacttctcggtctgggtgatcggcagcttgtgctccttggcgaacgcgatctcgacgtcgcgggtcagggacaggtcgcgaatcgggctgatggccttcagcgtcgggtcgatggaggcgatggagacctcgaaacgaacctgatcgttacccttgccggtgcaaccgtgggagatggtgtcggcgccgaactggtgggcggcgcgcacgaggtgcttggagatcagcggacgggagatggcggagaccagcgggtagacgccttcgtacatggcgttggccttgagggccttcatgcaatattcgttggcgaactcgtcacgggcgtcgaccacgtaggattcgacggctccgcaggcgagggcgcgctgcttgatggtctcaaggctttcaccaccttggccgacatcgagggacacggccacgacgtccttgccggtgcgctccttcaggtacgagatggcgacggaggtgtcaagaccgccggagtaggccagaacaatgcgcttgttatctgccattggttccctttcattcaaggtctgaaaaaacaaactgatgcaagtatatacagaggactgtatatttatgcacggcgtgttggttatttggaagcgaggcttagtagccagtcggagcgggagacggcggtgtcgtcattggtgcaaatcaccatgacggtgtcgtctccggcgatggtgcccagcacgccttcgatcggctgcctgtcaatcaccgaggccacgtattgtgcggcaccggaaggcgtgtgcaccacaaccagatttccggcggcggccaccgaggtgaccagtccgttcagcacgcgggacatctgtgcctcaccgcgctcccctacatcctcaccttccgaagcaacgacgctgcgacccaccgtgtaggccaccgtgccgtccttcagccgggtcttcaccgcatgcatctcgtcaagatcgcggctcagggtcgcctgagtcaccgcaatgccctcgtcgataaggattttggacagctgtgattgcgaggtgatgatatgcgtggcgagcgcctgttctatggcactcagccgcgccgccctggtggcagggcgctgcagggacggaccggtttcactcatgcgagcaggctttcgtctccacgggccttgccggtcaaccaagtcagcaacgctttctgtgcgtgcagacggttctcggcctcgtcccacaccacggactgcgggccatcgatcacttcagcggtgacttccttgccgcggtaggcgggcaggcagtgctggaagagcgcatccggcttggccaatgccataagttcggtgttgacctggtaatcccagaacggcttggaacggatggcgtattcggcctcctcgcccatggagacccaggtgtcggtgaacacgcagtcggcgtccttcactgcttccttggcatcggtggtgaccaggatggagccgccggtctcggccgcgacgcgcttggcgtcggccacgatgtccgggcggggcaggtagccgtgggggccggccacgcgcacgtccatgccggccacggcaccgccgagcaggtaggagttagccatgttgttggccgcgtcaccgaggtaggcgatggtctggttcttcaggttgtcgacgccgcctcggtgctcggcgatggtctggaagtcggcaagaatctggcagggatggaagtcatcggtcagggcgttgaccaccggatgggtggagtacttggccatttcttcgacgcggtcctggccgaaggtgcgccacaccacgccgtaagccatgcggtcgagcacacgagcggtatcggccacgggctcgccacggcccagctgggagccggacttgtcgatgaccagcgggtaaccgccaagctcggcaacgccgatggagaagctggaacgggtgcgggtggatggcttgtcgaacagtacggcgacggcctgcggaccggcgaacggctgcttgtagaagcggtcatggtggaacttgatggcaagttcgagcacctgcttctgctcctcatggttgaggtcgtcgtcacgcagcatgtggcgaagttctggggtcatgatgatctccttggatcggtgggtcggcagtgacggcgagaaatcagtcgtcgggcaggtccgtaggcacatccttgaggatggcaagtgcctgatccacgtcttgagcggttacaatcagcggcggtgcgaaacgcagcgcattgggagccaccgcgttgacgatgagcccgtgttcgaggcagtagttcatcaccgcgtgggagcagggatgcttgagctcgacggcgtccagcaaaccacgaccgcgtacggaaacgaacagcggattaccggtggccataatgccatcgcgcagctgttcgccgcgagcttcggcgttggccaccagattctcgtcttcaatcacgccaagagtggcgagtcccgcagccgcacccagcggattgccggcaaaggtggagccgtgggaaccaggagtgaacagagccgcaagtttctcgccgaaagcgatcatgccgcccatcgggaatccgcctgccacgcccttggcgaaagtcaccatatccggcgtcacgccgccggacagatcgtcacgctggaatgcgaaccacttgccggtacgtccgataccggtctgtacttcatcgatgatgagcagcgcgtggttgatatcgcacagttcgcgcacgaacttgacgtaatcggcgcccaacggctgcacgccggcttcgccctggataagttccagaatcacagcagccaccggacccttgccatagcggccgagaccggtctgtgcaaaagcgtcgtgcagggcgaccttgtcgccggcgcgcacgaattcaatgttcggcaccagcggatcatacggcttgcggataccgggtttccatgtggcggacagcgcacccatcgtacggccatggaagccgtgagtcattgcgagaatgcgtgcgggcttgccgccgatggaaggcagggcaccaggcaaggtgcggccatacagcttggcaagcttgagggcagcttcattgccttcagcaccggagttgccgaagtagactttggagccttcaggtgcaccagccagcttgaccagtttggatgccagctcaatttgcggctcggacgcgaaatagttgctgatatgagccaccttggcagcctgatcggcaaccgctttgacccacttggggtgggcgtatccgagggaattgacggcgatgcctgccaggaaatcgaggtattcgttaccgtcaacatcccagatgtgggcaccttggccgtgatccatgacgcgcaacggcgtaccgaacacattcatgtggacctgagagtactctcccagccacttgctgtcttccgtacctagtttttcctcatgctcagtagccataagagctcctcatttccagtccttcatcgggcataaccatggtaccgatgcctgcggaggtgaatatctcgttcaaaatcgaatgcggcttgcgcccgtcgatgatatgggcttggggcacgccaccgtcgatggccctgacacaggcctccatcttgggtcgcataccggattccaggtccggcagcatatcgcgcaggttttccacaccgatccggccaatcagagaattcttgtccggccaatcggcgtacagaccatccacatcggtcaagataacaagcttgcgtgcgcccacagcggcagccaaagcggcggcggcggaatcggcgttcacgttgagcacttcagtggcatcttcttcgttcggagccacggaagagacgaccgggatacgaccggcggccaccagatcctcgactgccgaggcatcgacggaaaccacatcgccgaccaagccgatatcggtgggcttgccattgatgatgggcctgcgctgcatggccgagaacaggccgccgtcttcaccggacaggcctacggccagcgggccgtgcgcgttgatcaggccgaccagttcgcgtgacaccttgccggtcaggaccatgcgcaccacgtccatggcctcgggggtggtgaccctcaggccgcctttgaattcggatttgatgccgagggccttgagcatgtgggagatctgcgggccgccgccgtgcacgacgatcggatgcaggcccacctgacgcaggaagaccatgtcttcggcgaagcactgcttcagatggtcatcgaccatggcgttgccgccgtatttgacgacgatacgctggccggcgaactcctccagcca

SEQ ID NO: 284 - DNA, 11901 bp, Unknown
  R101_18m  MAG No. k141_74022
cggtggccatgcacttcgggcttggcaaaaatgcgcaggtccgtgccgggttcggccagagcagcggccacatcggtgaactcggcctcaccgtcgccggccaccacaatcgcatggcttgccgccaccgagccggccggaatcgtgagcgccacatgctcgggggtgatcggcaggccgagaatcgcgcgggcgtgcagcgcgaactcgctcagacgctgggaggtcatcgtcaccataccggtatcgtgcggacggggggagacctcgttgaacagaatcgagccgtcggtgagtacgaacagctccacgccgaatacgccccaaccggtttcgccggtcgcctgagccttggccaccaagccttcaacggcggtacgtgcgatgtcgcgcgcccgctcggcctcaccatcgggctcggtagccggctgccaggactcgcggtaatcgccggactcctgacgttggccgatcggcgcgcacgtcacaatgccggcggacgaagaaacggtcagtaccgtcagctcacgctccagcggggcaagcgcctcaacgatcacgcgcgacacatcgccctcatcggcggcgcggcggccctcctgcgcttcggtccaagcggcatcgatggcgtcggcggaacgcaccaccgactggccgtgaccagacgagctcatcaccggcttgaccacgcacggatagccgacttccgaagctccggcgcgcagctcttccagcgagccggcaaaacgatacggtgtagtcggcaagcccaattcttcgtgggccagtacgcgcaggcgctcgcggtccatgcaaatcgcggcgatttcggcgctcggcaccacctgggcgcccgcggccgcagcaccggccagcacatcggtggcgatggcctctacctcgggcacgatgatgtccggcttgatttcatcgaacaatgcctgcaattcggcggcattcgccatatccaacgcgcggtattcatgcgccacctgctgggccggagcgccggcataggagtcagcagcacacacccatgcgcccagtcgcatgagttcaagtgtgacctccttgcccagctcgccagcgcccaaaaacagcacacgggtggggtgcttgcccagcggtgtgcccagcgggtggttggctgcgcgagttgcgggggagacggcggaagtctcagcgggaattgcgggagaggaggcggaagtcacggcagtattcacggcgttctcagtcatacccacattctgccatgacgcgatgatttcggtatgtcgcgtgagcggagtgcctcgcgcggcaaaattacgggcggaatatccggcttcatggggcggtaaattccccatggggcggtaatgagtccatggggcggtttgttggttttgtgaaaccgcggaattaagccgttttgccttaccgccccatgggaatttcaccgccccatggggtaaataccgccccatgggcaggttgccgccccatgaagattcagatgcccgtaacccgccataaatactgcgtatagacacgccattgcgtgtgtaacagagccgtcgtaccttagcaattaccggccgatgaagtatggggcggtcgggccaacattttgggatgcgacatatagcgaatagcggcgtgccggttccggcatttcaggctacaagccggcacgctggcaatagtcgaagggggagggcgacatgccgacgtcgaacgcggctctgatttctcgacgggcggctagtctgcccggcaatccttttgctgaggcggacgcacgcgctgcagcagccgtcgccgctggcaaggatatcatcgacttgagcaaagggaatcccgatggctggccgccatcctttgtacaggacgcgctttctcacgcttcccacaatccttccctgttccggtacccgccatttgatgggcttccggaatatctgaatgcgattgccggctggtattcgcgccagcacaacgtcaccgtggaccccgccacccagctgctggcgacttccggctcgtccgtcggcatcaccaccgtcatccaggcgctggtcgatccgggagatacggtggtggcggtcgacccatattacccgcagtacgagggctcaacagtagtggccggtggccagttcgagacgattcccgctgacccgagccgcggattcctgcccgacttggatgcggtggaaccagcgctatggactcgcgccaaactgctgattctgaactatcccaacaatccgaccggcgcggccgcaacacccgaactgtatgagacggccatgcgcctggccaagcaatacggattcatcgtacttaacgatttcgcctatgcggggctcgaattcggcgacgtgcgctcgctgagcctgctggagactccgggcgcgctggacgtggcgctggaacttggctcgctgtccaagatgtatatggtggccggctggcgcggtggattcgtggcgggcaacgccgaagtcctctctgccgtcaaagccgtacaccggcagactgcggtgttggcttccagcgttattcagcaggccggtgcggtggcgctggaatccgatcagagcacggtgaagctgctggctgtgcaatatcagcatcgttttgaagtggtgcgtgacgggtttacccaggctggtctgccggtggctgaggcccaaggcggcctgttcgcgtgggcgcgcgtgccggtgcggtggcatggcgattccgccgcattcgtggattggctgctcaacacggccggcgtggcgctgatgccgggggtctgcttcggtcaggtgggcgaaggctgggtgcgcatcagtctgctcaagcacaccgccgagttgttccaggtcgtggcccgcgtcgatcgtgcgctgcgaagcgcgtgattcaatattaggcaaaatgcggcagcccataccatttccggcctatccaagcagcgcggccgacgccattgcgacgcggtggtttaggatgaggcaatgcgcgaaaacgggattgaagagagcattgatcgtccgctgactatcgctcttgtggtcgatacggtgggcaatcagggcaacggcacctccaattcggccttgcaatgggctgcagaattggagcggcaaggccatcatgtgaggcttgtcggtataggggcgcccgaatatccggcgcgcgtgaatagggtgccgctcgtctcgtgggtggccgccaagcagctcatgcaattcgccgaacccagcgacacgttgttccgcaccgcctttcaaggcgtggatgtggtgcatatctatatgccgttcaaattcggccgtcgtgccgctaaagtcgcccaccaaatgggcattcccgtgactgccggattccacctgcagccggagaacgtgctgtattcggccggccctctacgtcgcattcccggtatttccagcttcctgtactggctgttcaagcactggctgtacaagcacattgaccacatccatgtgcccaccgaaatgaccgcgagcctgttgcgcgcgcacgggtataaagccaagttgcacgtgatttccaatggttattcaccggtgtattcgccgaagaagccggccgatccggatgcctcggctcccgtgccgttccgcgtcatcgcttccggccgactggctagcgagaaagatcagattacgctgatcaaggcggtgtcgatgtcccggcacgccggcgatattcagctggtgatcgccggtactgggccgctcaagcagtatctcaagttccgcgccgggcgtttgctggcgcgcaaggccgatatcggattccacaagcacgccgatatgcccgatttgttgcgttcgggcgatttgttcgtgcattgttcgattgccgacatcgaatcggtgagcgtgatcgaggcgatggcgtgcggattggtgccggtgatcgccgcgtccgaactgtcggcggccagccagttcgcgctgatcgacgagtcgttgttccccgtgcgagacgcggccctgctggcccgacgcatcgattggtggatcgcacatcaggccgagcgcgccgaatggggcgagaaatacgccgaatacaccaaggcgcattattccgtggaagcctcggtccacaagttcgtggatatggaacgcaaggcgataggggaataggagccttctcgtttgcggagaggtctttccctcagtccgcctgcggtggccagctccctcatcagagggatctacgaaaaaacctccctctgatgagggaggtggcatcgcgaagcgatgacggagggagagattagcgaagggttttacaacaactcaataagctgatcgacctcttcatgcgtggtggcccagctggtgcagatgcgcatcacggtatgcgtgtcgtcggccttctcggtaaagccgagcttgacctcgcgctccagacggtcgatggtcggctgatccatcgtcacgaaaatctggttggtgggcgcttcgaaagtgagcgtgtagcccttggcgcgcagggcctcgcgaatacgatcggccgcctcattggcgttgcgggcgatcttgaaatacaggttgtcggtgaacaaagcgtcaaactgcgcgcccagcacaaagcccttggccagcaaggcaccgtgctgcttgatgagggtcaagaagtgcttcggcgtgttgtgcttggtaaacaccacggcctcgccgaacagggcacccaccttggtaccgccgatgtagaacacgtcggcgatggtcgccagatccgcgagcgtcatgtctgagccggtggtggtcagcgcgtagccgagtcgcgctccgtccacgaacagcggcatgtcgtacttgtgcgccacatcggcgatggcctgcaactcggccttggagtagatggtgccatattcggtgctttgcgagacgtacacggagcccgggaacaccatgtgctcgtagttgccgtccgcatagaaggtcttgcagaactcgtccagttcggtcgggtccattttgccgttgtgctggggaatcgtgagcaccttgtgcccggagaactcgatggcgccggcctcgtgcacgttcggatggccggaggcgaccgcgaccacgcctgcatacgccggggtgatggtgtcgatgacgacctggttggtctgcgtgccgccgacgaggaaccacacatccgcgtccggctggccgcaggcctcgcggatcttggccttggcctgatcgctcagttcgtcggacccgtagcccgaatacagatggttgttggcttcagccacggcttcaagcaccgcgggatgggcggcgcgggagtaatcgttctcaaaagacagcatgacggaccttttgtccttgtgttagatgaattggatatgcccgagtgtacaacgtggcggttcccggcaggagcggggaattcatggagaaaaacaaaacccttccgcgaacggaagggttttactggggtggccaacgcggctcgaacgcgcgaccttctgaaccacaatcagatgctctaccaactgagctatggccaccatagtgtcgtattcagcaagctgaattcgcacaacaggtgaatactatacacaactttgcggatgtgtgctcatcggtgtgtcgcgatggaatcaagcggttggtttcattcttggggccaggctgtgggctgtctcaaatggtgggatgtggacgagtgggtcttgtgtggcgattgatgaaaagtcagggcacacaacggcgtgatggtgcggctggggattgcagagatgattacgtgagcgttcacaatgtgagcattatgtttcatatcaaccgcgacccgcctagtttcatgcgatgttacctacaccgaacaagggaagagaaacaccatggaaaaggttaaagcctttgcagattggctgaccaagtggtttacggtcatcgtcatcgtctgggccgtcttcaactacttcgtgccggccgccagcctgtggggcaaggcgtacaccggctacatgctgggcatcgtgctgttcggcatggggctgaccctgacgctggacgatttcaagcgcatcctcacccagccgatgatggtcatcgtcggcacggtggcccacttcgtcatcatgccgctcgtcgccgtggccctgtgcgcgatcttccacctgtccggcccgctggccgtgggcgtgattctcgtcggctgctgcccgtccggcacctcctccaacgtgatgagctacctgtcccgtggtgatgtggccctcgatgtctccatcggcatcctctccaccctgtgcgccccgttcatgattccgctgctgatgcagctgctggcctcccagtatgtgagcgtgccggtcgaatccctgttcctcaatgccgtcaaggtggtgctcttcccgattgccctcggtgtgatctgccacatgatcttcggcaagaagatcgagaaggtcacggtcgccctgccgatcgtctcccaggtggccatcctgctgatcatcggtgtggtcgtcgccgccaacggtccgaagctgttcgtggccagctccctgatggccatcccggtggtcatcctgcataatctgtgcggctactcgctgggcttcggcttctcgaagctgatgtacaggatctacccgaagggcttccgctacgcgcagcagaaggccatcacgttcgaggtcggcatgcaggactccgccctgggcgccacgctggccctgacctccttcgcgtccaacccgctcgccgccgtgccgtccacgttcttctccgtgtggcacaacatctccggctccatcctgtccagctggtggcgcaaccatgacgaccggcacgagattcattgggattctgacaacggcgagaagggctccgccaagagcaccgtttccgtggcccacccgttcgacgccgacaaggccgccaaggtcgctgcctgaaatcctgagatggtgagaaaggtcgggtaaggcacgactccagtcagtcggtcactcacctttcctacctcgcataacatagccgctcccgcttacttccgattgatgtatcgggcgtttcgcgagggcggttttgctataattagtaatgcagaaagcggcaaggtgatacggcaaagaggccgggtcgctagaggttcccatcggatatggaagagcacgaggatgtgctggaaacagataacacagaagcggcatgtggtgaaaagaaacataatgtaacctccttggcggtgcccccgtgtgacatagtctccgcgggggcacctgctgtgtggcgttcgcttttttgcgacgcattcccgggaatattgcgttgggagggcgtgtgtgcgtgtgttgtgcgacgcattcccgggattgttgcgccagaaggaggggagaagtacagggcgcggattgtcccaagctagtgagtcgaggcccggcgcgtcgttgtccggcggaatcgtagtatagatattcgtgtgtgccagcagcacgccttatgtaacaggcgagcatgctgggatatccttcaaaccgctgatcgcacgtagtaatgcgccgacgggaggggcgaaggccatcgggccggtggactgggctatcttttccgattcgtcgggtgtcgccaacaggcagatgccaagcgagtgtgctgaaaagtgtgggcgcagtgcggcggtcacacaaaagcaagagaaaccactgaatcggagaattcaagttgcctactattgaacagctcgtccgtaagggacgtcaggcaaagccgaagaagtccaagactttggccctgaagggcagcccgctgcgtcgcggcgtgtgcacccgtgtctacaccaccaccccgaagaagccgaactcggctctgcgtaaggtcgctcgtgtgcgcctgtcctcgggcatcgaagtcaccgcctacattccgggcgagggccacaacctgcaggagcactccatcgtgctcgtgcgcggcggccgtgtgaaggatctcccgggtgtgcgttaccacatcgtgcgcggcgcgctcgatacccagggtgtcaaggaccgtaagcagggtcgttccctgtatggagcaaagaaggcgaagtaagagatatgtcacgtaagggaccttccaagaagcacgtcgtgctgcccgatccgatctacggttccaccgtggtggcgcagctcatcaacaagattctgcttgacggcaagaagtcgatcgccgaagacatcgtctactccgcgctcgatatggtcaaggagaagtccgaccaggaaccggtggctgtgctcaagcgcgccctggacaacatccgtccgtccctcgaggttcgctcccgccgtgtcggtggcgccacctaccaggtgccggtcgaggtcaagccgaaccgcgccaacaccctgtcgctgcgctggctgaccgacttctcccgcgcccgtcgtgagaagaccatggctgagcgtctcgccaacgagatcctggatgcctccaacggcctcggtgcttctgtcaagcgccgcgaggatactcataagatggcggaggctaacaaggccttcgcgcattaccgctggtaatcactcgccctgagtaaaactaaggaaaaagatggctgaagagatttcggacctccacgacgtccgcaatatcggcatcatggcccacatcgatgccggcaagaccaccactaccgagcgtattctgttctacaccggtaagaactacaagatcggcgagacccacgacggcgcctccaccatggacttcatggcgcaggagcaggaacgtggtatcaccatccagtccgctgctaccacctgcttctggagccgtcagtcccacgacaccaaggacaagttccagatcaacatcatcgatacccctggccacgtggacttcacggccgaggtggagcgctccctgcgtgtgctcgatggtgccgttgccgtgttcgacggcaaggaaggcgtggagccgcagtccgagaccgtgtggcgtcaggccgataagtacggcgttccgcgtatctgcttcatcaacaagatggacaagctgggcgcgaacttctactactccgtcgacaccatcaaggagaagctgggcgccgctccgatcgtgatgcagctgccgatcggcgccgagaacgacttcaccggcgtcgtcgacctggtcgagatgcaggcctatgtgtggaacggcaccgaggagctcggcgccaagtacgacaccaccgagatcccggacgatctcaaggacaaggcccaggagtaccacgagaagctcgtggaagccgccgccgaagccgacgacgaactcatgaacaagttcttcgaggacggcgacctgtccaaggaagacatccgcgccggcgtgcgcaagctcaccatcgccaaggaagccttcccggtcttctgcggctccgccttcaaggacaagggcgttcagccgatgctggacggtgtcgtcgactacctgccgtcccctgaggatgtgccggccatcaagggctacaagcccggcgacgagtccgtcgagatcgaccgtcacccggtcaagtccgatccgttcgcggctctggtcttcaagatctccacccacccgttctacggcaagctcgtgttcgtgcgcgtctactccggctccgttgtgccgggcgactccgtgctcgactccacccgcgagaagaaggaacgtatcggcaagatcttccagatgcacgccgataaggaaaacccgatggaccgcgccgacgccggtaacatctacaccttcgtgggcctcaagaacgtcaccaccggcgacaccctgtgctccatcaacgacccgatcaccctcgactccatgaccttcccggatccggtgatccaggtggccgtcgagccgaagaccaaggccgatcaggagaagatgggcatcgccctgtccaagctggccgaagaggatccgaccttccaggtcacgaccgacgaagagtccggccagaccctgatcgccggcatgggcgagctccagctcgacatcatcgtcgaccgtatgcgccgcgagttcaaggttgagtgcaaccagggcaagccgcaggtcgcctaccgcgagaccatccgcaaggccgtcatggaccagggctacacccacaagaagcagaccggtggttccggccagttcgcaaaggtcctgatgaacttcgagccgctcgacaccaccgagggcaagaccttcgagttcgagaacaaggtcaccggcggccacatctccgccgaattcatcggccccatcgaggccggtgtcaaggaggccatggagtccggtgttctcgccggcttcccggtcgtgggcgtcaaggccaccgtcaccgacggccagatgcacccggtcgattcctccgaaatggccttcaagctcgcaggttccatgtgcttcaaggaagctgccccgaaggccaagccggtcattctcgaaccgatcatgaaggtcgaagtccgtacgccggaagagtacatgggcgaagtcatcggcgatctgaaccagcgccgtggcaacatccagtccatgaccgacggtgtcggcgtcaaggtcatcgacgccaaggtcccgctgtccgagatgttcggctacatcggcgacctgcgttccaagacccagggccgcgccatgttcaccatggagatggactcctacgacgaggtgccgaagagcgtctccgaggagatcatcaaggcccagcgcggcgagtgacacgcgccacatcatgaagtggccggtgtctccagtcagcggtagtatcgtataccgctgactgggttctggctcttcaaagtggcacataacccagaaacccagtagaataagcgagtccctgtgcgaaagggcgcaggaaactcacgagacgtccaggaggacaaaagtaatggcaaaggaaaagtacgagcgtactaagccgcacgttaacatcggtaccatcggccacgtcgaccacggtaagactaccctgactgccgccatctccaaggtgctgcacgaggagttcccggatgtcaacccggagtacgacttcaaccagatcgactccgctccggaagaggccgcccgcggtatcaccatcaacatcgcccacatcgagtaccagaccgagaagcgtcactacgctcacgtcgactgcccgggccacgccgacttcgtgaagaacatgatcaccggtgccgcccagatggatggcgccatcctcgttgtggccgccaccgacggcccgatggcccagacccgcgagcacgtgctgctcgcccgtcaggtcggcgttccgaagatcctcgtcgccctcaacaagtgcgacatggtcgacgatgaagagctcatcgagctcgtcgaagaagaggtccgtgacctcctcgacgagaacggcttcgatcgcgactgcccggtcatccacacctccgcctacggcgccctgcacgacgacgctccggaccacgagaagtgggtccagtccgtcaaggacctcatggccgccgtcgatgactacatcccgaccccggttcacgacctggacaagccgttcctgatgccgatcgaggacgtcttcaccatctctggccgtggtaccgttgtcaccggtcgtgtcgagcgtggccagctggccgtcaacaccccggtcgagatcgttggtatccgtccgacccagcagaccaccgtcacctccatcgagaccttccacaagaccatggacgcctgcgaggctggcgacaacaccggtctgctgctgcgtggcctcggccgtgaggatgtcgagcgtggccaggtcgtggccaagccgggctccgtcaccccgcacaccaagttcgagggcgaagtctacgtgctgaccaaggacgaaggcggccgtcactcgccgttcttctccaactaccgtccgcagttctacttccgcaccaccgacgtcacc

SEQ ID NO: 285 - DNA, 11927 bp, Unknown
  R101_18m  MAG No. k141_74506
ggctttggcctcgatggaaacttcacggagcttgtccatgatgcgttcacgcgcacgttccttcatgagttcgttgcctcgttccatcacgaatgtgcctttgccctgcacattctccacgagcccctcgtcggccagttcgttatacgctctggtcacggtgagcacgctgacacgcagttccttggcgagcttgcgcagtgagggaagcgcctcgcctgccgtaagctcacccgacatgatcgcggacctgatttggttcttgatctgttcgtaaatcggttctccggacacggatgagatgatcagcttcaatctgtgcctctttttctgtatattccgtaggtgatatatctcccagccgaacagtcagaagcaaactgtttagctgttatgtataatagtagcacagaaaacccgtactgttattgcgtgtcgcataacagtacgggttctatcggaatataaggaaatccgccgctccatgaacgtctcttgcggtcggcgattgacggaagtgacatttatttgcgctcgcggattccggtatggaggacggttatacgcgagtcggatggatgatatggcggaagcacaggtagatcagccacgccaacggcatggtcatcaacataggcaatgcagggaaccggcgatgagtcccacgccgatcatgattgcgatttgcttcgcgccgaaggagagagcgtccctttcggcgcgatccgccgcctgggcggtgttgctatcttgctgcatgattgtttgttggggaaaccatctgttattccattcccctatagagttctttggcgagatcaatcagtgacttgtctgagcctgctgggccaataaggcatgcgccgcatggcagtccatctgctgtttccaatgggatgttcacggcgggcagtccgccgatgcctgcgatgctggtcaaacgtagtgtctgcgcgcgggtgcgctcagcctgtgccatgtcgttgctgctgattttcaatggcgcgacggatgatgccgagggaatcagcagtgcatggtttccaataattccgcgtaccattgtcctggcctgtttgagtcgtttcagcccctcgtgatagtcgctggagctgattgtggcgtcatggcggaatcgtgctgcaatttctggcgccaatgacgaccaatgttggctcacccattcgccatttgcctgccatgcctcataaccgcgtacggtctggaagatcgatacaagttcatccagcatgccagaggtgaagccggcagtggagatatcgccgtgcgcgccactattccgattgccgatgctggcacggaaggctatgaatggttcgcgcacatcttgttcgacgcactggtccagcgcagggcagattgccaaaccgtcgatcatcgtgccgggttcctgctccggcatcattgctttggcgacaaatgccagagtctgtgcatctcgggtcatccagccgaccgtgtcgaaagattcagacaatggctggatgcctttgcggctgattcgtccgtgtgtggtgcgaataccccacaatccctgatatgacgcgggaatacgaattgatccggcagtgtcggtacccaatccaatcgtagcctgtccgcatgctaccgctgcggcggggcctgatgacgagcctccgctgattcgctctggcgccttggggttcggtggtgtgccgtaatggatgttcgtgccagccagggaataagcgaactcgtcggtctgggcgatgcctgctacatcggctccggcgagtagcagcagttccacggcatcggcatttcgcatgcggatcggagagtctgatagaaaatcaggattgccggcaccgatgcgttggccggcgatggcgtaaaggtccttgacggcgacgttcatacctgataacggtccttggacattcgcctttgccagcggtgtgccgaccacacgccagacacgccgatccacggcgggcgagggatacgtcagatgcgcagcgacgattttccaagccggttcggtgccgcgagaatcgagttggttgttgctttcatctgatacgcgtgaccacacctgcgtttgaattaccctgcctccagatgctttatcgaattcggaaatcacgcatgcattgttggcatccagctgtcgtgccacacggcgatgcagtttgcgctccggggcaccgcctctctttgcccgaaacgcggtgatggcgttatggccgacaagcattcccgcgctatcggaacgcactacgggaatatcatccggattatcggcgaacaattccgaaagcgtggcggtgtcattggccattaaagcctgttcatattgtctgatggctctgagcaacgttgaatcgagacttgacgcgttgtcgaagaccggatgtgggatatggcgcgaactcatcatgtctccttaatgggtgggattcgtctgactggcatcgtcggcgtatgttttgatgtcgcgcatcgtccgttcataggcgggcagttgctgaaacatcgacagatcgatcagaccgtgaacgcctttggtgatgtcaacggcttgcgtcacgtcgaagtcgacggcggccgacagcagcaggtaaacctgttgacgtggcatctcgaacatggtggcaatcatatcgatggcgtattcgacgctttgtgataatgcgtcatccagcgtactgccgaaacccattgggatcagcgtgccgtgactgatcgcaaatggcagatccgtgcgtccgaacagtcgtttggcttcgtctgccggtactacctgcacgcgaagtgtcgccctgagcgacgcttccaacgcagtgagcgacacctcgccattgccttgggcaaaatgcggatcgccgatatacaaacctgcgccttcgatctgcacgggcagaaacagcgtggatccaacagtgagattgcgtaaatcgatattgccaccataatctgcaggtggaatggaacttggacgctgaccactggcggtggtcacgcccatgattcccagaaatggacgcatcgggaaacgcaccgtcgacgccggctcgctgcttgtgtttgcgctatacggtgcttgaaccgggaaccatgccgtttcattttcaacatccactcggcagaactggccatagttgccgtcgaaatcctcggatcctgccagcactccacgcgcgtgacgggtggagatcacgccgtagggaacgcgcggcgccaccgtggtcggagtgattgccagcaaatcgcctgggtgggcttccggtacggcaatcggaccggtgaccacatgtgggccatctgtatcgggattgcggtggcattctcgtgctatggcgatgccgtcgttcaacacgtcgtttgcggcgacgccgtgcgtggtgaaatacgccatcggatcgctgccttggtcttccagtagcccttcgtggctgatggtgtcgatagtgatttcgtttccggaatgcacggtgccgatcatccggtcgttgcggcacggcaatcgaccccatagtacgttactggttgtggacgggatgtagttcgtttgtttcgatatgcaggtgccggtttgcaatatctggcttgtctgtttcataagattccttgcgacgtgttgttttcggagccgttgagtttgcggcgcgaccatccatgaacaatcatgggcgactgatcaaattctctggattgccgggtgtgtcgaaatctacggttctgccgccaatgatcgtgtgggaaatcacgccatccagtttggcaccatcgaatgcgctgatgggattgcggctcaacaacgcattcgcatcgacaacaaactgacggttgggatttaccactaccagatcggcccttttgccggggatgatagcgccacgatcgtggaagcctgcaaacgccgcagtgttcgtactcatccagcgtacggtgtcaacaaggcccagaccgcggcgttttgcttcggtcagcacggcgcggaatccgacctgcagactggagatgccaccccaggccgtagccaatgtgccggatttcatcttcgcatcggcaggggaatggtcggtggcaatgaaatccaatgttccatcgaccaggccctcccatagtcgatcctgctcctctagactgcgaatgggcggacaacatttgaacgccgtgttgctgtcgggaatgtggtcgcagtccagtgtcagataatgcgggcaggtttccgccgtgatcggaagaccctccgcctttgctcggcgtatgggatccaaagcttcgccgctggaaacatgcaggatgtgtgtgcggcagccggtgcgctccacaagattggcgaccatatcgacggcacgtcgaccaccttcggctggacgggattcctcgaaacttcggtagctgctgccgatatgtccgctatgtgccgacagctcatgagagtcttcggcatggatgatcaattgtccgccgaaaccggcgatttcgcgcatcgccagttccagcttgtcgtagctgagcgatccgtattcgctgacgccgcttggcgacaggaaacatttgaatccgaatactccggcatcccatagactgcgcaatgtgccgaggttcgattcgtccacgcctccccaaaatcccagttgcgtatgagctttgtgttcggcgcaggagcgtttgagctgcaatgcctccacggtgagtgttggcggattggaattcaacggcatgtccagcactgtggtcacgcctccggccgcagctgcgcgggtggcgcaatcaaagccttcccattccgtacgcccaggttcgttgatgtgcacatgcgtatcaacgatgccggggatcaacacttcatcaggttcaagatagatgcgttcctgggcgtcaggagaatcctgcggaccatgcaagaccgcgctgatacggccatgatccaccaacacgatggcctgcgttatgactccgtcggccagcgttgggccataaatggccaaatcatgcatgtttcgagttgcggaatcattggctgcggcggcgggggagggagaagagtatccctcttcttgacatggctgccggagttcgtcctgcggtttcgtggtgtatgagaattcgatgctcattttgtgctccctcttggctgtttgcgatcgttcggatgactatgcggtcgtgtgactttgcgcggttgaatgattgctgacgaagttttcaggcagcagtggtggtgacgggtgtcgcagtatcggcagcgttcatggtgttctgcttgtcgttactgcagttttttcgggcgatattcagtaccgcctgtgcgaatgcctgggtgccgcaggccacgtcgtcctcgcgcactgattccagcgggctgtggctgatgccgcccttgcatcgtacgtacagcatggcgattggcagcagttcggccaccgccatgccatcatgccccgggtagctgatcaggccgaacgcgtctttgtcctccgacgttttgattccatcttcaatgcaggagcgtaggaatgggtcgcactgggtgctgctggcagtatggatgcaggttttttccatggtgacgccgcgctgggtgcacacctggtcggccatggcccagatgcggccgaaggtttcgtcgcgtaactcatcggtgccggcgcgcacgtccaggctgaaggtggctttgccggcaatcacattcacaccacctggttcggcgctgatctcgcctacgttggctcgggttccggcttccaagctgattcggtcgataccggcgatgatgtctgcggctgcggtcagggcgtcatgtcgcaggttgtaaggtgtggcgatatggcagctcagtccgttgattgtaaccatgtaacggctggctgcggcaatggacgtgactgaggaaagcgcccggttgcgctgttccagaattggcccctgctcgatgtggaactccaaatatccgatggagtcttcgaggctgtgtgcggcttcggccacgtgctgggggtcgaggccgaattcggtgaatgcgtcgcgcatcgtcacgccgttcttgtcggcaagatcgagccattcgtctttccatctgccggcaagcgcataggagcccagaagcgttgcgccgaatctggcgccttcctcgtctccgaagcccaccacttcgatggcgaagggcagtgtggcagtaacgccgctgtcaatcagatgttcggccacggagatggcggtgaccacgcctagaataccgtcgtatttgccggcgtcgggcacggagtcaagatgcgaaccaagaatcagtgcgggcaaaccgggcttgatgccttctacgcgcccaaccaggttgccggctgggtcgatgtgtgtggccagtcccgcctgtcgcatccatgtgccggtgaggtcataggcctgtgccatctgcggtgaaagataggtgcgttcgatgccgttgttcagactggtcagttcggctaagcggtcgcaacgttcaagaatggttgaagctgcctgctcggcccatgctgctgtgctcatgatggtctcttttctgcattgtttcgaacggttgataatgatgatggtggttggcaatggcggtcggcgttagtcgccgtatacgtccagagccgccgcgatgccgtcgcttacgctgaccttgatgccattgcgttccagtacgttgcccagagccgccgcgcaggtgagtaccgcatccttacgggcattgcagcccattacgccgatgcgccagattctgcccttcagggggccgaatgaggatgcgatctcgacggagaagtcattgagcaactgcgcgcggattgctgcgtcctccgcgccatcgggaatcaccacgccgatcacgtcgttcatacgatgattctggtcgccatacagtttcagtcccatgccttcgatggctgcgctcatggccttgccgttgagcgtgtgacgcgctatggcctggtcgattccctcctcgcagatgatgcgggccgcctcgtgcacggcatataacgcgtgggtggcctcggtatggtggttaagatgacgcgggccccagtagtcgaagatttgcgtcatgtcgaagtagttgctgtggatgcggttgggagtgatctcgttggcggagtcggccacgcctgcctcgatgcttttacgctcgttcatcagggccacggcacgatcggatacggtgattggggccgatccggaagggccaccgaggcatttctgcatgccggtggtgacgatgtccagcccccactcgtcggttcgcatatcgttgccgaccaatgaggcggtggcgtcggtgtagagcaaagccccgttttggtggcagatatcacccaagccttccaatggttggcacatggtggtggaagtgtctccctgtacggtggccactagcttgggcttgaccgacttgatggcttcctcgatctcactcagtgtgaagacctcgccccatgggcgttgaatcacgtgtacatcggcgccgcagcgttccgcgatctccttgagcagcatgccgaaacgcccggcgcagcagaccaacaccggatcgccgggtgccagcacggagaccagcgccgcttcgatggctgagcgggaagtgccgtccaccaccatggtctgttggttgtcggtcttgaagatcgtgcggaacatcgtttgcacttcgtccattactttgaacatataagggtcgaattggccgacggttggtttgctcatcgcggtgagcacgcgcgagtccacgttcacgggtcctggggccatcaacagcctgtgcggagggttgattggcttgattgctgaggtatcgttcattgcggtcatctcctgaatctggaattgatgtcgtgcccgagatcgttgatttgcgaaatccgatcttcaacccgccatcgtgctgatgaaaaatatttcaccaccgaataaagtctgaaacttttcattcatgttaaggaaagttttcataacgcctccgaacgtcacctgctgaagtgcgacagcaatccgacgacctgcttagcgggcggcgcagcgaattcatttcgcttcgaggtgtgccagccgcagcgaaccatggcttccactaatgatgttgccgccgccacgccatctattaccggcagccccaactcctcgtaaagctgcgcgcacatacctgccatgcctgcgcagccaagcacgatggaatccggttgggtctgcgcgatcgtgcgctcgcattcggccttcagtgccgcatatgccgtatcgggatgctcgtccagcccaagcaccggaatctcgcatgcccggtacgccacgcatgcgcggtcgaatccgtattccgcggtcaggtctctggcgcgccccagcgtgcgttccaacgtggtgacgatggcaaatgaacggccaagaaaacttgccgcatggaatgccccctcggcgatgccgattacgggcccggccgccagctcccgggccgcgtgcaggcctggatccccgaagcaggccaaaacataaccatcgcagccggaggcctcgcctttacggatctcgtccatcacacccacggaggccagcacctcgtcaccgtgcgattcgatcgacaccggtcccatgcttgggctcaccgcttcgatttcggtgtcggtcgacacgctggctttcgcggctttttcgatggtgcgcgtcatagaccatgtggtattgggattgatgactttgattttcatgattgctcctgattgttggttgcgaaggctgtggcgtttgctttcgcaagaatgcgaaacagcgccgcagcgggaactgtcccgacatcggcgccgttttgctatgaatggtttttgtggattggcgagtcggctgcgccgctggcttatgcgacggtggcattgccgtcgttgactgtggggtcgtttgcgtcgagatgcagcatttgcgaatgcttggattccagcagtgtgaagatcgtcaggccgagccctgcgccgatgaaccagctgaagtttgaaagccaggtcacgtcgatcacacccatctgtgccagcggcgacggcagcatgactgtggcgatggagggaattcccgacagcgcgatcgcccatacggcattcgggttgaaaccgttgcggtaccagtagcggccggtgggcttcatggtgaacaggtcgtcaacggcgattttctgcctggcgacgatgaagtaccctgcgatcaggatgccgaacagtgggccgatgagagcgccgagcagatccagcgtataatgaatggcctgatcgttggaataccagttccagggggtgatgatcactgaaccgacggctgcgatcataccgccggtgcgccagctgatcttctgtggattcacatgggagaagtcgaatgccggcgagacgaagttggccacgatgttgatgcctacggtcgcgaccacaaaggtcatgccgcccagcagaatggccaccggagtgtcgatgtatttcacggtttcgatggggtcggtgatcagcttgccgaacaccggcacggtggcggacgcgcataccacggtaagcagggagaacactacgaagttcaccggtagaccccagaaattgcctcgcttgacgctcttataggttttgccgtagcgggagaagtcgccgaagttcagcatcgggccggagaagtacgacaccaccaatgcgatggcggtgatcatcaccggaatcgactgcgcgaagctcatcggttcgccggaagacagattcaggtcgatggcccagcccgcctgcttttcctacaaggtaaattgccagaatgaacatgacggcgtataccagcggtcccgcccagtcgatgaacttgcgaatggtgtccatgccggtccagaacacgcatgcctgggcggtccacaggattccgtacgagatccatcccagagccgacaggccaaggaatgagtagtcggtggccagcgtctcgctgctgggaatgaacttgaggaagatgatgttcagtgattcggacgccagataggtctgcacgccgtaccacgccacggcgataatgccgcgaatgatggcgggtatgttggctcccttgacgccgaagacgaatcgcatggtcaccgggaacggcacgccggcctcctggcttggcttggcgaccagattgaccagcgcctgtacgatgacgatgccgacgatcagtgagatgagcacttgccagctggcgatgcctagcgcaaacaggctgccggcggtcacgtagccgccgaccgaatgcacgtcggacatccagaaggcgaagatgttgtaccacgaccaggtttgttttttcagtggcgccagatcggcgttggcgagtcggggatcgtagctttccttgatgatagtggtgttatcgtgttcttccgtggggagtggcgtcgagggtgaggggcggaggcttgtctcgccgagggttatggctgtcatatcgtgatccttctgtgaatggttggcttgagtacgggtggatgctgttattcgtttggagtgccgtggcgtcttgcgggctatcgctctggcggggcgcttggcttgtggccaatgctgcgttgtggcctatgactattaatggaaattaatatttcattcagggcgatttgtaaatttctttttcattaccgaagtggcgaacgcgaaacatgatcgtcacattgccgtctgtttatggaataccggtcttttattagggtgagctcgtttacgattaagaaatacacgtcggaaaaggtgtcgatatgaacgatgaaaaaaaatattcagacggtgaatctgagactcaggcggcagtgcctaacgcagtagaacgtattcatggttcgtttgacacgttgaccgtcaccgagcaagaggcggctcgatttatcttgggacaccttactgatgttctggtatgcaattccgccgaactggcggaactcagcggagtctcgcagccgaccatgagtcgcctgtaccgcaagctgggctatgccaacgctggggaattccgccgtgatgtccggaagtttcatcaaccgggcgcccctgaactggccggggtgaactccgtggcaggatccgagagagacggattggtctcatcccatatggaacgtgaactggcagctattcgacgcaccttcgcacggctggatgaacgcgcagtatgcaaagccgcccgcatgcttgcctccgctcggaaggtgtgcgtgatcggcttccgcaatggttatccagtggccttgcacctgcgcgagcagctgatgcagctcagacctgacgttgcggcgctgccccaaccagggcagagtatcgcggaggaaatcgtggactatgattcctccgatgtggcgattcttgtcggagtgcgccgacgaccgtcactgttctctggcgtggcgcaagcattgcacgaagcgggtgtgccgacgattgtgatcggcgacgctactgtgcgcacggcgcttcccgaaggtgatgccatggtattggaagccgatctaagtgtgcatgtgctgtcaagctatacggcggtgtacgctgttgccgctttgctggttgatgcattgtccgatcagattgcttcatccagtcgcatctcgacggacgtgccgtctgctgcgttgtcgcatgattcgaagcactcagatgccaatacggtgcaacagagtgttgaccgcatcgaagagattaaccgtcaacttctccagcttggagaactggaatcctctcgacgcccgcacacatctcgcagctagcagatacggttcagcgaacagcgatgcaatccactgcggggtgatatgcgatgtcttacggatatgggcagatgagtaagaagaccgctcaagtgggggagttcatcaagcttgtttccgatgccggtgatagtcctcgttttgcggtggcggatgctaaacggctgctcaa

SEQ ID NO: 286 - DNA, 7190 bp, Unknown
  R101_18m  MAG No. k141_75164
ccgagcggccgaggaggccgcccagcaggcacgggccgagcaggcggctaaggaacgtaagcagcagaccatcatcggctgcattgtggtggccattattgtggtgctggtggccatcgctggattcgccgtatacaaggctatgcggccgtccaacaccagcagcagtagccagcaaagcaacatgaccgtggacgaggcctatagcaagctcaagaaagtcagtacccagccggccaacgccgatgacaaggccggcttcgtgatctcgagcaaggggtacggtcagaaggccgaaggggcgcccaccgtttccatctacatggagccgctgtgccccggctgcgcctcggtgaaccgccagcttgacccgacgctcgtcaagctgatgaacgccggccagctcaacatcgatttgcacttcctcaatttccaggacaacaagagctccgacaactactccaaccgcgcgttcaacggtgccatctacattgccgagcatgatgacaatcccgatcacctcatgagctacctctccaacatctacgctgaggatttccagccgggcgaattgtccaattacgagccggtaagcaacgccaagctggagaagcaggccgtcaatgccggcgtgagcgaggatgtggccaccgcggcattcagtggtaagaacgaatacgtcaagtggctcaccgcctccaacaactacacgatcctacgccccgaactgttcaacagctccggcgcgttctcctcccccacgctcaccatcaatggcgaatactgggatctgaagcagctcacgctggcggacaccagcatggtggacggattcctcaagtccatcggcttggactccgatcaggtgggcgtggaaggccagatgccatcgatcggcgccaacaagaagccgatttcgctggccgattaattaccggcgcggctcggcctgaattgaccactcgagaactaccggtatactagagatttgttcaaaacgatttacgcgttaagaacaatcgcctctttagctcagatggccagagcggccgccttgtaagcggcaggtcgtcggttcgatcccgacaagaggctcgacgcgtagaaaagtggcgtattatatgatacgtagacttttctacgcatataattcttaccttgggtaagtactccaggagccttcccccaactatgggcttcctggaatgagggcggagcgtcccccaaccagctccgcgccttcaggggggcgggaacatccccttctctcccgccccctttttcttttcttttttttgagctcagaacaatctgacgagcaggaatggtgacggtggccggtgaaaccgcagtatgggccggaacaaccgttacgatgggtggcgtaatcgttcatccagcaggaagagtatggcaatggcacggcgttggaccccgcagcggtttgttacactgcgtcgcatccgcgtaatcgcctgtatcgcggcgaccagtatcgcgctggctggatcattcgcgttcaccgcgcgtaaatccgtagccctgaacatcaacgggcaaaccacccaagtcaccacatatgcgatgacggccacccgtcttctggaggaacaaggggtggatatcaagacccacgatatcgtcactacctcgtccggcgaccaactcgccaatcatgccgtggtcaccgtacagtccgcctaccagaccactatcaacattgacggcacgtccgttcccttctggaccgtggccaccagtgccgaccagttgctgggatttttcgaggaaaaccagaacaacgccacaaaaatcaccgtcgacatcgacaatgtgtacaaccagctcaccggcggactggtcatcaatcaggatggcccggtcaccgtcattgcggacggcaagacttccgtggcccccaacggcaaactgcccgcggcctccattcttgactccaaaggcatcgtgctgaacaaagaggaccgtgtgagcgtcgaaaaggacggcgataccactatcctgcgcgtacggcgcgtgacgcatggcgaggaaacgcgcacagccgtagtgccatactccacacaaaccatcatcgactccaatctgcctgaaggccagtcggagatccgccagcaaggcgtcaatggcgagaaaacccaggtgtataacgtcacgtatgtcgatggcgtggccgaatcggagacgctgaaatccgaaaccgtcaccacgatggccatcgaccagatcatcgccgtaggcgccgccaagtctgataccgataaaggttccgacaaaaaatccgactccgccgataacggcaaggccgattccggttccaacaatcagcacgagtcgtccggtaacaatgccaacaacacaggcgacaagaacaacagcagctctggcaacaacacgaacaccgataccaacaacaatgccggcaacaccggcggcaacaactccggtaacaccggtaacaccggcaattccggtaacactggtaattccggtaacactggtaattccggtaacactggtaattccggtaacactggtaattccggtaacaccggcggcggtacgaacaacaattccggctcttccggctccgattcaggaacaaccaccacgccctccggccgactctggcacgccaccgtagcccaggctcaggcctatgccgccggtgccgccgcgcagcgcgggtggacaggcaacgactgggattgcctggtcaaactatggaaccgcgagtccagatggctgtggtatgccgaaaacgcgagctccggtgcctacggcattcctcagtcgcgaccagcagacaaaatggctgcgttcggcgccaattaccgtgacgatgccgccgtacagatcgattggggtctgtggtacatcgcacaaacctacggcagcccgtccaaggcatggcaacattccgaacaaatcggttggtactgatcggttacgaagcccacaaggaacacacgcttatgaacgacaccattcccgccaccggtcacctgttaggtgccgccgatatccgtcgtatcgcggccgatgccggcatcagccccaccaagaaattcgggcagaacttcgtcatcgaccccggcacggtccgtcgtatcgtacgagaggcgggagtgaccgctgccgatcatgtcatggaagtcggccccggcctgggatcgttgacattggcgattctggaaaccggcgccaccatgaccgcagtcgaaatcgatccgccgttggccgaacgactgccgggcacagtcgccgaattcatgcccgaagccacgtcacgactcaccgtcgtcaatcgggatgccttaaccgtcaccccggagaacgtgcctgatttcagcgatgacgcatcgtttacgctggtcgccaatctgccgtacaacgtggccacgccgattctgctcacgctgttggagcgtttcgacaacctcggctcgttcttggtgatggtgcaaaaagaggtggccgacagactcgccgccaagcccggttccaagatctacggcacgccgagcgtgaagctcgcctggtatggcaccgccgaacgggtgggcaccatcggccgcaatgtgttctggccggctcccaatgtggattccgcgctcgtcagattcacccggtatcaggccgatgacccggccgccccgggagcctcgaacagcacggccgacggcggcgcacaacgggaactcgtatttcgtctgatcgatgcggcgttcggtcagcgtcgcaagaccctgcacgcggcattgaagaccattgcgccctccgaggcattctccatcgccggcatcgatccgacccgtcgaggagagacgctcaccatcgccgaattcaccgctctggccaaggccatcgaatcgtgtggagatggagatgaggcacaatgagtccggtaatctcacatccacgcccagccgctgcccgacatcagttcgatgagctctcccccatcaccattacggtggattgcccggcgaaaaccaatctcaccttggaagtgggacctgctcacgacgaatggggcggacgccacgaactggacaccacctactgtgcaatcggcgtatacgacaccgtcaccgcaaccgccaagcaacccggagcgggattctctctggagctcgaaggcgcttatttgggcgacttggcctcctcacgcagcgacatgcgccgcaaccatgcggtactggccctcttcgccatggcccaggcggccgagcgcgagccggatgtggcgttgaccatcaccaagcacattcccgtgggtgccggactaggcggcggttcagccgacgccgcggcgaccatgctggcggtcaatcgtctctgggagctgaactggcctatagagcgtctgcgcaccattgccgccacgttgggcgcggatatgccgttctgcctgaccggtggccttgcatacggcaccggtttcggcgaacgcatcacggatatcgcccccggcagccgcgatgagctggcgctgatagaacagggattcagcggcgaagtattggtcggcgcgtaccagtcgcaactcagcactcctgaggtctaccacacctttgacctcgtgggagccgcagaaggcgaccgcaatcatctgcaggctgcggcaatcagcctgcatccccgcagcgggcaggccatcgacgccgccacgcaggcgggtgccagccatgcattcgtctccggatccggcccctcagtggtcgctttcgccgccgacgaggcaacggcacaacgcattatcgatgtgtggcgcgatacggctgtggtcgatcgcattattcgagccaaatctcccgcacaccccaatatcggcgtcagacagtgacgctaaggtagcaaccagccacccgacccatgaaagaagtccaccgatgacgtatcaggttgatgaacgtgaagcccgcaaggcgtacgtgcgccaccgccagaccatcgtcttttccatcagcggcgcggtattggcagtagtgctggtcatagccctactgttcaatttccacgttttcggcctcggcgaagtggagactccggcccgccagccgaattacggcaacgcggcaccgtgcgcggtcaaggacagcagcggcaaagcgcaatacgtgtccaacgcttcggtcggcatccgcgtgatgaacggcacctctcacggccaattcgccaaggccgtgggtgaggctttggccaatcgtggattcagcgtgcagaaaatcgataactattccagcaccggcgttgaacgcaccaccatctacttcggcaagaacgccattaatcaggcgtatacgctgatcggcaatttcaccgacgccaccatgatcatgacggctcgcgaggatcaactcatcgatgtggtcatcggcgccacgttcaacgatctgcaggacaccaaatcctccccacaatccggtaagaccatcaccaatatcgagggttgcaaggccgccgatagcatgaccaagctgcccgccgacaccaaacacgacgcatacacggcggagtaaggcgcatacagcttcatcttcgcgaaaaaccgtacgctgacacgtattcagcgtacggttttttggtatcggactagtatcggactactgaatctcggcgtaccagcgcttgagttcttcgacggccacatcgtggtccaccggaccgttatccaagcggtattccagcatgtgcttgtaggcgcggccgatcatcgggccgggctccaggcccagcaactccataatttcgttgccgtccagatccgggcggatcgcgtcgaagtcctctttcttcttgagttcgcggacgcgctcctccatctcatccatggcctgggagaagatcatcgccttgcgcttgttttgtgtggtggcgtccgcgcgcgtgagcctgttcagccgctcgtacaggtgcccggcatccttgacataccggcgtacggccgagtcggtccacggctcgtccacatagccgtggaagcgcaggtgcatattcaccagttccgagacgtcctcgaccagatggtggtcaaaacgcagcgccttcaaacgcttgcgggtcattttggcacccaccgcgtcatggtggtggaagctcactttgccgcccggctcgaaccggcgggtcttcggcttgccgatatcgtgcatcacggcggccaagcgcagcgtcaggtcgggggcgggcaccgggccgtccgggccggtttccagggcgatcgcgcgttcgagcacaatcatcgtgtgctcgaagacgtccttgtggcggtggtgttcgtcgatctgcaattgcagggccggaatctccgggaagacgatgtccgcaagaccggattcgaccaacgcctcaaggccggcgcgcggacggtcggagagcagcagcttggtcagttcgtcgcgcacgcgctcggcggatacgatgtcgatgcggtcgcgcatcgaggtaatcgcctcggccgcgtccggcgcgatacggaagcccagctgggccacgaatcgcacggcgcgcatcatacgcaacggatcgtcgtcaaaggactgtcgcgggtccaccggcgtgcgcaacacgcccttggacagatcactggcaccaccgaacgggtccacgaattgcaggtcgggcacgcgcagggccatcgcgttgacggtgaagtcgcggcgggacaggtcgccctcaagcgtgtcgccataattgacctcgggcttacgcgagtccgtgtcgtacgtgtcggagcgataggtggtgacctccaccttgacctcggtgccgtccgggcggcggcgcatggcacccagcgtgccgaacttgcgccccatgtcccagaagccgtcatgcccccaccggcgcagtatcggctcgaactgctcaggccgtgcggatgagcagaagtccaaatcgtggctctttctatggagcagcaaatccctgaccgggccgccgaccaatgccagctcgtaaccctgttcggcgaacagtcgaccaagttcgatggcttcgggccatacttcgaaattcaatgggcaccttcccgcgtgcgacgtttttctgccctaccagcataccgttaccccacctgcacacggggttgagtaaggtggagaatatgattacgcccgccgaccttgcccgcatactggggcaaacaccagattcggcggatagcc

SEQ ID NO: 287 - DNA, 3952 bp, Unknown
  R101_18m  MAG No. k141_75304
gcagatggcagcctatggggcttctggagccttatttggcctgtttgcatcattgctggtggtatatcgccgtatcggcgccgatatccgctccatgttgatctggatggcggtgaacttcgccttgccgttcgtggtcgggggcgtggcgtggcaggcgcatgtcggcggctttgtagtgggtggaatactcacatggctgctggtgggtggtgtgccggcgtggcgaggtaaaagcctgaaatggcgtatgcaggtttacggctgggccatggtggtgctggtcgttgtgttgattctgttgtgcaatatggccaatccttacgggtggatgagtttcggctccctgcactgatatggcttgatatggctgtaaaaaacgattgatgccgagtattgcggaacatgcagtgcccggcatcagtgtatgtacggaaagcggcgatgtggatattagcgatgtggatatcgtcattcggtgagtgggcatgcgctgtatgaaggtatccacagtaatgaagatatccacagtaatgagatgcgcgcaatgacgagttatccacgataacgagttatccacaatggtgacttgtgcacaagtgtgtagaaaagtgcataagactgtggataacttatgtggataagttaggaatgccgcggtattactgggtttgttgcagtggataactcgggtgtataactgttccctcgctgtggcgatgtatgccaagccaaagttatgcacgagatatacaccgagaaacgccgcttatccaccacttatccacatggttttccacattcggtggaaaactacatgggtgtgattcatccacaggctgtggataacgtagtggataagtcgtggataagtcgtggataagtggtggatagctgtggatgaacaggtgaaggcacgaaaaaggccggcctccgcatacgggaggtcggcctttcgcataagaactaagaacaacctaacgatagaaaaaacgatctaccgatagataagcgcaacgagtcggaactcagcgccatcccatcgtcatcaggaatccgatcatgatcagggcgaagccgatgcccaggttccacgcgccgatgttcggaatcggccaggagccggacggggagaggtagtacaccacacaccaaatcaggccgatgatcataaacgcgcagaacagcggcacgaaccaacgcgggttcgacttggtgcccttaatggtttcttcaacacgcttggtgttctccgcctgacggttcatcatgcgctgcatctgcggggtcagcgtggccttatcggcagtggcgttgagcacggcctgcacctgctccatattcacgccgtaagccgcgtcttcctcggcagaagtgttctctgcgttctgctcggtgtctttgttggcggtctcgtcagcagcggtgctggatgaggtctcgctctgccagtccttctggttgttcgagtcggtctcgtgcagctcttcgtcagccatcagcatagtctccattcaataggctaaaagtcataatagtggctacactcgaaagcggcgaccagagtcggcaagaagacaggaaattcatggccagacatgtaggtaagcacggcgcacggcactccctatggggtggtgtcgcggtattcgtcgtcattgccttgaccggttttctgctgagcaccaacgtgagggtcaatcgtacggttgccgccaccaacgatacggccgatctggtggagcaaggcgtggacgaggccaaccagctgcagcaggacgtcagcgatctgaccaaacaggtcgccaatcttacggacgcgctcaaggccgatggcaccgacggtactgacagcacgcagaaccaaggcaaggactccagcaatgtggattccagcctgatgctgcccgcgctcagcggcagcggcgtaacggtaacgctggatgattctccgttatgggagaacgccgtcaacaacaatggcacgaccgccaatatcaacgattacgtgattcatcagcaggacgtcgaatcggtggtgaatgccttgtgggccggcggtgccgatgcgctgatgattatggatcagcgggtgctgttcaattcggcggtcatctgttccggcaacgtgctgtcgttgcacggtaagaaatactcgccgccattcaccatttccgcgattggtgacccgcaaagacttcgcgcagcgttgaacgactccgaagccattaccattcttaagcaatatgtgaccgcgtttggcattggctacaaggtggagaatgccgagggccttcagttccccgctaccgccgccttgctgcagcagttgaaatatgccacggtcgatacgtcaaagaccacagatgaggagcagactcagcaatgagacacggcaggcacaacagcggcgcaccggcgcccattgatctcgcgtccgtgtcggacgtacagcccttccccgaggacgacgccgcacgaatggcggcagacccggccaatgccagcagggcaaggtcccgtcgtgccgcagtacgcggcgcgtcttcgccccagcggagcctgatctggcaggcactcggcatctgcgccgaactgctgattaccgctgccgtgatttgcgccctgtacatcgtctggcagatgtggtggaccggtgtcgaggcggagcgagcccagaacgaaaccacccagtccgtcgactggagcgaccccagcaacaacgggggaacggtcaccatcgccaaagcccaggagggcgatgctccagtacagccgaaagacgcgaaatatggcgacttgattgcgcagatctacattccgcgcttcggctcccaatggcatcgcaacatcgtggaaggcaccacgctcgagcagctcaatcgccacggtctgggccattacgacaccacccagatgccggggcaggtcggcaacttcgccgtcgccggccaccgcaacggctacgggcagccgttgggcgatgtggacaagttgcaggaaggcgatcccatcatcgttcgtaccaaggattactggtacgtctaccactacacccggtacgagattgtgctgcccacggacgtgtatgtgatcgcgcccaatccggaagactccactgccaatcccaccaaacgcatgatcacactgaccacctgtgagccgaaatactccacccccacccatcgatggatcagctatggtgagttggcgtactgggccaaagtgtctgatggcgtgcccaaagagctggctactactgattcgtccggtgcagtgaagttctccaccaccgaaaccccctcgatcgcttcccgcattggctcgctggacaaggtggtattcggcgcgctggtagtgtggctggttctgttcatcgccgctgcggtggcatggcgctggccggtgctgcgcgagattcgcgcgggtgagcgtcgccgcccggatgccagcatctatggcggactgttgcgtctgcagcccggcgtggcaccgattcgatggctgctgctggctctgctgctgttcgcagccgccgcggcgctgttccagtggggattcccttgggccgccgccaatattccattcctacagcagatgtcgaacttcgtggcagtgagctgacggcagcctagtactatggcttgcagtacacgtccctcaaggagagccctatgaccgattccgcgcatattttggtggtggataactacgattccttcgtctacacgatcgtaggctatctgcaaacccttggcgccactgttgatgtggtgcgtaacgacgctatcgacccagccgcgccgggtgtactggacggttacgatggcgtgctgatttctcccggccctggcgctccggccgaatccggtgccagtgaggatatgattcgcctgtgcgcggccagcggcgtgccgatgtttggtgtgtgcctgggcttgcaggcgctcgc

SEQ ID NO: 288 - DNA, 24436 bp, Unknown
  R101_18m  MAG No. k141_75388
cagctggggagctcacggtcacactcatgcgtcgcagaccacgagcctcacgcgcctcctcattccacatctgtgttaacaacatgtgttaatcgcatgcatcgccaccatgattccccaatgatttcaagggttccccggcctcactattgtttcttccctaaaacggcctcaatcatcggcaccttcccggtagccaccaccacgtccctgaccggcaacgcctcgttcggcgtgctctccatcgccgtcctgctcgttgtggcgctcgttttcctgctgctccagaaggatccgacgcgcgcaaacgtgctgagacatcgccggtgaaccaagttctgcctttttaccgacgccagctcgcataagcaggaatcaaacgtcggcgctgggacacagaacgggaatccgccgatgttcagagtatctgatgtcggtgccgagccatgtcttggacgccaccgacacaagtaccactcttggcgacggtggtggggcatccgctgtcccaccaccgtcgccaatcgttctcagcggcgttgacaatccattatctgtcctttcaacgccgccaaacgtccacagcgtcggcgacggtccggattttgacgcaccaccgatgcaaaaccattgcaggctccgtacggaacatcagccgcgaccaccgaacgagcaccagatgcggcatcagccgcgacaccagccgcacttatcgacgcgcccttaccgcgtcatcacgtccatcaatacaatgactcatcggcatatccggctgcagcccaataatcgtcggccgatagcgagcgattgaaaccggtggcatgatcgcttccgaggtcgccctcgccaccgaaatcgacatcgaaatcagtaccagcatcggaagtaccgccggacataccggcaacgaacctgacttcggttttcagcaggtatttctccgcgaaattcagcgtggtgcacaccatcgcaaacccctttccatgcgcgttgccctggcggaccaagacgtccttgtgtaagtaagtaagtatggcggctccccttccgcaccgccatatccactatggaagcgcgccgcggcacacgacacaagccccgggacatatgaagaagttatggccggttcaaagcacccgtattacagcccaaacggcaccgcgcgcagcgggattgcacgacggccggacgccactcatgatcggaaaccgctcacagccaaatgccacccgaggccggacgccatataaggaaccgtggcacggcagatatagaaaatgcccgccatcatagactgacgagcgtgatatcgggtgggcgatgtaggaatcgaacctacgaccccttcggtgtgaacgaagtgcgctagccgctgcgccaatcgcccgagcttgtgatgaaaaaaccggcaacattctgccggcgattcatcgagtgggcgatacaagattcgaacttgtgaccccttccgtgtcagggaagtgcgctaccactgcgccaaccgcccgggtcatcctcaggctgaatcaatcatcctgaaccagccatccgagagcggacaacgggactcgaacccgcggtctcaaccttggcaaggttgcgctttaccaactaagctatgtccgcatgtgttaccttcacgggcaacaggtgacaaagatacgccaatctcaggaaaaagccaagcccccgcgtgtcccaccggttttccaacgattatcgggtgccgccgtgcacataactcgcggtggccgtatacagcagccaggcgatgggcatggccagcataaacagcgggtagaaccaagcgatgggcacattgcacggccatggccgtggaaatcaggaacgcatgacgataaccgatcagctggccgaagaggccaaggccttgatcggcgaccgtgccgaagtgaagttcctgaactacgccgacgtgccgttcttcaaccaggacgaggaattcccgaacccgacagccgccgtggccgccgccttcctggcgctcgttgcggagtaatcccgcctgaatcttggttacgttccgcctcaaggcggacggcggaccagctgcatcagcaatgtgccgaacccctctgattgactccaatcagaggggtcgctgcgtttcaaggggctgatttggccttctccggaggtctactcccgtttcaaggggctggtggctgagtagacacgggccaaaaacggcgtaatgacgttagcccggagccgtttatacttgtggtttcccggatgaggagcccctcgaaacggagatagacctccggaacagcccaaatcagcccctcgaaacggagttagacggttgggatgtcggaaagaacactcatgccggcccaagaacccccactatgtcagatatcgctgcccagcacgcaatactgaccgtacagcacgacccgtccttcatgaaatcaggcacggtatgggcttcatccctcaacgcgcgataatggcggtatgacgcaacgacaactgatgcgggccacagtcgaaacgcccatcggccggatgatgatggcctcggacggcgagggcctgaccgagctctgtcttgaagactggtggtgggccaccgatcaccaagccgttctcgattcgaatcgcgaatccgatcgtgaacccgatgtgttccgtatgacccgcgtatggctgaccgcctatttcgccggcgagcgccccggcctagatcagacgccgccgttgcatcccgccggcacgccattccaacatgaagtgtggaatctggtggccgaaattccctatggcatgacggtaagttacggcgaactcgccgccgaattggccgaacgacgcggtggcggccacatggccgcgcaggcggtcggaggcgcagtgaagcgcaatccggttaccatcatcgtgccctgtcaccgcgtagtcggctcgggccgcgcgtttggcggctacggcggccgactcgacatcaaggccgagttgcttgaactcgagggcgtggatctggcgcgcttcgatctgccgaacctttgacggccccagcggtccgcctcgtcaaaaggattgagtggttacccctcccgccggcgggaagtggcacgtaacgccggagggtggtcggctggctggcatcgcaacccccgctacccgacaattttcgacaagctgacgggaatcctcccacgaattgttcgccgtcggtgcagtcttgctcgatcgcgccggccaaaaccgtacaatccctacaatggaatgtatatggttaattgctgcgcgcagccgcacggccgcacgcgatcgcaagaccacatggcccaaggggatatgcaatatcaacggaagcaggaggtgcgtatgaccggcattatcgattacgcgcacaccgaaacgcgctccttcgccgacttgccgttcaatgaaatcgacgccttgatcatctccacgctcatctatgaggatgtggccagtatctgtccgacgttgatgctggatgagacgcagtcaggctcgttcgccgcacgcattcgcgctttcgagcccaagcatccactgatctggctgaagggtatctggcatcccgagcttgaatcggtgagccttgacgaggccaaccgcgagctgcatcgttcgccggaaacgcatgccgacgacaagacgcacgaagcccaaatggtttcagtggtcaatccggacctgacccacgacctgttccaggccgcgggcgagaacccccgctacgccaacgttcgtctgggcgcggtggtcgagcacatcaatcagggtgagcaaacccaattcgccgccgccaccttccaactgcccgacggccacaagcgccgaaagccgacctacaaaggcacgttggttatttccttccgcggcaccgatgattcgctcatcggatggaaggaagatttcaatatggctttccagtatccggtgccggcgcaacgttcagccagcgcctatctggatacggtggcgcgactgtgggagggtccgattattctggtcggccattccaagggaggcaatctggcgatttacgcggccatgaacgccgaccccaaggtgcgcaagcgcattcagcatgtctattcactggacggccccggtttcccgccggagattgtgaccagccccgcctaccgcaccatccagccgaaggtgacgaaaatcgtgccaagttcgtcgattgtgggcatgattttcgagaccccggagccttgccgcgtggtctcttccgattcggatggcattatgcagcattccgccttcacctggctattggatggcgaccagttcatcaccgagccggatttgagttccagctcgcagttgtttaacgaggagctgaaccattggatcgccacgcttacgcccgaacagcgcgagcgtgcggtggacgcgctgttcaccgtgctgcacgccaacggcgccaccagcttcagcgaggtgatgagcaacttccccgcttcgattccggcgatgcttggcgcgtatgtagggctgacccccgcagaccggcgtcatttggttgaggccctggcgatactgttcaaggcgtccacggccaaacgcaggccgacgcccgccccggcttccgcgccgagttctgcgaccgccaaaggaacagccgaaaccccagcaggaactgcgacaggaacagatagcgcggccccggccagcgccgataccgacaccgacactgacaccgcagcttcgccctcagcggaggacgcaactgaaatcgccgattagctcatagacatgtccacaaataatagttatactgcccgataagttattagacagcgtgaccatatcacgctggtgcatcaggaggaagagatgccacgtccacgccatgattccgaggtgctgcccgccaaagaacgcctagagaacgctttctgggaattgctcgccgaccgcgactaccgcaagatcaccgtcaccgatgtggtgcgtgaggctggcgtgaaccgtaattcgttctattatcacttctccagcctgcccgaattggccgattcagccatcctgcatcaggtcgaatcgattccgatcaaccgcacccccgatccgaacggcaatcccgaggaacaatggcgagaccgcgtcaccgccacgctctccgatccagagcagcgtcagcgcctcgaccacctggccctgttggcaggcccgcacagcacgcttgaactgaccgaatcgctgcgcgacttctgccgtctgcaaatgctcagcacattgcaacgcgaccccaagaaccttgacctgaaaaccgatctcatggtcgagttcaccgtgggcggcatgctcgccgtgctgcaacgttggcccgaattgagcgacgccatcgaaatcaaagacctgcttaaagaagatgtggccgtgctggccatgggcatatacctggccatgagccaaaaggacatgcttaattactggaatcgcatcttcgtgcacaatgcgcaggattcggccgcccccggcatgccggccgccgccacgcatgccgcgccatcccccatctcaccgtcgaacggccccgcaggattccccgggtacaccgcttgaccgaaaaccagtgagtctggattgtttccgtcgaatgaaccctgcgtgaggtttctcacaaggcgcaatcagcctctcatgctggcgtttccagccctcacacaggaagatggaagcatgagcgaaacatcgaacaaaacccgtctggaacatgactgcatcggccagatggaggtgccggcgaacgtctactggggcattcacacccaacgcgctatcggcaacttcccggtctccggcatcaccgatagccaacatcccgagctgattcgcgcctatgccacggtcaagcgcgcctgcgccatcgccaatgaggaattaggcctgatcgacccggccaaggccgaggccattcgcgccgcctgcctggaaatcgaggccggcaaactggccgatcagttcccggtcgatgtgatgcagggcggtgccggcacctcgtcgaacatgaacatgaacgaggtgatcgccaaccgtgcgctggaaatcgccggccaccagcgtggcaattacacatacatccatccgaacgacgacgtcaacgagtcgcagtccacgaacgacacctaccctgccgcctgcaaactcgcgcttatcgacgcgatcgggccgctcgccgagtccaccaagaaactcgccaaggccttccacgatctggccgacaaacatatcaatgacgtgacgattggccgcacgcagctgcaggacgccgtaccaatgacctatggtcaggaattccatgcgtttgccacgctgttgaagtctgatttggctgcattcgatcgcgtggtgccgctgctggcccagctcaacctcggtgccaccgccatcggcaccggcatttgcgcggatctgcgattccgcaagtccgccatcaagcatctggcgcagatcaccggcttgccggtcaccgccgcgcccgatccggtggccgccatgacggatatgggcgcgtacgtggccacgtcggctgccatcaagagcctcgccgtgcacctgaagaaggccgccgacgatttgcgactgctcaattccgggccgcgctgcggtttcaacgatctcaacgtgccggctcgccaggccggatcatcgatcatgccggccaaagtgaacccggtgatccccgaatgcgtcaaccagtgctgcttcacgatcttcggcatggacgtgactgtgaactgggctgtggccgagggccagttgcagctgaacgccttcgacccggtgatggtgcatgagctgctgaccggcatggcgttgctgacgcgcgccatggagacattccgcgtcaactgcgtggaaggcatcgaaatcaatgctgacctggggcgttcatatgcccagtcctcaccgtcgatttccgccgcgctcaaccattacatcggctacgagcacgcggccgacatcgccgccgaagccgtgcacaccggccgtaccgtgcgcgaggtggccggcgaacgcaccgacctgcccgccgagcagctggacgagattctcgatccgattcgtctggcccgtggcctcggccagacctgccgcgagcatcgggactaggcaccaccgcaacggccaaaacccgacgtgggcccgcatgtttacgacttcaccagaaatggtcgatacagtagggcatatgaccgaatatgcacaagacatcgcacactggttccaggtcaatgcgggcaagctcatctggctggccattgtattggccatcgtatttgtggccgaccgcgtcatcagccgcgtgctgcgcagggttctggatagttcgcagattcccagcgcctcgattttcgtgaatctcacgcgcgtgaccatctgggtcaccggtacggcgatggtgctgcaaccggtgttcggcatcaatccgaccaccctggtcaccgccctcggtgtcggaggcgtggcgatttcactgggtttgaaggatacgatcgccaacgtcatcggcggcttcggcctgatgctgggccgcgtaatccaacccggcgatctggtgaccattcaaggcgtcacaggtaccgtgcacgacatcacctggcgtcagaccgtggtgcgcacccgttccggggacatgatggtcattcccaattcggtgctcaacacggccgccttgaccaagctcacgccggccagcgaaggcatggccacgctcgagttcacggccaaggcctctggcgacccgtccgctatcagtcaggatattctcgaccgcgtaaccaaagccaccgccgacgtggcactggagggccagccaccgctggtcaagttcaccggcttctccccttacggcatgaccggccaagtgcttgtgttcgcgcgcgagggtgtgctaccttccaccatcaaagatatggcggcgcgagccatcgccggttcgggcaccaaataccttgttgaagatagcggctcgtcagacaatctgtgatatctcccggctcacctctctgggtccggctatgacagtcatgcgaacagcatccaaccggtaagaatcacagtcaacagtaggtacgagataacgccgggattggcataggcggtgcgtattttaagccccgcaggcaactcctctggcgcaagatagaactcccagctcttgcgcttggtgataagcagcacgataccggcaatgcagaggcccaacatcactgtgccgtacaacatcatgatgcccatgccgcccatgttgccggtttcaaccatacgcatgatttcggcctcgctgattgtgccgtcgaggatgcggggatcgatctgttgtatcaccaatggggcgagcactgccccgttcaggttgatcagcatgtgcatagccactgaataccgcaggcgggaggtgcgtgtgtatacatatccgaacatcagtcctaggccaaaggcgtagaagaactggaacacgttcatatggaatagcgcgaatgccaatgcggagaacatgattgcggtcttttctccgtaccggcgcaggcgggagataatctccttgcgaaaaatccattcttcgcaaaccggtgccaacaggcctatgaacaatgcgttcacccgccagtcgctgccaagaatcacgtcgttgatgcgattggtggcctgaccatcagtggctccggcagacaatatattgccaatcatattgcccaagagcattaccggaatgcacatgacgaaaatccgaatgaactcccccgccttcatggggtactgccgggtgcgaataaccggtacgcgagtgaaggccaacatactcagcggcatggccaccacatacagcggcccggaggaggcgagcagcacagcccaagcgggcacatcggcgccaagcagcgttcgtagtgcttcagtggccagaatattcagcccgatccagaacaccatcataatggcgagcgccgagccgattgtcgaaaaccggcgatgggccgtgaaccaccaatcgcgtggggtttgttgcggctgctgcgccgacggcattggttcgctcatacttatcccccatagtcactggccgcaaacggaccgatcacacgtgcaatactcttcaagaatacggcacggcgtttcgattgcattgggaatggggaaaatcatcaatgggcaaggaatgatctacgtcaatcaatccccatgccgagagagtcctctactctgcgggattgttgtgggacggcacgcgattttacccgattttttcgcggcggcccacaccactccacatatgactgatgacgccgcacgaagaaatggcgtcattgcaacgattcctcaatacaatctgtgggacggcacgaatgtacatcgtttgacgttcatgccatcccacaccggcgtgggacggcacgcgataatcgcccaaaaatcgccgccgtcccacacacatcattgccgataagccattcgacgatcgtacagtcacaaaaaacagaacagaaccgcacgatcatcgcaacgccattcagcaggcgagcgcggcgaccggacgcggggcgacaatcacgtcatcgcccaccgccagaccggccggcagctcgctggcgggcagctgcacggtggccttgagctgttcacctttgttccagcgctggtattcgccggaggtgatgaccgtgtccacacgaaccaaagagccaaggaagtgaatgacctccacgcgggcgcgttcgccgacgtgcgaatcgctgctgccagccaaggccagcatcaggttctccgggcgcacgagcacggccacggaatcgcccttggcggagccggcgagcagcggcacgcgctggccgaagaccacggcctcgtcgccattggatgcgccgagcaggcggttggtgagtccaatgaacgtggccacgtactcggcggcagggcgctggtacaggtcctgcggggcggcgatctgctcgatcttgcccttgttcatcacgccgatgcggtcggccacggccagcgcctcttcctgatcgtgggtcacgaagacggttgtggtgccggtggtgagttggatgcggcgaatctggtcacgcagctggacgcgcactttggcgtcgagcgcggacaacggctcgtcgagcagcagcacgcgcggcttgatggccagcgcccgggccaaggccacgcgccgctgctggccgccggacatctgctgcgtgtacttcttggcctgatcggcaagccccacgagctccagctgttccatggcgatcttgcggcgttcggccttgcccatgccgcgcacttcgaggccgaattccacgttctccagggcggtcatgtgcgggaacagcgagtacgcctggaacaccatggccatctcgcgcttgttcaccggcacaccggtgacgtcctgtccgccgaccatgatgcgtccgccttggatgtcttcgagaccggcaagcgatcgcagcgcggtggacttgccgcaaccggacccaccgagcagcacgaccatttcgccgggcttgatgtccaggttgaagtcgtcgagcgcgtgaacggtggagccgggatagatcttgacgacgttctgcatctgaatggaaccaccgccgcgcttggcggtgtctttgagcagggccttggcggccttggtcacgtccttgccgcgcacgccctcgagggtagcggtgggatcgttcttgaaggcgtcctcggcagtggaggacacggctgccgggatggccggggacgccggggcggcgtccactgcggtaccggtttcctgacgggtgggagttgaatcgttgttcatcgggtcacttaccttcccttgacttacgcattgcgtcggagatcaggtcgagcgcaacgaggagcaccacgccgaagagcagagccagcagcgacatggcagtggaaatttgggcattggattggccgagctggtagagcgcgacctgcaggttcatacggccgagcagcgaggcgacggtgtattcaccgagtaccacggcgatggagatgaaggatgccgagaggatcgactgccacaggttcgggatgatcaccttgaagaacactttgggccaggaggcgccgagcgatcgggaggcttcgaccaacgtcttgacgtcgatggagttgaggcccacggcgatcgcgcggaaggcgaacggcatcacgagaatcacataggcgaagcacagccagatcgggttggtgctcaacacgtcggcggaaagccaacggtagatcggcccaagacccaccaccagcacgatggccggaatggtcagcggcagcgtggccacccattcgattgcacgctccaaggctttggagcgaatatgcacgatgaccatggtgggcaccagcaggatgagcatgatcacgacggtgacggcgctcaacgacagcgagatgccgacgccctgccatagcacgctcagatcggcgcccaacgattcgccgttgccggtgaaaatcgccgtccacggcgcggccgaccagcgaccggacaacgggtgacgcagggtgaagatgaacatggccagcagcggcacgaacaggaacgccagggtgacgaacaggatcacgaatttgatgatgctctgtttgcgcacgcgggcggcacgcagctgcggcggcttggttgtggaagtttcggtcattgccaacgtccggccctcttttccacggcgtggctcagcagcatgacgatggccacgacgatgatcattgcgaatgccagcacctgcgcgaagccctgctggttggggtccatctcattgcgcatggcaccttggatcatcaacggcaccagaatcgagcgctgcgagaacagggctgcggcggtcgcataggcggagaacgcggaggcgaacaacagcaggaacgccgagatgaagcggggtgcgaggatcgggcaggccacgcgcgtccagtattggacggtgttgccgccgagcgactcgcaggcttcgcgccactgtggacgaatggaatcgaccgcaggcaggaagatgatgatcatcagcggaatctggaagtagcagtagacggtcaccagccccggcagggagctgagccaattcgggttcacggtatagccagtcagggttttgatgagcatggtgccgatgccgttgatgccaagagtggcgatgaacgcgaacgcgagcatcacgccgccgaactgggcgagcaccgatgagatggcggcgaccatacggcgcagcggtccgttcggcttggcgccgatcaccagcgcgtaggaggcgagcgcgcccaccacggcaccgatcagggatgaggccacggacaccaggattgacgtgccgaacgcggcgatggtgttggcttcgaacatcttgtggaagttcgcaagcgtgaaaccgccgctgcgatcctggaacgcgccgatgatcacgatcacggtgggtgcgagcaggaagcaggcggtgtaggcgaagaacgggagcgtggtggtgagcgtgccaagctcctgacggtgcttcgccagtgcggacgaagcgggggtcgatgcggcggacggacccgcggccttggaggcggcgggtccgttcggtgcgatgggtgcgattgcggcggtcatcgtggactctcagttgccgatcgtcttgtcccagttgttttgaagccactcggtgatgcgggtggagtcatcgttgctgtaggtgaccggctggccttcgatggtgatggcgtccttcagggtggcctagtcgacggtgccgtcggccttcatggagtcgagcagcaccgggttggcgccgcccttgaaccacaggttctgggtttcggcggtgtacaggtattcctcccacaggcgtgcggcggcggggtgcggcgcgtccttgttgatggcctggttgtagtagctgacgacctgggctttggggaaggtcttgtacttccagttcacgcccttggacttgagttccttcttgtaggaggcctggttgtaggtccagtcgaagaccacgccggtctggccggagtcgatggtgccgttggtcacatcgatggtgttcaggttgccggcttccttgagcttcttgaagaagtcgagaccgggctgcaggttgttgatgtcgccgccggcgagctggttgaccatcagatagccgttgaaggccgcgccggcctcggtaggcttgccgttcagggacacggtgccggcgaacttcggatcgagcaggtcgttcagggaggcgacatcgccgtacttgtcggcgttccagcccacggacatgatgccggtgtagtcggcgtagtaggcgccgtcgacgttcttggcagcatccgggatcttgttccaggcctgcaccttgtacggggcgaaatagtcggtggaggtggcggcgatggcctggccgacgtcgaagacatcgggggcggcgtcggtacccttgttggtcttggcggcgtcgatctcctccttggaggaggcgttcgggttcagctcggtgatcttgatctccgggtacttcttcttgaagccctcgatgacctcgccgtagttggaccaatcatgcggcaaggcgatgacgttcagcgcgccttcttccttggcagccgattccgcaccacacttacctcagcacgccctcaatcaatcgcgtgatgagttcggtgtagctcactccggtggcatcccaagccttgggatacatagaaatcggcgtgaagccgggcatggtgttgatttcgttgaccatcaccgtgccatcaggcgtcacgaaggtgtccacacggctcaagccggcaccatccacggccttgaacgcacgccgggccacgtcacgcacgtcctcaagcacgctgaccggcagattggccggcacttccacgtggctggcggaggcatccatgtacttggagtcgaaatcgtagaactggtcgtcgttctgatgatcgagcacgatttcgccgggccagctggcctcgggctcgtcaccggccttcgggcacagcacggcacattcgatttcgcgaccatcaatcccctgttcgacgagcaccttccaatcgtgctcgccggcggtggcaatggcggcggccagacgatcctgctgggtctcgcggtcatcggctttctcgaccttggtcacaccgaagctggagcctgcgcgcgaaggcttgatgaacagcggataggtaagaccggcgtcctcgatcttggcaagcacatcggcggcggtgaagttgcgcgcatcgaccgtcacacccggcgcggtgggaatgccggcggcacccagcaccaccttggtgtaatgcttatccatgcaggcggcggaagcaaacactccgcaccccacgtacggcacacccatcatttccagcaggccttgaaccgtgccgtcctcgccataggggccgtgcagcaccggcagtaccgcgtccacatggccaagggaggtcagcgcatggtgcatttccgggtcggacatgctgacgaagctggtgccgaagccggaatcggcggaattgatgcggctgggctcgccgatgaagaaaccgtcctggccgcgagaggggtcaagcatcaccgggcgcgattccggggtgatctttacggtcggcagctcgccgccatccagattccagccacgaggatcttcgccgttgatgatccacttgccgtccttggtgatgccgaccggaatcggctcgaaccgttcagtgtccatggcccccagcacaccggcagtggagatgcaggaaatcgaatgctcgtctgcacgcccaccatagagcaccacaacacgcttcttggccataaccatccttttattgaaactacaaccgttttcaagcctatgctttgcaccgccaaccggaccgaaccgcgctcggaacgccgcgcacaagagacgcacaccagtctactcgtgcacgtcaacgacgtatacgccacgcgactttgcacgtacaacgtatacgccacgtatacgtcgcttctctcgttattcgccggtaacctcgtgcccgaacagtccggcaagcatctccgagcaggaaatgccttcgttcagcacgcggctcatctgatacgccaacggggtcggcacatcaagctgctcgccaagagccaccaccgcatccgtggtgggcacgccttcggccaccccgttgctgaccttggtggcctcctcgaccgtcaatcccttgccgagattcgcgccgaacgtatagttacgagacagcggagagccacaggtggcgatgagatcacccacaccggccaagccgaagaaggtcttgggatcggcgccagcggctgcgcccagcgcggtcagttcggccagtccacgagtttcgatcatggctgcggtgttctcaccgtagccggcaccacgggccatgcccacggccagcgcggtcacgttcttcaggctgccgcacatttccaggccgatgacgtcggtggtcacgaacggcttgaaataggaggtggtacatgcctcggccaccttcgtggcattatcgaggttcgtacaagccaccacggtggcggcaggatgacgatcggcgatttccttggacaggttcggtccggaaatggcggcgaaccggtcggccggcaggtcaagggattcgcggacgacttcgtccatacgcttgttggtgccacgctcgatgcccttcatcaggctgacgacgatggcgtgatcgggaatcagtcccttgaattcgacgagtgccactcgcgcgaactgcgcggcgatggccacaaccacgatgtccgcgttcttgacggcttcggcgcgatccccggtggcggtcatgttgtccggcaacttttcgacggacggcaggcgcacggcgttgtggtggtgatcgcgaatgccctcgacaatccgctgctccttggcccacatggtcaccgtgttgccggcgtccgccagcacttggccgaaagcagtaccccatgctcctgcgccgagaaccgttatatttttacccatatcagattcctaccttcgcttgtcgcgcaacttcatcggcacaatcttgtgccatgctactcgcctaggctccccgtacgggaaccggtgcggctacttctcagccgggaacgggccgccggcttccggccaaggcttgcgactcatgctgcggtagtcccagtagccttcagcggggaactgctcgccacgaatttcctccagtactgtgttcatgcgtttgagcacgcgccacatcagctcgttcacggcctcggcaggcggctcttcaccccatgagtccatgtcggcaagcagatcggagtaatcgagcgcatggtcatagcacatcaccacgtttttgcgcggccatggccaccagtggttgatggaggcggcaccccacgtcaccgccgggtacagcggcacctgatgccccagtctgcgcgaggattcaagggcgatgtatcccacgccctccttaatgctcatcacccactttttcgggtcgcgggtcacggtgccttccggccagaccgtcagcgggcggccggacgtcagaatatcaatcgaggtctcttcgatctgcttggccttgcccgaatgacgctgcaccggctgcatgccgaccaaccggaaccacttgccgatcaatggccacttcgccatctcggccttggccatgtaccgggggcggcggcccatgtggaacaggctcatcatcggcacgaacacatcaaacatggtgatatgactggcggcggtgatgaacggtccggtttccggcacctgttccaagccccaggccttggtcttgcagctggcgcggaacacaatggacacccctcccagcagtcgtttggtggccttgggattctgggcgtcgatttccggctgattgggcgtgcgagggccggtcgggtaatactgtgtcgagtccacaagcgtgtggcgggcggccagacgcttgacctgctcatcactcagcgggcttacggccgaacgcggcgacggttttcctttggatgccatggtctctattgtggcacggaccaccgcccaacgattccagcgcaacattcccgggaatgtgccgcggaaccacacctcgcaccccacgcccagcgaaacattccccggaatgcgtcgcacaatacgcggcggcccgtctgcacacaccatgcgcgcagacgggccgccggggaaacgttcgaatcactccaccgcgatggcgtcaatctccacgagcgcacccttgggaatcatgttgttgccaaaggccacgcgggcgggcttgacggagccgatgaacgcctcagcgtaacgtgcgtccacttccttgaagtcctcgacgttcttcaggtagatggtggcgcggcacacatgctcaatgccggtaccggcagtgtcgagaatgtgcttaatattcttcagcgcctgtgcagcctgctctccagcggtctcgcccgccagttcgccggtggccggatcaatgcccagctggccggatacgaacacgaagccattggccttcaccgcctggctgtatgcgcccagcgcggccggcgcctcggaagtggctacggcttccatcttttcgctcatattgtgctccttctcatcttgggggcgcccacctgctgcggccggcgccggtacacatcaccaccggctacgaccaatcgcacgatcagcaacgattggcaatgccgattacgtagcagtctactgagcgaagtcgcgtttagcgcgcatgatgcccggcatacggccatcaacagactattccttgctattccagacgattccagacgattcgactaccgttctcgccaaaccgggcggtttttccacgacccaagcgagccggcatcaccgaccccgacaccagcaccagcaccagcaccagcaccagcaccagcaccagcaccagcaccagctttgcacgcgcttaatatcacgcgccgaatatgcaaaaggcttccggcggctagccgaaagccatgctggtgggcttgatggggatcgaacccacgaccttctgttccggagacagacgctctatccactgagctacaaacccgagcaacttctttactgtacaccacaacacgctgcatgaggcacatacgtcgccaaaataacgagaaaatcgccatcatcggctctacaatggggttatgtcggaacctacagatgacttcgaatacgaacgccgcttcttctgccgcgagctgccggcggaatacgacgacggcgacgccccgaccctcattattcagagctactacgtgcatgccgacaattacgccttgcgcgtgcggctggtctcgcacaaggttcacgtcgacatgacgcccgacgtaaatccggtggccgtgctggacgagtaccgcgaccggttctcggaagcgtatgtcaccgtcaaaggtccgtccgtgggtggcacgcgctacgaggtcgagcgcgagatcgacacgcgcatcgccgccgaactcatcaagcgcggcggctcggtaatcatcaagaaccggtattccgtgtggattgcggaagacggctggagcgtggacgtgttcggcgggccgaacgcgccgctgatcgtagccgaggccgaacgatccgggccggttaccaatctgacgattccgaaattctgcatcaccgaaatcaccgatcaggcgcgattcaataacgatggtctcgccaaccgtccgttctgcaagtgggcggatgatttcgaggaggaactggcgctggaggggccaaggttccagcaatatttcgggaagaatcggatggtttaggggaagcaatcaagtacgttcgcgcgcttccctcagtcatctacgcctgacagctcccctcaaagaggggagccaaaaccaatcagtacatgagggtggctaggcgacggcgggcgcgagccagacgcgggtcggtgggttcggggatggcgaagtattcgagcagacgcttgcgaaccggctcgatatcggccttgtgcccggcggccaaaaagtccagcaaacggtcgaaagcgtcttgaatctggccaccgatcatgtcgatatcagccacagccaactgcgcttccacatcgtccggcgctgcggcggcagcggcacgcacgtcacgtacatcagcggacccggagcgggccagcaacagcgccttcgcacgttcgcgggcggccagtgcatcggacgggtcggattcgagcacgcgctcgtattcggcggcggcaccggcgtaatcgccctcctcggccaaacgatgggcttcggcatgctccggcggcacctgctcagcacccgcgccggcaccggtggcaccagcgctcttggcggcatcggaatcaggatcacccgagtacggcgcggtaccgttcacaccagactgcgcggcggcctgaatgatcttcggaatcacctcgtcggtaagttgcttgagctcgtcgtcacccggaaggccctgcaacagtggcatcggacggccggcaatcaacgcgaacagtgcgggcgcgccctgcacctgcaacgcttgggcaatcgaaggattggacgagatatcgatacgggagagctgaatctggccgttcagggcgttcaccgcgtcgcccaacgcacgggccatcgggaacaggcggtcatcggtcggtatccacaggagcagcaggatcgggaaggtcgcagaagtctgcaccattgcctggaaggtgttttcggtggtgtcgatcacgtacccaccagcggcaggagcgccacccgcctggccgggctcggccttgacctgatgcttcagcgcctccaaatcgacggcgcccgccaatgagactcccggattgaactgctgctctgccataatgcctcccgattccacgcgattcgcgtacaacaacaatcacatttgctgacattgattgtaatgccgattcccaccacgtagggattcttccactacgcggtgaaattcccaccacgtagcaaaacgcccaccacgatgtgactcaaaacggcaccattgtgcgaaaggtaaaacttaccgacatcgtggtggatgaatcatatcgtggtggggcgttaaccgcgcggtgggcggcggcaacaactacagcgcttcgacctttaccggctgacggtcggcgcccacggcggtgatttgctcaccggagcttgccaacggaatgtacaaggccaccacgttcacatacgtgaccttcatggtgctggtgtacttgtcgctattgaacagcgccttctcgtcgtcggaagccggctgcgattcgcggccatcccccgccttgcgagtccattcgccgttaatacggccaaccaccaaatcaccggcaccgtctgcagcacgcatcacccacatctgttcaggcacaacggtgaatttctgctcctgcgtaccgttgttgcgttgcataccttcctgcaccttggccgtggtattggccagttcctggcgcagcaaatcgtctgcgaacttggaagcgtattggctcttggagccgttctgcagcacatcggcgtattgggtcaaggcatcggcgggagtggccaccagcttctcatcctttgcagtgcccatctgcgagccaatagtcggaatctcgaacttcggcagcttggccccctcaaacagtcgagccatggccatcagcttgtaattctgctgggcggattcctgatcgaagaccagcaaacgcttggactgctgatcttcggtggtggtcgtgatggtgaacaccgagcgaggccatccgtcgtccatgggaatcaccgtctgggcgatgtccttgggaatggtcgcgtatttggacataccgccgccgcgctggttgatcgtggtctggctgatgcgaatgtccagctggggcccgcccataacggccgcatatccatcgggattcttggcctgatcggcttcatcgatcgtcttgagaatcttcaggcgaatcttcttctcctgtgcctcggtcaaatccggcgcaaccttggtggaggtatcagcagccggcgtcggcagccggccttcacaggcggtcaacggcacgaccaacgccacgcaggcgagggcggccacacacagtttgttccatcgcttgttcatcagctttcctcctgtccgtcatcggccgagtcgtctccggtattgacctcttgggccaagcgggagaagtaggcctgcagttcgtcaggggtgattaccgaagtcgattcgttatcgccggcgctgaagccggtctcagcgccgctctcggcaccagtctgctggtcggcgaccaggttacgtgaacttgggtcgatgataaccggtgtttcggtggcttcagattgcgaggacgcacggcccgaacgccgatttgtggcgtggcggcgacgattacgtcgacttgcaccatccggcttcccggacactgcgatgctggcgggtgcctcttcctcaattacggcgcttgccgtgccttccaccatgcgcttgcggcgcttatgcggcggcatggcgaacacggaggcgcacaatacggccagcacggccagcaatccaccggacagatagaacggcatcgcaaagtccggcacttcggagcgcacccagtgcagctgcaccttggcgttggtggcattttcacccaaatccacaatggccaccgtcgaggcgccggtcttcttgctctccagcgaaacggacccggtgccgcatttcacggcagtccacatatcggaatccttgaacgccaccgcgtcatcggcactggcaggcgctccctgactcgtgctgcttcccttctgggtgctcagctcgctccatgacgccaatccggtgatacgggtataggacttctcggacgcgacccatccggcaacatccttggacggacccaacgccacgcacgcctcgtcctgagaggatcccgagtccacggttatcgtggcgttctgatccaacaaggtcagcacattcggatcagtgacggcataccgggagccgctcatggttgcggaagcggtgatttcagtggagggcttccatatcgtggtattcatgtaccccaacaccacagccgccacggccaatagaccgaagataggcgtcaccactccacgcatgatcttggcatgacgggatggacgcttggcgcccttatccggtcttgtagtctgttcttcagcactcataacttaaccattctacaatcttcacctgtttattacctaggagcgcagaaaatcaaggttcaccagtagggtggtgtgtcatgcgtaagtctgttaaatctatgttatcccctctcggcaaggccgttgctcttgcctgctcgctggcgatgtgcgtatcgctggctgcctgctccagttcgagctcggactcgaaatcctcttccgactcttctgacaagaaggggcaaattgccggcgtgaccgccaagggcaagctcggcgagaagccgaccatctcctttaatacgccgatgaccgtgtccgacggctcctatgtggtgctgcaaaagggcgatggcgacgtgatcgaggagggcgaccgcgtctgcgcccaaggcatcgcgctcaacgttaaagacggcaccgagctcatggacacctggaccaagaacacgccggattgctcgctgaaggtggattccaagaccctctcctcgacctactacaaccagatcaagggtgccaagatcaacaccacgatcggctttggcgtcaacgctcaggattcgtccggatactcttacattttggcgatgacgtttgtatccaagtccaaggacctgaagaaggccactggcgaggaagtcaaggatgtgccggccaatctgccgaaggtgacgcgagccaaaaacggcgagccgtccatcgacatgaacggtcagggttcggttgattcgctgatctcgcagacgctgatcaagggtaacggcgccaagctgaccgacaagaacaccgtggtggtcaagtacaccggttggcttacggatggcaagcagttcgattcgtcctgggatcgcgattccacaatcgacgccgatctgttcagcgattccagcggccagcatcaggttatcgagggctggcagaagggtctggtcggccagaccgtcggctctcaggttctgctggtgattccgccggatcaggcctatggagataaggagcaaggttcgattcccgccaactccacgttggtcttcgtaatcgatattctcgccgcgtactaaacaatctcgatggctctccccaagaggggagctggcagcgaaactgactgaggggaggcctcacggaatataccgtgaggcctcccctcagtctctctatgtacgttcgaaaccccccttcaagagggaagccaagaacaatcagaacagcctgagactgtcgtcctcggtgcctttcatatcgtcgtaatcgaggatgaggcaggtgaagccgcggtccttggccaagacctgggcttgcggcgtgatggtttgtgcggcgaaaatgccatgcaccggggccagcagcggatcgcgattgagcagttcgcagtagcgagtcagctgctcgacgccatcaatgccgccgtgacgtttgatttccacagccacatgctcgccctcggcattcacggccatgatatccaccggaccaatggcggtagggtattcgcgacgcaccagcttggctcccttgccgatacgctcgatctgctcggccagatagcgttgcagatggtcttccacgccatccttgatgagacccggatcttcgcccagatcataggtttggtcggaatagatgtgttgcagcgtcacttcaagaatgtcagagcccttgtcggcgctgacacgtagcaccttttccggctcaccagcggcgacactttccggggaatgcgtcgcggaatcaccatccacagccccaccagcgacactttcccgggaatgttgcgcggatttggcggctgggtcgatctcacgaatcgtgcagggcgcggtcatccagttcagcggcttgtaggagcccaattcggagaaaatcaacaggctggaatcagccttgatcagcaatacacgcttggccaggggcagtgaggcgttgaggcggcccgaatactcggccgaacagtcggcaacaataactcgcataggccaccactgtagcgcaacacatggcatacatagcaaaaggggctctctggaaaaccagagagccccttaaggagttggttcaggtcactcggcggtgccggagtactggacgtcgtggccgcgctcgaccgccacggtgagtttgttcgagtcgaaggaaatgaatccgtcggtcacctcgaacatgtggcgatcgccatcgggctcaaccacggtgagcgtaccctgcttgatcaccgtgagcacaggctcatggtcgggcaggatgcccatgccgccctcagaggcgggaatggtcacg

SEQ ID NO: 289 - DNA, 9603 bp, Unknown
  R101_18m  MAG No. k141_76292
agcacgaagccgaccgcatactcgggcatgttgttcttgcgaccggtgaacatggcaatggtggtcatggtcggcagtccggcgatgaccgtgatcatcagcaccatgtcatgggtgatcggcagttgcggcaatgcgccggtcagcgcggtcagtagcgcgtagaaggcgagcgggaatgcgatcatcttggcgactaggccagcatagagttcgtagcgtttgaggacgccccaccacttggtcagcgcgaacaggccgcccaagtagattagcgacatcggcgtggccatattgccgatggtgtgcagcggcttcaggatgatgtccggcaccttgacgccgagcagaatcagaatcagggcgagcatcacgccgacgaaggcgggattgacgaatcgtttaagcaggccgaggacgcgggtgcctggcgaggggcggacgacggccggagaaccaccgtttgcggcattgctcgccgaaccagcattgctcgccgaaccagcattgcccaccgaaccggcgtcgttcaccgaaccgttcacgaccgcacctcgcgcgccaatcgcgttgccgccagtcgtttcgtcgaccggctcgcacagccatacgccgtacgtccagagcagcgtctggtcgatgatcgacatcagcgccacgtaaatcgcgccgttctgcggccaaagtgccataatcaacggaatgccgatgaatccggcgttgccgaaaataagcgacgcctgaaatacatggctacgcgaacctttgagccgcaacagttcggcgaccagccagaacaccaggatgagcagcgcgtacatcacggcggtcagcagcatcacgccccagttggcggcaagctgcgcgcggtccgcgccgtcgacggcgttcgagaacacaagcacggggatgagcacgttgagcagcagcgagcacatgccgtccaacgccgtctgaccatagaaccggagcctcacacatccgtatccgaccatcagcatgatcagaaatccgactaactggccaatcatgacgccgaactgccccatgcacactcctctcgtttgctctcccgcgatttcctgtcactggttcatataggcagccatctggacaggctcggcggcacacgcatcagtatgttcgataccaccacatgccaatccacttctcgttcaaccgttccccgtgctaatgcgccgcctgccaccccgtgttgccggtgctgcgcgagcaccgctacgtgtattgcattccggtggccctcgggcgcaacgtgtgggtcggcgcgaacgtgtcgattctgtcgggagtgaccatcggcgacaattgcgtgattggcgccggtccggtcgtgacacattccatccccgccaactccgtcacctacggcgcgccctgcgaggtcgtgcgtgaaatcggcgacaaggaccgcgagtatttctacaaaaatcgcaagctcgacgtgtgggagtgagctttcgcgctactgctctttgagcttaaaacgctcactgaattggcggtcgcgccagtagtagacgtcgtcgcgttcgttgatttcgcgaattaccttgcacgggctgccataggcgaccgtgttggcggggatgtccttggtgaccagcgagttggcgccaatgaccgcgttgtccccgatggtgaccccgggcagcacggtgacattcgcgccgatccagacgttctcgccgatgtggactggcaacgaatactgggcaccctgatagcgcaggtccggacgcacgggatggccggtggctacaagcgtgacgttggggccgatcatggtgtgggatccgatgaagatctcaccatcgtccaccagcgtcaggttgaagttggcgtaacagcgctcgccccaataagtattgcagccccagttcgcatacaccgggcattcgaggtacagaccctcccccgccgcgccgaagaacgcctgcatgagttcggtacggcgcttcgggttggtcagcggcgtggcgttgagttcgagctggagatcacgctgggcggcctgcagatcaaaaaagccgtccacatcatccggcaggtagacctcgccagagaacataagcgccattttctcgcgcgtcgcatcatcgataatcggcttggcgatcggcttgtcttcggtcatcattggctcctgttcggcgttttggcgattgtgtcggtcgaactattctgtcacagactcgttttcgacacccagcatcgagcgcagccagtcaaggattcagatgtgcgattggcaccgtgcgggcctcacacttttcttattgagaacgattcgccgtgcagtcaagccctccatccacccaaaaaggactcgcttttggccgcgtcgtcgcggtaggccttgccgaactcgtcaatgagcccatggaattcctgcaaatccttgacactgaggttcgtatccagcaccacgggcgaataggccctgtggaatgccggatagccggccggcacgtcgaatccaaggaaggcgaacagccgccgcgcgtaggtatcggccacgaatgtgcggcgcgagaacacgtacagcatcagatcgtcggccgtctcgccgccaataccaaataatccaagcaactcggcccgtaattcggcatcggaaatagccgcggcaccctcgggcgcggccccgcaacgctccacataccaccaactcagcgactgtacggtcttggatttgttgacataaaagcctgacggtcgaatcagttcctgcaaacgctccggctccatggccaccagcttatggggttcgagcacaccctccgcgttcaacgccgcaagcgaacgattcacattgccccacgccgtattctgcgtcagcaccgcgcccaccataatctcgaacgtggtctccgccggccaccatccggtcgggccgagtgcgtcagccatggtgcggtacagcaattcgatgcgctccggcacaggccacttgtgtgcctggttggctttcatacgtttcatattctgcattcaggctccgtattagccatccgccattcatttattaggtcgattatgcgttcattaggtcacttgtgatgaacactgccttcaagaatggcttcattccaatgctcattatctcatgctaagcagggcaccgacctaatgaacgcataatcgacctaatgaacgcaacggtaaggaaaaactacagagattcagcgagatatgctcggtccacctggtctggaagtcgaaaatcttgatgacatctaccgcaattcgtgcaggattcgccgcatgaacgggatggtgaccacgaatgtcagcacgtcggacaccgattgggccatttccacgccgagcacgccgaacatcatcggcagaatcagtacgatcggtgccaaaaacagaccttgtcggcacagggccaggaaggaggcgatgccggtgcggcccatggtctgggtcatcatattgcccatcatgttgaagccgttgagaatcaccgtgcagcattggatgtgcagcgcggccacacccaccgcgaccacggccgggtcggagcggaagatctcgaccagttgcggtgcgaacacccacagcaacaccgccaacaccacgagcacgcaggtggcgagccgcacgcagaaccagtacccttctttgacgcgcgcgaacaggccggcaccgtagttgtagccgcacaccggttggaaaccttggccgaggccgacgatcaccgagttggcgcccagcataatgcgcatcacaatggccatgccggcgatggccgcatcgccgaacggattggcggcaatgttcacgcaggtcacggaaatcgaaccggcgccttggcggatcagcgagggcaggccaccgccggccacttcgcgcatgagcagcacatccggcctgcaattgcgcagggacagtttcatcacgccgaatttgcggctcattgtggtcagaatcgtgaagctcaccgtctggcagatggcggtggccaggccggcaccaaaaattccgaggtgcagcacgaagataaacaacggcgcgagcaggaaattcagcaatgcgcccgaaaccagcccgatcatgccgaacgccgattgcccttggtatcgcagcagtccgttgagcgcgaacgacccgcatacacagggtgcggcgaccaacaacggcgtcaggtattgcacggcgtatggggcgattgtcgaggtcgatcccagcatgacgaccagcggccgcagggtcagcaatccgattgtggcaatcaccaaaccagagagcaccgcacccgcgaagcccacggccagtagtcgggaggcgcgctcattgttctgtttgccgagttcgcggctcatcgagttgcccgcgccgttgccgaagaagaagccgagcgcctgcatcacggtcatgatggagaacgcgatgccgatggcaccggactgcgcggtgccgagctgaccaataaagaacgtatccgtgaggttgtaggcggtggtcaccaagttggagatgacggccggcaaacacagtttgagaatcagcggcttgaccggctgcccggtcatctgccgatatttcgcgtccgcgctcgcgcgtctaatgccatgaatctgcaccatggacggctatcctactcgcgcagggtcctatgcaaaggcgcgtgaccgccatacaagtcagcgcagataccgcccggtgatgctgttcggattggccgcgacctgttccggcgttccggtggcgacgatgcgtccgccgctttcgccgccgcccggacccatgtcgatgatccagtccgcattggcgatcacgtcaaggtcatgttcgatgaccacgactgttgcgccgctcgccacaagccggtcgaacacgcccagcagcacacgcacgtcgagcgggtggagaccgatggtcggctcatcgaacacgaataccgcgtccgattgggccttgcccatttcgctggcgagtttcagccgctgggcttcgccgcccgaaagcgccggcgtcggttcgccgagcgtcaagtagccgaggcccaagtcgtgcaggggggtcagacgtgcgtgaaccttcttgaggtcgctggtcacggccagcgcctggtccacgctcattgccatgagttgaggcaggctcagggaaatgttgccgccaccctgatccgtcgcctcactcaatttttccttggcagctttgcgcttatccgggaccttcatcttcgccgctttgcccttagccgctttaaccgcacgccgaatcgcgtcggcttcggacgcatagcgggagcctccacaatccgggcattcgatggtcacgtccggcaggaactgcacatcgagcgagattgaaccggtgccgtcgcacgtggggcaacgcagtctgccggtgttgtacgagaaatcgccagccttccagccgcccgctttggcgtcgtccgcgcgggcgaaggcgcggcgcaattcgtcgtgaatatcggcataggtggccacggtggagcgcacgtttgcgccaatcggcgtggcgtcgatgagattcgcgcgattgatgccctcggctttaagctcgagcacgtgttccggcagccgctcccccgctgcctgcgctttgagcgcgggaatcagcgattcaagcaccaccgtggtcttgcctgagccggagacgccggtcaccgccacgagccggccgcgcgggatatcaatgtccagcggcttgactgtatgcagctggctggttgccatgcggatgtggccaaggctgaacacctgtgattcagccacacgctcacgtatacgcgcgtttgcctgatctgacaggaacggtgcaatgcggctgcctggattcgccgccacctcgccgaccgtcccttgcgcgatcacatgccctccttcggcgccggcaaccggtcccatttcgataagatggtcggcggccttgagcacgcgcacgtcatggtccacgaccaccacggaattgccgtccgccaccaagtcatgcatcacgccgagcagcccatccacgttcgagggatgcaggccaatggacggctcgtcgagcacatacagcacgccggtggtgcggttgcgcacggcacgggcgagctgcacacgctggcgttcaccggttgaaagcgtggcaccggcgcggtcaagcgccagatagccgaggcccagatccaacagtcggcgggccacgtccaggaatgattcgcagatgttggtggccatcgtccgcatgtcggcaggcagggattccggcactccgcgcacccaatccaccgccgcatccaaggtcatcgcgctggcttcggcaaggttcagcccgcgcacatgcggggcccgggcggcgacgctcagtcgggtacctccgcagtcggcgcatggtccctccttgagaaatcgagccacgcgctttaggcctttctcgtccttggctttggcgagcgcgttctccaccgtgtatacggcgttgaagtaggtgaaatcgagttcggcgaaatcgtcgcctttcttcggcttgtaaagaatatgctttttgacggccggcccgttgaatacgatgtcgcgttcttcgggcatgagctcgctgaacggcacgttggtgcgcacgcccatcgcgccgcacacctgcttcatgaggtcccacatgagcgagccccatggcagcaccgcaccgtcgtcgatacttttcgactcatccggcaccagggccgcacggttcacttcgcgcacaatgccggttccggagcaggtcgggcaggcgccggccgagttgaaggcgagcgattcggcgccgggcgcgtggaattccttgccacagctgacgcaagtaatgggcagtccggccgccacgttcagcgtcggttcgttgcgcgccccgcaatgcgggcacacgtgcgaggcgacgcgggagaacaggagccgcagactgttgagcagttcggtcatcgtgccgaacgtcgaacggatgccaggcaccgtgggccgctggtgcagggccagcgcggccggcacgtgcagtacttcgtccacttgggcgcgactggcctgggtcaggcggcgtcgcgtgtacgtggacagcgcctccaagtagcgccgcgaaccttccgcatacagcacgccgagcgccagcgagctcttgcccgaaccggagacgccggccacgcccaccagttcacccagcggaatgtcaatgtcgatgttcttgaggttatgcacgcgcgccccgcgcacctcaatcgcctgcggccgttgattgttgctcatgctcggcactgctccgccgccaccctactgtctgacctattatcaagcgtcacgccgttacctctttctcgacctcgccctagaccgccgccgcacgagcttcatggtctccagtatcatcacgaccaacgacggcagccgagaggctttcgctattgagcaccgcctctcgcatgctgttcgccgcgacaacgaacgaaagaaggtgccacaatgccgtggttcagcgtcaagaacgcgctcgcagaggatcccgtcatggggctgctccgggaacaggtgacgacaacccgcaaaggagtgtccatcgcgttggacgccgtcgaggggcatctgagcgtcgatgaatccagaaagagcgtcaacgatatcgagcacgagggggacgaggtccgttccaaggtcgttcacgcgttggccaaggcctggaccacgccgttggaccgtgaggatttgttccgtttctcccgatccatcgacgacgtgctcgacaacacccgcgatttcatacgcgagatccatctttggaaaggacatgccggcgaacacgccaatgtcgcgttgacccacgtgaacgtcgccctgcacgatctggaactcgccgtgaccgcggaaggcgccgacatgcgccgatactgcctcgaggccagcaaggaatccgcccgcgtgcggcgcgcctacgaatcggggcttgcagccgtctacaccggcgaaatgagcatggacaccctgaaaacccgagatctgctgcgccgcgtcgacgtcataggcctgaggcttggggagtcctccgacgccatcctcgacgggctcgtcaaacgcgggctgtgactcaccggaataccgcaaagggaaaggcgcgaatatgcgcaggaaactgattcttgatttggatacgggcatcgacgacgcgctggcgatcggatccatcttctcgcgtcacagacagtgggccatatacaacggcagcttgatgcgttctccatccacttcgagttggcggggatgcagaacgtattccttgcccaatcgttgggcataccttttgcggaatttgtcgagcgaagatacgccgtatcgtttcgtggatttcacttcaatcgggctgatgcgaggcttcatcgcggcattatcgtattcccgaacgatgaggaagtctatttccatggttttcgaggcatccgccctatccaagcgcgagaagaaatacagtttgcgcccattcgcccggaattgctgagccaccgcattctccaccagcatcccttcgttgagcgagagtttatcgaacagaatatcccggtacacatcatccggcgttgtctctcgatcggcaaacgcctgcgacaccagcaaaccggtatccgccatatagcatttgaatgaatcgttatcttcgtacaatcccagccccaccaaagggtcagtcgaattacggcacaggttcaccaagcgggcgtcttccaaccagaagaacgccgaatcgtattcacgagatcgagcccccttatcgaccgatgccagagtgaatcgtttctcatgcttggacagctgccctggaatctgagcgaaaatgccccgcacgcggccggcatcgccattggcgaacttgccgatatcatcactgtacagctgcaggatgccacgcttgatcaaatccacctcgccaaaatcgcgctgctcgacataatcggcaaccgcctgcggcataccgcccaccagcagatattcgcgccacagcctcatcgctcgtttgtgcagcgcatcgggcaacgggaccagacgctcgaacgatttgcgaatcgtttcagcaagcagctcctcccccatggcccagcagaactcctcaaaatcgagcggccccatgtccattttccgttcctcggaggggatgacgatattcgccacattcctcttgatggagatcagcgaaccagtttccacatagtcataccggccatccgcaaccagatatttgatgagctccctcgccgccggataccgctgcacctcgtcgaaaataatcaacgattcacgctcgtacagtcgcttgcggtaatacgcagacaacagcatgaaaaatgtgtcaaagtcatcacgctggttttcgaagatgtcgcgaacatcgcgcggcaaacgtgtgaaatcgatgagaatatatgacttgtactgagtgcggccgaattcctcgacaatggtgggttaagggtcaaaaagtgtgtccggaatcgcggattttcacggattgacctgtaggtttccggaaagtatatgctccggaagcatatatctagcccccgacgggaaatcctcggtgtggcagccgtgatgtgctatg

SEQ ID NO: 290 - DNA, 57491 bp, Unknown
  R101_18m  MAG No. k141_76532
ctacgcggacggcgtcatcgtcggctccgcgctcgtgcacaccctgctcgcggacgacaacaagaccgcacgcgacccgaaggaaggcttgaagctgctcgccgccaagagcgaggaactggccgaaggcatccacaacgcccggtgaacacccggtgcgcctcacgcgggttgtgccgtgacacggtagggtagtcacagagcatcaagcacaacccgcgcgtggacacaccatgagcaccagcaagtagaggcacgatgaatctggcttatattccctcgccgaccttctccaagttcgagatcggcccgttcactatccacatgtacgcgatctgcatcctgatcggcatctgcgtggccgtatggatcctcaccacacgttggaagcggtacggcggcaccttcgaccagattctcgacaccacgctcgtcaccgtgccctgcgcgctggtgggcgcgcgcctctaccactgcatcaccacgccggccgactacttcccgcccaccggcaacttggtcaacatcctcaaggtgtgggaaggcggcatggccatcttcggcggcatctccgtcggcaccttggtggcgttcctgtggtgccgccacaagcactatccgttcgcgatcttcgccgatgccatcgcccccgcgctgcccgtggcccaggccatcggccgactcggcaactggttcaaccaggaactctacggctggcccaccacgttgccgtggggcctgaagctcaacgacgcggacgccatcggcaaatccgaaatctgctattccggcgcgcaatgcccggactacagaaccacgctgttccacccgacgttcctctacgagatgatctggaacctcatcggcgccgcgctcatcatctacctcggccacaagctcgccgaccggctcaaggccggccagcagttcgccatgtacctgatgtggtacggcctgggccgcacctggatcgagaacgtgcgcatcaactactccacggtgatcctgggcctgaggaccaacgtgtggaccgcgatcatcgtcttcgtgctcggctgcatcctgttcgtcgtgctctaccagtacggtccggaccccaaggcgcaggcgcgcgggcttgcggcggtcaccgccgacgagctcgaacgccagagcatcgaagaggaacagcttcgccagaagaagcaggccaagcgcactaagtgacaccacaataaacagcgccgaaacagcgcgaaacacgggaccccaagtcccattgcacagataaggtaggaaaccatgagcaatatcgcaatcgcacccagcatcctgtccgctgatttctgcaacctcgaacgtgatctcaaggccatcgccaacgccgacctggtccacgtcgatgtcatggaccatcatttcgtgccgaacctgaccctgggcgagccgatcgtcggccgcatctgtcaggtcaccgatctgccggtcgacgtgcacctcatgatcgaggacccggaccgttgggctcccgaatacgccaagctcggcgccgcctccatctccttccacatgggtgccacccacgcccccgtgcgtctggcccgacagctgcgcgagatgggctgcaaggcctgcttcgccgtgcgtccggccgaaccggtcgagccgatcttcgatatcctcgacgagttcgacatggtcctcatcatgaccgttgagcccggcttcggcggccagaagttcctcgacaaccagatggccaaggtccgccgcctgcgcgatgagatcacccgccgtggcttgaagacccgcatccaggtcgatggcggcgtgagccccaagaccgcgcacatcgtggccgaagccggcgccgacgtgctcgttgccggttccgccgtgtacggcgccgagaatcccgcccaggccatcgacgacatccgcaccaaggccgaggccgcgttcaaggcctgagctccaagcctgaaccgcaatccacctttcatccataaccgcaagaaaagaatctgaatcacatgaagacgtttgaatccctgttcgccgaactgtccgaaaaggcccagacccgccccgaaggctccctgaccgtcgacgagctcgacaagggcacccacttcatcggcaagaagatcatcgaagaggccggcgagacctggatggccgccgaatacgagggtgcggaccgcaccgccgaggaaatgagccagctgctctaccacgtccaggtcatgatgatcaagcacggcctgacgcttgaggacgtctataagcacctgtgagaggaacgcaaatgctgagaatcgcagtgcccaacaagggcatgctatccgaacccgcgtggaacatgctggccgaggccggctaccgtctgcgcaccaaccctcgccagctggtcgtgcaagatcccgacaatggcatcgagctgttctacctgcgtccgctcgatatcgccgtatacgtgggccgcggcgccatcgacgtcggcatcaccggccaggatctgctcaagaactccggtaccgccgcgctcgagcacatgccgctcggctttggtgcctcgaccttccgtttcgccgcaccgaacgaatccccgatcaccactctggaggatgttcagggcaagcgcgtggccaccacatttgataagctcgtacacgactatctggtcgagcacggcatccaggccgagaccatccacctggacggtgcggtcgaatcctccgtgcagctgggcgtggccgacctcatcgccgacgtggtctccaccggcaccaccctgcgcaacgccggcctgcgcgtgtttgccgaaccgctcatgcactccgaagcctgcctgattcgctcgccgcgtctgaacgagcaggatccgcgtctggccgtgctgacccgtcgtctgcaaggcgtgctcactgcgcatcagtatgtgctcatggactatgacattccgatcagcaaggtcgccgccgccgtggccgtgacccccggctttgaaagcccgacgatctccccgctgcacgacaaacagtggaacgccgtgcgagtcatggttcccaaggccaaggtcaaccagctgatggatgatttgtacgaagtcggcgcacgcggcatcatcgttaccgctctgcaagcctcccgcatgtagactgttagtcgatatgaccaaccagaaagtcaacgccagatacagtccggaagcacgtgacatctatttcaccgtgcccaatttgatcagcgcgctgcgaatcatctcgattcctttcatcagcgtgctgatctccaagcatgaggtgattgcggcgctagccctgatcgccatttcctcggcttcggacggactcgacggcatcatcgcgcgcagattcaaccaagtgagcaagatcggtcagattcttgatccgatcgccgaccgactgctcattttctgctcgattctggccctcagcgtcgccggcatcatcccatggtggatgctgattatcgtgggactgagggatctgtggatggcgattcaggtgctatggcttgcccagtacggttatggtccgctgcccgtgcatttcgtgggcaaggctggtaccgcgctgctgatgatttccatcgtcagtcttattttcgccgatttgggcaccagtacgttcttccacttgctctacatcgccgcgctggccgccggcatctggggcatcgccatgtattggctcgccggatatatctataccaagcagggcgtcggattgctacgcaaggaactgggggagaagtatggcgcttgaggccacggccccggtctcgttccccatacccaaggagaatgagccggtacgacgccgcgccgtgttctcccactcagtccgaggcgcggaatcgcatcatgcgctttccccggatgacgccgccgccatccgcaccagacgtcgccgtaaaaccaacgacgattcgcttcagctcatcgatgatcttgtcaatcgtccgatggatccgatgttctccgactcacgactggtccatgagcatcgttcgaccttctccatctggtttaatcgcatcgtcgtattcatcatctgcgtcggcgttggctttgcctgcagcctattcgtgcaacagttgcaatccgatccgcgtaagcaggtacggcagactttggccacgcaattggagaatcgcaactcgcagatagacgaactcaccacggacgtcaataatttgcgatcccaagttgacgaacagtccaagaaaatctccggcagcgtgaaaagcgacacgcttatccaagacgaaatggtcaatggtgccacggtggtcgaaggcgaaggaatcaccatgacgctggccgatccaatcgcggcaagccagtcggatcaatcctcctcgacgagagtcggcacctccacgaacatccgagtcatcaccgatctggatctgcaacaactggtctccctgatgtttcaaaacggagccgaagccattgccatcaacggtaataggctcggcgcgcaaacctcgatacgcaaggccggcgggcatattctcatcggcatgaccgcgatacaaagcccctataccattgaagccataggcgataagagcgccttggccgaagcgatgggggagaagagacttgcaagtctttacgattccttcaaggaagccggtatctacccgcaggtgagcaaatccaattcgattacacttgaggcagcagtcactggcgaagtgaagtacgcggaaaggaatgaataatggcagccgttctgggactgatcatcggcgtcgtcatcggcgtgttcgtcaagccggacattccgatcatcgtgcagccatatctgccgattatggtggtcgctgctcttgacgccctgctgggtgccgcgcgagcctatttcgagcgcagcttctccgaccgcgtgttcgtgatctccttcctcgccaacgtggtgacggcaacactgctcgtgttcctcggcaaccagctcggcgtcggttcgcagctgcagacggccgtcatcgtcgtactcggcatccgcatcttctccaacgtgtccgcgatcagacgcttcatcttccgaggctgacaagggtactgacgtatggcacgtaaagcacaatcagacaacatgctggagaaaatgcgcgaccagcatgcacaagacaaggtcaacgaccggatggaaaccgggtcgttccccacggtgcgcaagaagccccggaaggatctcaaccgggccagcaacaaatcacggctactatcctcgattctcattgctctgatgtgcgcgctgctgggtttcgcctacatgagccagatcaataacactaaatccacgtacgaaacgatggacgagagcgaactggtaaggctgctgaacgagtcgaatacgcaaatctcgaatctcgagcagcgtaaaacccagttgaacagccagctcaactcactgaaatcggcggctaacgagcaggagcaggcgcgtaagatcgccaagcaaaacgaagagaccagcggcttgatctccggcagactcccggcgaagggccagggcgtgaccatccggatcggacgaggctcgacgactaaagtggacgcctcaatcatgttcaacctcatcgaggaactccgcaatgccggcgccgaggtaatcgccatcaataacgtgcgcgtcatcacctccacctacattcaggacgccgaggaaggcttgatcgtggatggcaccaccatcaagcccacatacacggtgaaggccatcggcaatccgcaggagctgtccaacgcagtcgatatcgccggcggtgtgggcgctcagctccaggtgaaatacggatccaacgtcaacgtgcagccttctgacagcatcattatcgacgaagtacgcgaagctacgcaaaaccagtatgcaaagacggtagaataggggattatgaccaacccgattcctagcgcaggcgaaaccaccattatcggcctgcccgcgattaatgtactgcccattaccaccaccggcgatcgaccgctgactcaagaggatctggacaccatcaccagattgtccgagggaacggcattgctgatttccgccaggggagcggtctcaggttctcgttacttgcttgacgaggatgaaatcaccgtcggtcgtgatccgcgagctgatattctgctcgacgactccaccgtatcccgtcagcatgccgtgttccgcagggtcaacggtcagttctttgtggttgacgcaggaagtctgaacggcacctacgtgaaccgtcagcgtgttgatcaggcgtcgctgaagaacggcgacgaaatcatgatcggtaaattccgtctcgtgttcttcacgaaatccgccattatttcccaatagtccacacccagcacggggttagactgattgcagaaattgcaatcatgtgattacaccagtgtgagtcacatgcgagacacgcatgagttaggggagtgccatgggacagacagggctgcatcttcatgtttcgcttgaggaccgtcagaatctgaacgctgacgcgattcagggggagttgttctccaatgtcgatactgaggagatcaagcgcggctaccgtggcactgtggcctccaaggtggccggcatcacgtaccgacagctcgattattgggcacgcaagcagattgttgagccgtccatcacgccgtctcatggctccggttcacgccgactgtactcgtttaaggatgtggtgattctcgctgtatccaagaagctgcttgatgccggtgtgaatctgcagaacgtgacggcggccatcggattcttgactcaacgtagcaccgatcagctggccaatgtgaccatcatgtgcgatggtcaaaacgtgcacgaatgcactaccagcgaacagatgctcgaactgttgcaaagcggtaaggcagtgttcgccgtgtcggtgggttcgttgtggcaccagattgagacggccttggaacaggaagaatatattgatcttgaggctaagccgctgacgactgccacgggccgcccgattgatgaactgactgccatgaggatgcgcaagaagctcgaggcacagcgcttgcaacgcgcaaccgcctgatacatgtatggttgttggcgacttgccggctttggtcggcaggtcgctttgttgtatgtgttgcttttgttgcctgccatcttatgtttttatatgttgcggtgattattatgactgattggaggaccgggtgaacgggattgttgtcggattgttgccgggcgttctgtggatggtcgccgtcatctttgctgtgtccatcatcactataacggtcagccgaggccatctgttcacgccgaaacgccggcgaccgccggtcgatccggtcgactggtcgatggtgaaaacgcatttcatgtcgtttgcggcggcgctgattccgtttcccgtgttgacgtttacagcggatttgatggatgctcgcatgctcgcgttctacgaccacgcgcaattgcccggagcaatcatcatattcgtgctggtgctgctggaactcatcgccatgtatctgcaggcacgcaacgcctcagaaaccgaaatggacaagcgtttgggcgttgcttctcaccggaataaggatgatgttgcgaagtagccgattctctgcggcgaggctaatccgcagctagatactactggttcggctaaaatcaccacatactattaaccgataatgtacgttatgtcagattagttatccttgacgaggattcagtcgcctgtatcaactagtccacgcataccagaccgacagccaaaaggccgacagccaaaggagcaccggagcgaccaccgcaattgcaagaatcgccgtgcctttcagccaatccttgtcatctcgtttccagtggaatgctcgccaaatgaaccatatcagcatgggaatctcatacagcgacagcaatggcaaaccgatgaaaaccaggtcgaagcccgcggcgcaggctccatcgcatcccatcatgaagaagtcctcgccgttgtgtttcagtgcgtttggaaataacggtttacggcgtcttcgagctgctcaggttgctcaataatttcgtaggcaccgtgttcctccatctcaccggccggagcgtagccccagcggcagccgatggcgtccaaattacaggcgtgggcgccgtcaatgtcggtgtagcggtcgccgatcatcacggctctgtcccccgctgcagcatcaaaaccgattttgtcgaagcagtaccgaatcacctgatctttgtccagacgggaattgtctttggaagcaccatagatgccgtccaacagttcggtcaggtggaaatggtcgcagataggcatgcactggtattcgggcttgcagctggccagtgccaggtagtaaccgtcggcatgcagtttgagcagctgttcacggatgcctgggaatacgacgttcaccagtcgtccgggcaccttgttgccgggctcgttcggatcgtcgaacacggcacggtctccgtagtagctgcggtagatgtccacggcccgatccagatcttccgcaggcacatgattgcggcgcagagattcaataatcgccggtccgatgaagcgtcgcagttcggcggcgtccggaaccggtcgaccgatctcttcgaaggtcttgatgacggagccgataatgccgccgtcggacttggtaagcgtgccgtcgagatccaacaggaccactttcatcggatgctgtgccattgagattccactcccccttgttcatgtcgactgctttgaatggtcgtcaaacaatgcgacttgttccaacaatgattatgcccagtcgggatgactgggcatcaagttcacgtgttgttcagtaggagatcactcgtagtcgggaatccaaccgtcacggtgcatttgcaggcgcttttcgagcagggtggccagttcctcttcgctacggcgttccagcagcatgtcccagtgggtgcgggtgggtttgctgatttcgtcgccctcacggtcggcgtcgccctcacggtgggccacggaaccacaacggcactcccactcgtccgggatttcggcaccctcggcaaacggcaggatggtgcggtggcccttcgggcatacatacgccacatcgtttcgcgcggcgaaatcgacgttgtcgtcggactccagcgatttcgctccgatgctcatgcccctgaggctacgttctgccatatcggcatcctccttgaaagatcttcaaccctactaatttacgcaacagttcggacttggccgctattccaagcttccgacgtcggctgacaaactcccgtcaaacagccccgtcagtccacgccggagtaggccaccacgccacgattgacccggtcggccgcttcgtgggcgaggcctgccagccgctctcccccgtcgaacggcagcggctgggcgacagcaatctgctgcagcacgtcagccagtcgtttggcagtgcgcacgaagtcgccgccggtcatgtcggtgccgtacaggcacgatcccagcgaaccgccatccgcccattcatacatgatgtcgagaatgccgaaatccggccgctgcatctcgtccagaccgtgatcctcgcacaggatatcgatgtcttcacaaatgcccttgagcttggacgaagcgatggcgatgggcccggagatgccgcccgggtagtgcctcggttcgccgtctcccccgcgtctggcctcgtataccagtgaagagagcacagcggccagtccgttggcgtcgagcttgtcgaacgtgccggcgagcagcgcctcgcacagttccaggtcatgttcactgtagatgcggcgcagcagcagacctttttcagtcaacgtcatgtcaatgtggccggccgcattgacatgacgttcgaggtaaccaagcccggtgagaatatcgcagatgcaatcgaactggcgtgccacagacccggtgcgggagtcgtagcgatcggtgacgcgctgcagttctcgagtctcgcgggcccagcggtggccccatttgaggtgttgctggaggtccgggcagttgcggcatggatgctcgtgttccgccttgcgcaaatcgcgaatgcgctggtcgaggttctggaaagcgcgtgaacgctcctgatcggtcaggaacacttcgtgcttcagtttgcggcggccttccttttcgatgtcgctcagctccatacgcagggtcatgaactgtttgaagtcgccgtgttcgcatgcgaacgcctgttcgtatccggccagcgcgttcttcagtgtgttaatctgcgattccagctgccaggccgattcgttggcctcccactgggcaaacgactggtccagggtgacgcgcgcggtctcgtagtcgctggagttgagcaggttcacggccatgttgaacgtgggtcggaagctcgagtgcagcgggtagacacgcttggatgacagcgaggcggccgtggcgggcacaaaaccgtgatggtcgaccacgatggcgtggccgatggtgtcgatgccgcgccgaccggcacgaccggtgagctgcgtgaattcgccgggcgtcaggcccacatgacctgtaccgtcgaacttttcgagtttctctaccaccacgcaacgggccggcatattgatgcccaatgccagtgtttccgtggcgaacaccattttgactagaccttcttcgaacaatcgttcgactatctgacggaacagggcaatcatgccggcatgatgcgaagcgaagccttcttccaatgcaaagcggaacttggagaactgcagggctttcaggtcttcctgagtgagttgcccctccaccatctcatccacgatgcggcgaatcctggtcacttcctcatcggtggtgagctccagtccagcgttgatacactgttccacggcctggtcacagccgttgcgcgagaagatgaagtagatgccgggcaacattcccaggaagttaagctcgtccaccacggcccagcggcgcggggtgtggcgttccgctttcggggcacggtctttggcgcctttgccgccgcggcctctgccgaagcccttgcgcttatcggggcgttcctcgccgcgccggcgtgcggccttgcggtccaactggtcgagccggttgatgagttcggcgttgagtttggtggtctgctcgccgttgccgtcgcggcgatagaggtccagcacctcgggctcggtgtgttcgtccgcctgcacgatgacgtgctgttccaaaggcacggggcggtgttcgctgatcaccagttttgtgtcgcctcgcaccgaggcaatccagttggagaaatcctccacgttggacacggtggcggacaggccgacaatcttgaccgtcttgggcaggtggatgatgacttcctcccacacgggcccgcggaatcggtcggccagatagtgcacttcgtcgagaatcacgtagcgcagtgcgttcagcgtggtggaacgctcgtagagcatgttgcgcagcacttcggtggtcatgaccacgatgtccgcctcggaattgatcgaggtgtcgccggtgagcaggcctaccttgtccgggccgtacacgtcgaccagatcatggtatttctgattgctcaacgccttgatcggtgtggtgtagaaggctttgacgttgcgttcctgggcgaggtaaatggcaaaatccgccactacggttttgccggcaccggttggggccgcgaccagtacgttgctgccggcttcgagcgcgtcattggcttcggtctggaagtcgtccagttcgaaaggcagggattcggcgaatcgcgctgctgcggacgcccgatggcgttggaccttttggaatgatgcgtaccgctgcgaagggctcagcgtctgggaatcggcattgcccttatggtgttggtgacgtaccattgctgctttccgttagttgttgaatcgcttccagcgggcccacgcctgggtgtggcgttcgcgcttggcggccttgctgcgaatcacgttcgcatgggcctcggcataacgattctgtgccacgctgagcggctgagtgaacagaggcggctcgctggtgtcggcagaggtgccgggctcccccatcgcggccacgcgttcaccgagttggccgccgatgtcggacatgtccttcaaggcacggagtccatgaagggctgcatagatgagtccggcaacaatcatggccagcatgaacagggccagaatcagccatatccaccaaggcatgaaaggctccttacttgttctcgctgatgctcagttcgcgttcggcgcgtgccacgatcatggtgcgcaacgtttccggggcgaccgccgtgatatgacgcgcgtgggcgatgcagaaggccacgaaccaggaatcggaggaaacggtcagatgcaccttttcaccggcaccgcattgttcgacggtagcgcccggcaatgtcttgatgaatgccagatcgcgctgatcggtgatgaacaccgcgtcggtaccgttgtcgaaactccacttgcgcagttcgctcaccggcatgttcgggatgttgatctgcttggtgggcttgaccagttccgccttttcgatacgggccaatcgcagtacctgccagatgcgcggcttgccgttggccttgtcgagggtcttgtctttggagacgtaggcctttttgtccttgggtgcggcggaaccaacgtccgtgtagacggcggcataatacacgccttcgtcaatgaagatcttggcgggggccaccagcttgcggcgggtacgacctgtaccgtcggtgtactccatgtccaacagcgaatcggtgttgatcgcacgcttgacgatggagaagcttcggggctccagctcatagccggtcaggctcagccacggggtctgaccgggactgacatgacggcgcaaacgctcatacagggattcggcctgcccacgctgcttgtccggcagcaacggcgaatgcgccaggtagctgaccgaggcggtgagcatgctgaggtattgcggcgaaatgccggcaagacgttcaaggcccagcgaattggtggcggaaacaataccctcggcatccagcagcggccagtcaatatcgaagaactggctgccggccatctcaccatcgtcggaaacggtggtcagggtgttgatgtccttatggatgatgttgacgaatttcttgagttcatcatcgttctttggcttgccgataaagcgttcgcccagctcgctcatcgagaattcctcacccagatgagcggagaggaacagcatcagacgcaggcgacgatcaacctcactgcccgtttggaaagcggagccgttcttcttgttctgagccttgatagactcgggatcacccggctctcgcacatcgcgactaatcgacggggaaaccaccgaagcgctcacaggactggcggattcgtcggccagagtgaaccggctggcggcgtgcaaacggcgatgataagcgtccacagcctcttgcgggctgacaatcgtggcccccggatgctcaagcacaaacatggccaaatcgtcggaatcggtgtatgccacgttcaggtgttcgccatccacgtcaacggtggcggcgaaacgacgcgaatcaataaccttgaccagtgaatccggaatgggctgcgtccccaagccaggcgcaatcgaatccaagccaagcccgggaatcggggtctgcggcacacgcggcgtagtgcgcgacacatgctgggtgagctgggactgatccggctcggaagaaatcgacatcgaacgagccagatagttggcggcggcaagcaccggcatatcttccggctcgaacatcaggcggatgcgcggttcgtcgcccaactgcagacgataggacgcgaagtcctggccttccgacttggacgagtactcaggctgccgtgattcgatggcaatgcccatcgcagcgagcttggcgcgatcacgctggaactgcttggcgaacgcggccttggcggcctgatctgccagctctccatacgagtcggcgtaagccttgacgcgctgcgcaatttggcgggatgtgagccattgcgggaacgcggatgacaacacagccagtacgtccagctcgtgcttgccccatttgtcggaaaaacgccgacgtccgcttgtgccctctgccattagtcctcacgtatagttattgtttcgttataagtgcgtatgagtttccccacactcactctatcttagaggctttttccacagttgagcgccatttcacaaaaataatatcttttttatcgttcgaccgtgttgtaaatcacacccaatcgtccggttcgatgccttgcgggccaacgtattcgccgttcggcacgtagctcggctcacccttatcttcaagtttggcgtcggcgaacatcatgacgtcacgtccgaatgtccagtcgccctgaatggaaaccgagttggctgcggccaaagatggcacggcgtaggggaaccgttcgtcgaaatcgcggatgttcttgtagtatcgcggatcaagttcgacgttcgggaagatgtaattgccgtcttccatctcatacgtgtccgtcaggtggaagcgatcggaacgcataatgaacaaatcattggtggttttcaccggaaggaagcgcatacgatccacttggacgcagatagaaccgttgaacagaccgattgcggcacccatggcggtttccagctgaatcacctgttcggagttcgggtccgtgggattcacggtctttttgttacgaatcaccggcaacggcaacacaccatcgcattcggcgagcttgtctttcaaagcgtcgatgcgaatccagatcgagttggtgttgaagtaaggatgcttggcgatgtcttgggccgcttccttatcatccggatggacctggctcatttcacgcagtatcaggcgaccagtggccttgtctcgcacgatatggcctcccttgcgatcggccttggtgcggatagccacttcggccatgaacggggcacctgtgttttcgaagtgctgggccaacgtacgcgaggggcgtgcaccgagattgtcggaattggagatgaacaggtacttgaagccgcgctcctccaatacgtcaagcaggccggactcccagatggtggagaacaggtcgccgtggccgggcgggcaccattccagctccgggttcatggggtagctcaccggttcgccggtggcggccacgagtttgggttcctgatgctggatgatttccatcggcacgtcatgctggctgaacttgcgatgatgcttgagcgccttcatcgtgtccgccgaagtgcggaaagaattcatgaacgtcagcggcagttcgacgttcaggcgggtgcgagcggtaagcacctgaccgatgatgatgtcgatgaagcgcatctgcttggccttgtgcctacgcaccggcaacagcgacttggccttgtccaatcccatggaggtgcccagaccgccattgagcttgaggaatgcggtcttggcgaaggcgtccacggccttgtcgtggttgatggtctcatagacgtcgtggaagctgggcacgtggccaagcggctcgatgtcgtcctcacgaatccagctggaggcttcttcatggcgccatacgtcatacaaatggcggaactggttgatggcggtttcgctcatgccgtgctcgcgcatcttggcggccgaaagctcgaaagtctcatccacttcgggggtgtttacggtttcttcggggatatccgaggtgacggcgtcggtgtcgtcagcggcggcgatatccagttgggccttatcgtttatttcggtcaattcgggtccctttcatcaaatcaataggaaccagtctagcccctgtttggggcaaacacatacgacggggggcggaggcggtgaattgtcggtgataattccaataacacgccaagatgaagtccgtgtttaatccattacgaatggcttacaaaggtaagtccgtcgtcatgttgtctcatgttgtctgaaaacggaaaagccccggaaagcaaccactcagaagtggcggaattccggggctaatcggtcgggccggcgggatttgaacccgcgaccccttgacccccagtcaagtgcgctaccaaactgcgctacggcccgatggtgcaaaagcaccgagtagataatctaccagatatatgaaatctggcaaattacgcgcgtgtcacttccgcttcttcttctcgcggatgttcacggagatctgaatcggcgtgccttcgaagccgaattcctcgcgcagggagcgttcgatgtagcggcggtagccgtgctcgaggaagccggtggcgaagatcacgaaacgcggcgggcgcgtggacgcctgcgtggcgaagaggattcgcggctgcttgccaccacgcaacgggtgcgggtgggcggcctggatcttgccgaggaaggcgttgagcttgcctgtaggaatacgctgatcccaggattccaaggccttatccatggctcgcgtcagacggttggtgtgccagccggtcttggcggacaggttcacacgctcggcccacatcacacggtcgaattcggtgttccacaggcgttcgagacgctgcttgtcgaactcgtccatcgcatcccatttgttgaatacgagcacgattgcacggcccgcatccacggcggtggacatgaccttcaaatcctgatcggataccggctgcgaggcatcaaacagaatcagcgccaattcacagcgctcgatggcggcctgcgtgcgcagagaggaataatattccgcgcctgtgagcttgtgctggcgtcgcttgatgccggcggtgtcgatgaacagccagtcctcgccatcgatgttgacgatttcgtcgacggggtcgcgcgtggtgccggccaaatcgttgacgacggcacgttcttcgcgcgccagctgattgagcagagacgacttgcccacgttcgggcggcccaccagagccacgcggcgcaggccggaaggcgtgaggtagccggaagtcttctcggcctgcttgagcttgtcgagcgcgacgtccagcaggtcgcccactcccctgccgtgcatggcggaaatcgagtatggttcgccgaggccgagtttccagaattcggcggcaaggtattcgctggcctggtcgtcgatcttgttgacggccagcacgacaggcttgccggcggcacgcagcatcttgacgatgcgctcatcggtggtggtcatgcccacttgcccatcgaccacgaataccacggcatcggccaaggtcacggcaatctgtgcctgtgaggcgatggcggattcaatgccttccacgtcggcttcccagcctcctgtgtccaccagcttgaagtcggtgccggcccattccgcgtcatagctcacacggtctcgtgtaacgcccggcgtgtcttccacaacggcggcacggcggccgaggatacggttgaccagggatgatttgcccacgttcggacggcctacaacagccagcacgcccaccggcttgggaccggccttgcgcgtgccttccgtgaaaccacgaccggaaatcagatcctcatcgccttcgtccagctcatagccttcgagattggcggcatactgctcgtattcttggttctcgatggcgtcctcgaccacaccgatgagcagatcgagcgtgtgggcgaagtccagatcggaattgtcgatggtggtaacgccatcggcggcggtcaggaagctggtgaccttggaatcggccttgtcgcgcgcggccacatcctcagcgcccacgcccttgacagcctggccggtgcgacgggcctgacggacctcctcacgggcggtcagcagcacgcgcacctcggcgtccggggacaccacggtggtgatatcgcggccctcggccacgatgcccaaccccccggagaaggagtcggccgacgcctcgcgggcgatgtaggcgcgctgggcggcgatgagcacgttgcgcaccgggatgacgttcgacaccttggagacatggctggagacttcggaggaacgaatggcctcggagatgtcctcgtcgtcggcgaatacgcaggggttgtccgggtccacggagatatcgaaatggtcgccggtgaagaactcgcccaccgcttcggtgatgacacgctcatccacggtttcggcgtccagatcgatgccctgcttcaggcaccaccaagcgcaggcacgatacatcgcgcccgtgtcaaggtaggcgtatccgaaatacttggccagcgccttggacgtggacgacttgcccacgccggcggggccgtcgatggcaacgcgaatcacaggccaacctccttggacagcgaacggacttccgtctgggacagcacgcggtaggaaccgggcttcaaatcaccgagtttgatcgggccgatctgggtgcgcaccaagcgcttgaccgggaagccgattgagccgaagatacggcgcacgatgcggttcttgccggagtgcagcacgaccttgaccatcgtgtggtcgcgtgaggagtcgatgatcgcgcagtggtcgagcttgatccagccgtcgtcgagctgtacgccggtggtcacgagtcgacggcatacggtgccggagatcttgccttccagtgtggcgacgtaggtcttttcgacctcgtacttggggtgcatgacgtgctgcgagagttcgccgtcgttcgtcatgaggataagaccctcggaatcgtagtcgagacggcccatgtggaagatgcgctcgtacttgtcgcccacgatgtcgcgcaacgtgtagcggcccttcgggtcgtccatggcggagagcaccttgcggggcttgttcagtgccagagtgacgtggttcggattgacgcgtacgcgcgaaccgtctacgcgcacctgctgcttatgggggtcgacgcgagttccgagctcggtgaccagttcaccgtcgacctcgacacggccttcggtaatcatgtcctcgcacttgcggcgggaaccgaatcccgcttgggcaagcagcttctggagtcgaatggaattggaatcgtcttgcgctttcgcagcgcgggaatatgcgtttggcatcgttctcccaacgtggccggacagactctgtcatcgcagagactgtcgatttgtatacatacttcagagttggcggactggaatcccagccaattccaacctatatatcataccgcaacgtaggactgctgctagactggcaaccgtttgtgcgggttcgcccgtcttccaacagatgaaaaggaatgaacaatcatggaagaaaccaatcaacagccgctggctctgcgcgtgtgcgccgaattggccggcagcttcctgctgtgctttgccatttacgccttctccacatggggttcggccgtgtatggcatcaatatcgtgttcttcgcgttggctaccggcttggcatatgccgcagtcaccgccatcttctcccgcgtgtccggtggccagctgaatccggccatcaccgtagcctctgtgctggtttccaagacgaaaatcctggatggcatcctctatgtgatcgctcaggtcatcggtgccatcgccgccggcttcgccgtggtcaagctgctgcccacatccgagcaggtagctgccaaagtgtggctgactccggccgttaacggtttcgagaacggctccgtgtcttactcgctgctgacccagtatggcattacgttctcgattacgctggcgattgtcgtcgaggtcgttgcctctctgattgtcgttgccaccgccatgtcttctctgggtgatcacggcgagtcctcggaccgtcatgtcattgccatgggtcttgcctatggtctggccgccgccatcagctacccggttaccggtgccggtctcaatcccgcccgttccaccggtatcgcactggccgcgatgaatgagggtcttacgcaaaatccgctgcaacagctgtgggtgttctggattagcccggtcttggctgccgctgtggtggcgttggtcatgatcatcgcgcagatgatgaccactcccaaagtgccggctgccgccgatcttccacagacggatgccgatgcgaacgcggacacgctcgacgatggcgaattcttcgatcaggccgcctcgtctgatggcgattcagcggaaaaagatgttgccgaagagtccaaagaagctgaagtaggtaatcagcaggccgattcccaaggcgatgccgatgaaggagtcgaacgccactgagcgcactttccatgggcttttgtcctgaagaatcaggcgaacaagcccggtgatgatggccgtcacggcaagtatgaccgtggcggccatcgtatatccgaaagcaaccagcagtgtgatgacggcgacgacgccgagtacgcaccattcaaaccatggcttgccctcatgcgcttcggatacatagggatggttgtgcatgttgcgattccttctgtcgaacggttacgtgaccacaatagcaggcgaatagcaaaggtgggattccgcttggacccgttgacgggtcaggcggaatcccacctttgtgcgttttggctgagctgctcccctcagagagtcccgatcagtggaagaagtggcgggtgccggtgaggtacatggtcacgccggccttcttggccgcttcgatgacctcctcatcgcggatggatccgccgggctgcacgatggccttgacgcccgcgtcgataagcacctgggcaccatcggcgaacgggaagaacgcatcggatgccgcgaccgcaccggtggcgcgatcggcaccatcggccagcgtgttggcgcgctcgacggccaaatggcaggagtccacgcggttgacttggcccatgccgatgccgaccgtggcctggtcgtgggccagcaggatggcgttggacttcacgcagcggattgcacgccatgcgaacacgaggtccttcagcgtgtcggcgtcggcggcctcgccggccacgagcttccaggcgtccggatcgtcgccgacggcgttgatcagatcggtgtcctgcacaagcaggccgccatcgatctggcggatggcctcgtggcccttcggcggctcggccaccttgaggatgcgcaggttcttcttcttggtctgcagcagttcgagcgcggccggctcatagtcgggggcgacgatgacttcggtgaaaatcgggcgcacgctttcggccatctcaagagtgaccttggagttgcaggcgatcacaccgccgtaggcgctcatcgggtcgcaggcgtgagccttcttgtgggcctcggccgcggtcgcgccgatggccagaccgcacggattgttgtgcttgactacggccacggcaatggcgggagccatatcccatacggtgcgccaggcggcgtccgcgtccacgtagttgttgtagctcatcggcttgccgccgagctgctcggcgtgggcgaaaccggtctggttgagcgggtcaatgtagagggcggcctgctggtgggagttctcgccgtagcgaagggtgtgggcgcggtcccaggtacgggtgaatcgtgccgggaacttggcggaatcgacttcggtgccctgatcgtccttgtccacttcggcggtgtccagcgaagccggcttcggccagtgcttggcggtccattcgttgatggtggcgtcataggcggcggtgtgggcgaatgccttggcggcaagccacttgcgctcgtcgagggagaagccggtgccgtcggccacacgctcggcgaccaaggcgtaatcggccggatcggtgacgatggccacggtggcgtggttcttggccgcgccacgcaccatggaggggccgccgatgtcgatcttctcgatggtatcggcctcgttggcgccggagcgcacggtgtcggcgaacgggtacaggttgacgaccaccaagtcgaacggcttgatgccgaactcctcgagctgcttggcatgctcggggttggtcatatcagccagaatgccggcgtgaatgtacggatgcagcgtcttgacgcggccgtcgaggcattcggggaatccggtgacatcggacacctcggttaccttgacgcccagctcggcgagcttcctggcggtcgaaccggtggaaacgacttcggtgccggccttcacgaacgcttccgcgagtacttcgatgccttccttatgaaagaccgagaccagtgcccgacggatcggtcggttcgtgtttgtcatcctgttcctccttggattcttgtggttgtgacgccagggaccgcgcctgacggacgatgacggtcttcggggtcgcggcggtggtgcgggaatcattgatcctcccaaccaaccagcctatcgaaaaaacgagcgctgtgccaatcagcacgagcagccatgccgcggtaaatcccaatgcggtcgaatgaccgacgactctggtggaggccatgacgtcgacgccaatgtgagcgagacgatgatcgccaagcgatccattggacagagcgaacagcaatgtggatgccagtgagatcagcatcgcgctcaggcagaatgacccggcggagtagatcagcgaaaccagtactgggccgcgggtggacgcattccgtatattcaacggtctgcaggcgaatccttgcggcaggaatacagccagcaggcccacgagcgcagcgatggcgagaggcgcgttcaaggcaacggtacgccatagttcgctgctgaccggttcgggcagaataccgaataccggtattgcaggaagctctttggattggccgagccataacgtgaaactggccaaatcaccgatggcgaatccgccgccgaagagccaggaaacagcccagagcatgacgttgggtagccagatcagcatggcgacggtggtgagaattcgtgaaccggtttccatcccggacaattcgaacaacgatacgacagcggcatggttgcgtaccgaccatacgatgacggtaatcaatccaattgccaggtatatgcccagtatcgcgacggccaagacgacgccgattttcaggcagtggcgtatgtccgccggcacctgcttgcgaatccagtccctgaatgctcgcatcttggctgattccggtacggctgcgcataggaaaccgatcgagaatacgatggctgctttcagcaacaccagccactggtcatcgacaagacctaggtgtacggattgccggaatgcctcgttcaacccgagccaaacattcaatccggcaacatacgcatgcggcccgtatgctttgattcgcatggtgagtgcattgatcagccatatcagcagtatggtcaacatcaatggcgtgatggtgagggtgaacgaatcggttctagagcccgatccctcactcagaagcacaacggcctgtgtcagcgaggttgtgccgacggtgagattgtcgccgccctcttccatggagacaaccaataacatcagcgctgtatagcaacctaatgcaacggcatagatggccatggatgcgagggcgactatggctccccgcacccattggcgaatcacggctttcatcacgattggttggaaccgatcagtcgatgttggccttggcgagtatgtcgcgcatgatttcagcggcctggcccggggtcttgcccacggggatacccgccgcttcgagcgcgttcttcttgtcctgggcggtgcccttgcctccggagacgatggcgccggcgtggcccatctgcttgccttcgggggcggtgaaaccggcgatgtaggcgacaaccggcttggtcatgtgctccttggcccatgcggcggcgtcctgttcggcgaagccgccgatctcgccgatcatcatgacagccttggtgtcggggtcggcttcgaatgcctgcagggcttccagcagcgtcgtgccgacgatcggatcgccgccggcgccgagacatgcggtgaagccgatatcggacagttcgcccatgagctggtaggtgagggtgccggatttggagaccagtccgagcgggccgcggccgacaatgccgtcggggatgatgcccaagttgacgccagggttgccgagcgtgatgaaaccggggcagttcggtccgatgatgcgcacgcccttcttgagcgccagttcgacgaagtatgcggaatcggccaccggaatgccttcagtgatgaccacgatgagttcgatgccggcttcgacggcttcgaccacggcggacttggcgaacttcggcggcacgaacaccacgctggccttggcgccggtggcttcacgtgcttcgccgcaggtggcgaacacggggatgtccacgtcggcaccgttcttggcaccggggaaggtgacggatgtgccggccttgcgcgggttcacgccgccgacgatattggtgccggccttgagcatgcgagccgtgtgggtcatgccctgatggccggtcatgccctggacgataacgggagcgccgtcttcgatgaacagcatcagcgaacctccttggactgggtcgcctcaccggcgagctgcgcggccttggctgccgcgccttccatggtttcggacacatggatattcggattgttggcggaagcgaggatatgcagaccctcggcggcggcgttgccatcgaaacgcacgacgatcggcttggaaccgccgagcttggcgaccgcttcgaggatgccgttggcgacttccacgcaggaggtgatgccgccatagacattgatgaacacggattcgacctgagggtcggacagtacgatctccaggctttcggccatgacggctgcggaggcgccgccgccgatgtccaggaagttggcgggcttgatgttggtgccctgttcctcgccagcgccggagacggcatccagggaactcatgacgagtcctgcgccgttgccgatcacaccgacctcgccgtgcaggtgcacgtagtgcaggccgtgttcgcgggcgcgctgttcgaaggggtcgggaacgatgagatccacgaaacgcgcccagccatcatggcggaaggaggcgttgtcatccaaggagatcttggcgtccaaggcgctcagctgcttggtggattcgtcatccgggtcgccgatcttggcgagcggattgatttccacgagcgtggcatcgttgtctttgaagcagcgccacatcttgagcagaatctgtgcggcctgatcgacgtccgcgtggtagaagccgatgctctgtgccatttcggtggcagcggccaggtcgaagtcgccgagcgcatcgatgtgcaggcgcttgacggcctccggatgttccttggcgatttcctcgacttcggtgccgccgttggcggtggccagcacgtcgaagtcgcgcgaggtgcggtccacggagatggacacgtaatattcgtgcaggatgttcttggcttcggccacaagcacgccggaaaccttgtgcccgtggatggtcatcggcaggatggactcggattcaagaatcgcctcgtcgcggttatgggcgatcttgacgccgccggcctgaccacgatgaccgatcttgacctgcgccttgattacgcagggatagccgattttgtccgccgcttcggcgacttcatgggagttctgggcaaagatggcgtccggggtgggaatgtcttgttcctcgagcagctgacgcgcctggtattcgtaaagatccatcgatccttccctgactatgtaattggtccggcatataactgtacacagtacatgccggaccttgaaaactaactgtacgttgggtgagacggaatctcaggccggcatcgcgatcagcgagctgctgggcttgccgccgagcttatccagaccgtcgagaccatcgagccgcatcacaaaactgaagcccaccacagtgccgcccgccttttcgataaggtcggcgccggctttggcggtgccgcctgtggcgatgagatcatcgacaatgagcactcgctcccccgcctgtacggcgtcggtttcgatttcgacgctggccgtgccgtattcgaggtcataggattcaccgatggtttcgggcggcaatttaccggccttgcgcacggcgatgaaacccttgcccagatgggcggccatggccgggccgaacaggaacccgcgcgattcgagaccggcaatggagtcgaattcgctcggggacaccggcagagccgtttcaagcgccttgagcagaatcttcaagcccttggggtcggcgagcactggcatgaaatcacggaagataatgccttccttgggaaaccccggtatggaacgcaccaaggacaccagatattcggcgtcctgttgccctaccttgctcaatgcgtcgatggtgatgtccgactgtgccatagtgctcgccccttttatgcctttgcgatgcgatactcggatggtgctaccgaatcgaacagcttacttcgtcttggtttcgttgtcgtcaccggtctcgtcagcggtgtcttcctcggacacgacggacgcctcgatcggaacctgaccagcctcatcgttagccggagcctcggtgtcttcgtcgggcagcgggttgccgttctcgtcgacctcatcatcggacacataggccgggcgggtgtactcacgggcgatggcgttgaagccgaaacgcagcttggagccttcggagtcgatgacgatctcctcatactgctcgtcgacttcgacgaccttgccgatcacctggccgatggtgatgacctcggtgccgggctgcaggttgcgacggaagtcctgcttctcctgctgttgctgcttggccttcttggactgccaccacatcatgccgccgaacacgacgacgatcacgatgagcataatgtactgttgttccacgaaacaactccttcaaacgagcgacattgacgaaacgccgccaagtgtgcaaacaggagaaagtctagaagagcttgctgacatcatctttgggcgtaattcccaaatgctgccatgccttctcggtagccacgcggcctttgggcgtgcgaatcataaaaccttcgcgcacaagatacggctcgcacacggtttccacggtttccgattcctcgcccaccatggccgccagattgttcaggcccacgggtccaccgttgaagttgcgcacgatggcattgagcacggcgatgtccagccggtcgaggccttcggagtcgatctggtacagggccagcgcctccttgacgtcgtccggccgcaccacgatcaggtcgtggacgatggcccagtcgcgtacacggcgtagcaatcggttggcgatacgcggcgtgccgcgcgaacgcaacgcaagctcatgagcggaacccgcatcaaggtttacgcccagtacgttggccgaacgttcgatgagcttttccaactcctcatgcggatagaagtcgagatgtgcggtgaagccaaagcgtgcgcgcaacgggcttggcagcataccttcgcgcgtggtggcaccgatgacggtgaatcgcggcagggtcagcgggatggagcttgcgcccgggcctttgccgaccatcacatcgacgcggaagtcctccatcgcgatatacagcagctcttcggcggcgcgcggcagacgatggatctcgtcgatgaacagcacttcgccgacgtcgagggagctcagaatcgaagcaagatcaccggcatgttgaaccgcagggccggaagtcacgcgaatcggcacttcaagctcattggcaacgatcatggccaacgtggttttgcccaagccaggagggccggcaagcagaatatggtccggtggcacatcgcgtttgcgggccgcgtccaggaacagttgcagctgggccttgagccgtggctgtccgataaagccttcgagaacatgggggcgcagctcctcgtcgctgaccggctcgttgccgatcggctgggaggagaccatgcgcaacgactcttcgttggcaccggtgtttgaggtaccgtaatccgttgtctcgctcatcagcggcccctatccatcagcgccaaagccagacgtagcacacgcggcacatcgtcggtggcaagcggcgtgggaatatcgttttcggcgcaagcctcggcaacggcctgctgggcgtcctgctgacgccagccaagtgaaatcagtccttcgacaacctgttccgtaccggtatccaccggagacttggatattgccgcctgagcggaagcaccctcgatctgactcaaatcaatagagcccttaagctcgaggatgattttctgtgcgcccttcttgcccagccccggagccttggccagcgcggtggcgtcgttgtcggcgatggcgtgggccagctgactcggcgtcagtgtggagagtaacgattgggccactttaggtccaatgccggagaccttgatgagttgcagaaaggttttcttggcgtcccgatccaggaatccatgcagggtaatggcatcctgagagaggttcatataggtgaagacgcgggtgtcttgcccggcgtgcagacggctcaggtcggtggcggacatgcgcacttcgtagcccactcccccaacatcaatcaatgcggtatcggtttcgaccgattcaacccgcccggtcagcatgccgatcatacaggtactccttcagggctccaggattcaagactcgaacaactgttcgaaagtatactacatgcctcggtcgtgattgatgcggcggcgcgtggatttctgtgcggcctcagcccactggcgttgcgcggcggtcagatgttgttcgcgttcgccgccctgcaatgcgcctgccgggcgcagcgcatggcaaatggccaaagccaaggcatcggcggcatcggcgggagtcggcattttggtgaggttcaaaatacgtgtcaccatacgctccacctgaatcttctgcgcctgcccgttaccggtgatagccagcttggcttcggtaggcgtatgcaacgccacgggaatattgcgttgcgcggcggcgagcatggcgaggccggcggcctgtgcggtaccgagtacggtgttgcggttggattgtgcgaacactcgttcgatggatacggcatcgggtgcgaagcgatccattttctcggacaggccgttgtagatgaccagtagacgcagatcctgggtgatatccggtgaggaccgcaccacgtccacgtgaataaacgaaagccggcggtgctcgccggcttcgatcacgccgaccccgcaacgtgtgagcccggggtcgacgccaaggataatcacgaggattactcctcgtcgagctgggccatcacctcgtcggaagcggtccagttggagtagatgttctgcacatcgtcgaggtcatcgaggttgtcgatgagcttggacaccttgcgggcatcgtcgaggctcaactcgacctcgttcttcggctgcatgacctggtcggcggaatcgtagtcgaagccggcgtcctgcagagccttgcgcacggtgaacaggtcggacggaccggtcacaacggtgaacacctcaccgtcatcggtaacgtcctcggcaccggcttcggcggcggtttcgaacagcttgtcgaagtccacgccctcggacggcaccacgatctggcccttgcgctcgaagttgaaggacacggagccggaggtggccagggagccgttgcccttggtcagggtggaacggacttcggcggccgcacggttgcggttgtcggtaaggcattcgatgatgaggccaacgccggcaggagcgtagccctcgtagacgatgtcttcgtagttggcggcgccgtcttcagcaccggcaccacgcttgacggcacgagcgatgttgtcggccggcatggaggccttcttggccttgtagatggcatcgtacagggacgggttgccgtccgggtcgccaccgccgaggcgggcggcgatttcgatgttcttgatgagcttggcgaagagcttgccgcgcttggcgtcgatggcggccttcttgtgcttggtggtcgcccacttggaatgacctgacataatgctcctagcaattattgaaacggatgatgtcaaacgaaacgattgtaggccgttaatcagacatacccgtgatgtttccgatgattgtcttgttatgcgtaccgataagaccggtcacgcggggtgccgcacctgtgttaggcaagcggcagatgatactgcggagccagctgttcgaatgcccgggcataggcttctcgctggtcggacagcagaataggcatggtgcgtgtctgggcgacgatgggcatgaagttcgcgtcaccattccagcgaggcactacatgctgatggaggtgagcggcgactcctgcgcctgctacttcgccctgattaatgccgatattgtaaccgtgcggacgggagacggtttccatcaccttcatggcgagggtggtggccttctcgaattcgaacagttcggcatcgtcgagttcggtgatgaatccgacgtgacggtacgggcagatcatgagatgcccgacattgtatgggtagaggttcatgatggcgaacacgtgcgtgccacgccaggcgatgaggccgtcttcgtcggatttcttgggtccggcgcagaacgggcattccttcgtcttgggcttggttgggcgatcctcgctgttgcgcagcacataggtcatgcgctgcggagtccacagtcgttcgaccgtgtcttcctgaggcggaaagtccgccggattatcgacacgcacgtcagtcattttcgcaccctttcttggctcccctctctgaggggagctgtccgtgaaacggactgaggggagtgcgagccatgcaggactcccctcagtcgcctacggagccagctcccctcagagaagggagccagtaccattcacatcactcagccacagcggcgttgaagtcgtcggcggagttcacctggacgcgcttcttgatgacggtgaggatctgctcgcgggccttgtccaccggaacgccgttgagctggctgccgtcacggaagcggaagctgaccgcgttgttgttcatgtcttcctcaccgacgatgaggatgaacggcaccttggacttggaggcgttgcgaatcttcttgccgaagcgatcgtcggagtagtcgatctcgcaacggaccatctcatcctcgagggacttgacgaaaccggccagatgcggggcgaactcgtcggcaaccggcacgccgagcacctgcacgggggccagccacgccgggaaggcgcctgcgtagtgctcgagcagcacggcgaagaagcgttcgatggagccgaacagggcgcggtgaatcatcaccggacgctggtgggtaccgtcctgcgcgatgtactcgagctggaaacgctcgggcaggttgaagtcgagctggatggtcgagacctgccaggtgcggccgatggcgtcgcgggcctgcacggagatcttcgggccgtagaaggcggcgccgcacggatcgtcgacgagctcgaggttggattccttggcgacctcggcgagcgtgttggtggcctcctcccagatctcgtcggagccgacgtacttgttcgggtccttggtggacagctcgaggtagaagtcggtcaggccaaagtccttgagcaggttcagcacgaaggtgagcaggctggtgagctcgtccttcatctgctcgcgggtgcagtagatgtgggagtcgtcctgggtgaggccgcgcacgcgggtcaggccgtggacctcgccggacttctcgtagcggtacacggtgccgaactcgaagaggcgcagcggcagctcgcggtaggagcgctgacgggacttgaagatcaggttgtgcatcgggcagttcatcggcttcaggtagtagtcggcgcccggcttggtgatgttgccgtccgcgtccttctcctcgtcgaggtgcatgggcgggtacatgccgtccttgtaccagtgcaggtggccggaggtctcgtacaggccgcccttggtgatgtgcggggtctgcacgaagctgtagtggtgcttgcggtgcatctcacgggagtagtcctccatcgcgttgatcacggcggcgcccttcgggtggaacacggccaggccggggccaatttcatccgggaaggagaacaggtccatctcggcgccgagcttgcggtgatcgcgcttggcggcctcctcgagacgggtctggtaggccttgaggtcttccttggtggcccacgcggtgccgtagatgcgctgcatggtcgggttcttctcggaaccacgccagtaggcggcggcggaacgctcgatcttgaaggccttgatgtagcgggtgttcggcaggtgcggaccgcggcacaggtccttccaaaccacattgccatcacggtctacgttgtcgtagaagctgagctccttttcggagatctcggtggcggcggccgggtcgaggtgtgcttccttgtcttcgatcagttcgatcttaaagggctggtcggcctcttccttcagagcctcttcctcagtcacggaacggcggcggaaggactgggaggacttgatgatgcgctgcatgcgcttctcgatgtccttgaggtcgtccggggtgaagggctggtcgacctggaagtcgtagtagaagccgtccttgatgacggggccgacgccgagcttggcgttcgggtagacttcctgcacggcctgggccatgacgtgggtggccgagtgacgcatgattgcgaggccgtcttcggagtcgagggcgatggggtcgacggtatcgccatcgttcagcggcgtgtacaggtcacggttctcgccgttgatcttgaccgcgatgatgttcttgtcttccgcgaacagttctacgccggtggtggttgcttccacctccttcgcttcgccgttgacggttatggagatggtagcttgcgccatgatttgtcctttgctatcggggcccacggtactaatgtgcaggcctggactggttaatcaacgtaggacacgataggttgggcgtgcgacaaataccaccagcatctgaaccaatacgaaaaaaacctcgccgaagcgaggtttcgttgtggagcggacaacgggactcgaacccgcggtctcaaccttggcaaggttgcgctttaccaactaagctatgtccgcaaaggaatccgccgtgagaagcggaatccagtgggcgatgtaggaatcgaacctacgaccccttcggtgtgaacgaagtgcgctagccgctgcgccaatcgcccgaatactcggttcttcagttatatccagtcgaattgcttcgactttcgtgggcgatacaagattcgaacttgtgaccccttccgtgtcagggaagtgcgctaccactgcgccaaccgcccgggtcatatttcatcccattgaattgcttcgctggtctgagaggtgggtacgagagtcgaactcgtctatacggctttgcaggccgctgcctaaccgcttggctaacccaccgtaaggtctgtcaactcacggacctagagcggacaacgggactcgaacccgcggtctcaaccttggcaaggttgcgctttaccaactaagctatgtccgcgtgtgtttccttggcgaggtctccctgccgaagcacgagtgtttactatactcacatgcgtgtagttcgtccagctgcggcgtgtcgcctgtaattgcatactctcgcttatggctaaagcgtgcgcttcgggcaatgaattccagttactctagaggtatgagtgaagcagcgaaggacaccggcgcagtattgatcgccgcattcgagggatggaatgatgcctgtcaggcggcgacgaacgcggtgcgccatctggtcaagcgatatgagtcccgcgagattcgtcatattagatgtgatgatttctatgactatcaggttgcccgtcctatgctgtgccatgttgcgggacgcaccaatcttatctggccgcagaccacgttctacgacatcacgttggacgcaggcaagcatatctatgcgcagatcgcccccgaaccgaactatcggtggaaggaatactgtagccagagtctggccattgccgatgagctggatgtcaatcggatcattacgttaggttcgatgttctccgattgcccgcatacccgcccgttgcccatcgccgtcagcgacggagactgtcaatgcgaaggagaccggtcgtataacggcccggtaggcattcctaccgttttggatgtggccgccgcgcagcaaggttttgctcattcctcgatgtgggtgtccatcccccaatatttgggcagcgacgaatgttctgccggcactatgcgattgctggatgcgttgggcaagcatatcggcttcaccttcgatacggcagatctgaagcagaaagccgaacagtggaaggcgcaagcctcgatactggttcgttgtaatgaccagcttcacgattacgtggagcatttggagcacgactacgacttgcagcagaaagccgaggcggaggcttccttgggagcgccccaggccgaacaactagtcaaagaagcagaagcgtttctgcgccagatgggcaattagcccatatatggtgtgctcccgctggatgaacagccctgtgggctgttcatagcagtgcaccatgtgcacgtcgcacaaaatgtcgggagctggctcgcgtagcgagactgagggtggttctgctggcatattccagtgaccacccccagtcagcttcgctgacggctcccgccagcgggagcaccattatattggagtcgtctatcgacccgtcttatgccgcagccgccacggagggatcgatggccggcagcacgcccacaatcagcagcaaggcgacgaccacagccaaaccgatgcggtagatggcgaaggccttataggagaagttcgatacgaacttcaggaatccgatgatcacgatgtagccgagtacgaagctgatgaccatggctacgagggtcggcccccagccggggaacatcgcatcggttttgtagttcttcacggccttgatggcttcgagcaaacctgagccgaacaccgcggggatggccatcaggaagctcagacgtacagcggcctcacgcgtgtagcccagtgcgcgaccgacggtgatggtgccgccggagcgggacacaccaggaatcagcgccatggactggcccaaaccgaagaggaacgcatcacgatacgtcatatcattcatggttttgttctggcgagccttggcatccaccatccacagcagaatgccgaataccaacagcacggttaccgtaatccacaggttgcgcaacgaggtctcgatgacgttctgcagagtgaagccgaggatgataatcggaatcgagccgacgataatgttccagccgagtgtggcgtaattgtcgccgcggcccatgcgggccttccaatccttgccgttcttgccgaacaggcagctgaaccagtgagtaaggatattgatgatgtcgtgacggaaatacagaatcaccgcaagttcggtgccgatttggatgatggcggtaaacgccgcaccgggatcagagcccagcatcaaatcgccgaaaatacggatatgcgcgctggaggataccgggagatactcggtcagcgcctgaacgatgccgagaatgatcgcttggaaaaaattcataacccctcgtgatttctaagtatttgatgtgttatgacgatgaacaccctacccaagggggtgtagaacaacactaagaatcggtaacatccacggcttctacaatgaaagtggatatagtacgtaagcgacgaagggagcattatggccacgtatcgcaaaagcagggcattcgcaccggaaggattcttcgaatgcgagggtcgaggactcgaatggttgggggcggctcatgcgcagggcggcccgcgcgtggtgcaggtatacggctggggcaaggattatctggatatcgaacgtgtgggcagcgcgtcccccacgcctcaggcggcacgagcttttggtgcggctctggcccatatgcatgatgtgggtgccgaatatttcgggtctgcgcctgacggatataacggcacatgctatttcggaccattgcaggacccagtgaaaatggataccggcgagtggaccgacccgatcagctatttcgctgatggacgtctgcgcccgatggtcaaccttggtgtgaggcgtggcgagctggataagcgcgatgtcgaactgaccgagcgcgtgattgaagcgttgccggatctgatgggccgagccgcgtccgacaagccggcgcgcatccacggtgatctgtggagcggcaatgtgatgtggaccgccgattccgggcagcccgaggctgtgctcatcgacccggcggcacatggcggtcatcgcgaggaggatctggctatgctgcacctgttcggcatgagctatctgagcgaaatcaccgagggctaccagtccgtgcatccgttgaaggccggatggcaggagcgtatcacgctctggcagctctaccccatcgccggtcactgtgtcttcttcggcggcggctacgtcaacgaataccgctccatgtgccgctccctgctgaagtaacagacttggctcccctctctgaggggagccaagaacgcatccactctcagctcagcgcgtccttcaacttgctgaagaagcctttcttttggccagcctgtggacgggatgcctgggagacgtgcgtggcgcctgaatcgtgcgaggcggcgaactgttcgatgaggccgcgctcggtttcgttgagcttggtgggaatcagtacattgacgtgggcgatgaggttgccgcgctcgtccttgttgcggatgttcgtgacgcccagtcccttaagcgtcacagtgtcctcaggctggcagccggccgggatggacacggtcttctcaccatcgaacgtgtcaatggacagattgtggccgagcacggcccagctcatcggcacctgaatccagcagtgcaggtcgtcgccatcgcgggtgaactgcttatccgccttgatgcgaatgtcgatgtacaggtcgccggcagcgccgccgccctcacccacttcgccctggttggccaaacgtagacgcgcgttgtcgttgatgccggcgggcacggtgacgcccacggtacgtgtggtacgcacacggccgtggcccatgcagctggggcacgggttcttgatgatggtaccgtggccctcgcaacgttcgcagggggcggaggtcatcatctggccgagcatggtgcgcacgaccttctgcatgaatccctggccgtggcagtcggggcaggtgaccggctgtgcgccgccctgggcgccggagccgccgcactcctggcacagggagaacgtgctgatcttgacgtgcacggtgccgccgaacacggcggtcttcaggtcgatggacgcggaggccagggcgtcgcggccgggctgggtacgcggcaccgggccctgtgagccaccaccgaacgcggaaccgaagaacgtggagaacacgtcgctcatatcgccgaagcccgccccggagaagccgccggcaccggcgttcggatcgttcgggtcgacgcccgaatcatacatacggcgcttgtccggattggacagcacatcgtaggcgttgttcacttccttgaacttgtcctcgaattcagggcccgcgatgtcggggtggtacttacggctgagcttgcggtatgccttcttgatctcgtcgtcactggcgccgcgttccacacccagcgtctcgtaataatctgccacttgattgatcctttgtgttcgtttggtctgcgggtcattgtgccacagacggcggtcagtcttgggtccggccctcggagaggaaggcggtcaaatatctggctacggccctgacggcggccatagtggccgcatagtccatgtgggtcggccctatggagccgacgaaggcgatgggttccgtgtcgttcgtctggctctccgtctcggattcggtttcgggttcgcctacgggatcgttccccgccggttcgcccgccgcaccgctgcgcccatagccactgctgaccacggaggcatgcagtaggccgggggtgtgcatttcggagccgatggccacgcccacgccggatgcattcgtctcctcgctcaggttgctcatgagcttcatcagcacgacctgttcttccagcgcgtcgaagagtggggccagatcggccagggaccgggagtgggccaggtgcgaggtgccggacatgtacagttcgtccgcgcgttcgtccaatgccatcgattcgaaggcgtcggccagcgcgtcggccacgccgcgcaccgactcgtagccggcgctggcggcgatggatcgcacggtctccgcggatttcgatagggacagtccgacacattgttcgttgacggtgttggagagccggttgatctcgtccacggcgggcatggatgcgatggtcaggccgtgctgggccacgcggccggtgtcggtaatcaccaccgcgagcaacgtggtcatggcaacgggcaccatctccacgtgccgcaatgtggccttggccagcgatggcgaggtgactatggccacttgaccggtgatttcggacaacagtcgtgccgaacgctgcagcgcgtccttgagactcaccgatccggacaggaagctgttgatgccgcggcgctgcgcctcgctgagcggcaccacggtagcaagtcggtccacaaagcatcgatagcccttttcggtgggcacacgaccggccgaagtgtgcggctgaatcagatatccttcatcctccagagcggacatgtcgttacggatggtggccgaactgacgccgagatcatggtcgcgcgtcagcgaagtggagcccacgggctcctgagaacggatgtaatcctccaccacggcgcgcagcaccagcatgcgtcttgattgcgtcatgcgcgcctccttatatatgcatacatattcatatcagtcacggttcactcagggcgtaccccgacggtcggttcgccacgccgcgacacgcgggaacccagaaatattgcctctttcttggctccgccacgtgcaggtggcgcacttcaccttagaacattgtattagcactccttaggcttgagtgctaatgcgttcgtttgcagcgtagcaatgttcactgtgaacgctaacggaacacaaactaccaaaacacgccaaaattgcaccgcaacgtcgcaaaccgacgctagcatggtaatcgcaatgtgagggcgtcaagcgcccggcacaagccggatacgcggcccgaccaattggaaggaaagtaatccatgaccgaattcaaggagaccgagctcgacgagcgcgccatcaagatggcgaaggtcctttcggctgacgcggttgagaaggcaggctccggccaccccggctcccccgtctccctggcgcccgtcgcctacacgctgtaccagcacttcatcaagcacgatccgaatgatcccaactgggaaggccgcgatcgcttcatcctttccggtggccatgcctccctcacccagtacgtccagctgtacttctccggctacggcgtgaccctggacgaccttaagaacttccgtggcggcgctgccacccgcaccccgggccacccggagtacggcctgaccccgggcatcgaaatgaccaccggccctctgggccagggcttcgcctccgccatcggctttgcctacggcgagcgtttccagcgcggtctgcttgacccggagaccccgaaggaagattccccgttctaccacaagatttgggccatctgtggtgaaggcgacatcgaggagggcatctccggcgaggccgcttccctggccgccaaccagaagctcggcaacctgaccgtgatcttcgacgccaaccgcatccagatcgaaggcgacaccaacctggtgctggccgaggacgtgctcaagcgcttccaggcctacggctggtacaccgacgagttcagcttcatccagcccgacggctcctacaaggaggacatcgagggtctggccgacgtcatcgccaaggccgaagccgccgccccggaccagccgaagctcatcaaggtccactctctgatcgcctggccgaccccgggcaagaccaacgacccgtcctcccacggctccaagctgggcgccgaggccgtcgccggcctcaagaaactcctcggctacgatccggaggagtccttccacgtcgacgaagaagccctggcccacgcccgcaaggtcgccgatcgcggcctggaggcccacaaggcctgggacgagaagttcgacgcctggcgcaaggccaacccggacaaggccgccctgtacgaccgtctgaaggccggcgaactgccggaaggcttcgacaaggcccttgacgaccttgaggccaccttcgaagtcggcaagggtgtcgccactcgtggcgcctccggctccgtgctcaacgccatcgccgccgtcatgccggaactctggggcggctccgccgacctcggtggctccaacaagaccgacctcaagggcgctgccaccttcgccccggccgagtgcgccaccaagcagtggccgaactgcaacgagttcggtcgccagctgcacttcggcgtgcgcgagttcaccatgggctgcatcaccaacggcatcctgctgggctcccacacccgtccgttcggcggcaccttcttcatgttctccgactacgagcgttccgccgttcgtctggccgccctcatgcagatcccgaacctgtacatctggtcccacgactccgtcgccgtcggcgaggacggcccgacccaccagccggttgagcaccttgcttccttccgcgcgattcctcagcttgaggtcattcgcccggccgacgccttcgagaccgccgaggcttaccgttacttcttcgagaagaagaacaccctgcctggcgccatggttctgacccgtcagggtgtcccggttcttgccgagaccgctgccaaggccaaggacggtgtcaagaagggcgcttacatcctggtcgacaccgagggtactccggacgtcatcctcatggcttccggttccgaggtccagtgggctgtggctgccgccaagaccctggccggcgagggcgtcaaggctcgcgtcgtgtccgtgccgtccatggaatggttcgaggagcaggacgccgagtacaaggaggctgtgcttccggccgctgtcaaggctcgtgtctccgtcgaggccggcgttgccatgccgtggtacaagtacctcggttcctacggcaagcctgtctccatcgagcagttcggcctgcagggcgatggcgctcagaacatgatcgaccttggcatcaccgccgagcacgtcgtggaagccgccaaggcctccatcgccgaagtcgaagccgccaagtgagcaactaagcaataattcaataattgttggctcccctccctgaggggagctgtcaggcgaaagcttgactgaggggagcaatgcttgagcccactcccctcagtccgcgttgcggacagctcccctctcccaggagaggggagcctagggcttgaatccaaggagaaaataaatgactgaagcaactcagcgtacgtccgacaacggcgtttccatctggctggacgacctgtcccgctcccgcatcgagtccggctccctgcaggacctcatcgccaacaagaacgtggtcggcgttaccaccaacccgtccatcttccagaaggccctgagccaggtcggcccgtacgacgctcagctcaaggagctcggcaaggttgacgttgagaccgctgtccgcgagctcaccaccaccgacgtgcgcaacgccaccgacatcttccgcgagatcgctgaggctaccgacttcgtcgacggccgtgtctccatcgaggtcgacccgcgtctggcccatgacaccgagaacaccgccaagcaggctgtggaactctgggagaaggtcaaccgcccgaacgccatgatcaagatcccggcaaccctcgaaggcctgccggccatcaccgccaccctggccaagggtatctccgtcaacgtcaccctgatcttctcgctcgagcgctacgagcaggtcatcgacgccttcatcgagggcatcgcccaggctgacgccaacggccacgacctgaagcacatcggctccgtcgcttccttcttcgtctcccgcgtggacaccgctgtcgacaagctgctggaagccaacggctccgacgaagccaaggctctggagggcaaggctgctgtggccaacgctcgcctggcttacgagctcttcgagaagaagtttgccgaggatccgcgttgggccgacctggctgccaagggtgccaaggttcagcgtccgctgtgggcctccaccggtaccaagaacgccgcctactccgactgcaagtacgttgacgagctcgttgccaagcacatcgtcaacaccatgccggagaagaccctgaacgctctggccgaccacggcaacggcgctccgtccatcgagggcacctacgaggagtcccacgccgtcatcaacaagctggctgagctgggtatcaacctcaaggacgtcactgacaagctggaggccgacggtgtcgccgccttcatcaagtcctgggattccgtgctggctgacgtccagtccggcatcgaccgcgtgaacgcctgagattattagctgatgcgcatttcgcgcattaactgattagctcacagaagctccgaccccaaccggtcggggcttcttacgtttgttgctacagtagtacgagcacatgagagaaaggccgaaccgtaatgaacaaacttgttgcacgccagcggttggtgatgacctttaccttcttttcgatgttcttcggagcgggcaacctgatcttcccgccgtttgtcggagctcaggccggttccgcgaccataccggcggccatcggcttcatcgtctccgcggtcggcctgccgattctcggcgtgctggcggtcaccttcgccggtggcttcgacaaactcgccggccgggtctcccccaaattcgccctgttcctcggcttggcgatcatgctcaccatcggcccctgctttgcgattccgcgtacggcgaccacctcgttcgaaatgatggtggcgcctttcgtgccgtcctcctacggctggctggcccaactcatctactcgctcgtgttcttcacactggcgttcctgttcgcccagcatcccgaaaaactctccaaagtgctcggccgattcatgggaccgttgctgctggtgctgattgccgtcctgttcatcgcctgcctaatccacggtatcggtaccccggccaaaccgatgggcgactactccacaaaccagattgcacgtggcttcctcgacggctaccagaccatggatctgctcgccgcgctctatttcggcatcgtgatttccgcgaatatccgcacccagcaggtcgatgacgaatcgcaagtgcagaaggagaccgcgtatgccggactcggcaccggtgtgctgctgatcgtgatctacggcgcactgagctacgtgggcgtggtgtccggcgccatcgccaccatcgatcccgccaaagacacgggcgcgaccgtgctcaccaatctcacctcgtccctgttcggcgcgttcggtaccgcgttcctcggtatcgtcttcgtcatcgcctgcctcaacgtatgcaccggactgatcggtacctgcgccacctacttccacactcggttccagaccgttgcagggagaacgttgagctaccgcacctggcaggtcatcttcaccgtgttcagtttcatcgtgtccaacgccgggctaagcgcgatcatcaaggtttccgtgccggtgttgtccgcactgtatccgatcgccatcgtgctggtgctgctggcgctgacccacaagtcgctcggcgcgcgattcccgcatgtctacttctggaccgtgctgctggtgggcatcgactccttcgccacctgcatctccagcctgatcaccgtcttcggcggctccatcggctggctggacacgacgctggccatgctgcccttgcagcaataccagctcggctgggtggtcccggctatcctcggtgttgccattggtatcgccgatgctccgcgacggtagttcttcccggtctgtgccggagtctggcggtcggtcggtgatggcggttgttgcgacgctcagcggtgccggtgtatcgttcgcaccactatatgagcgcatttggggcggcatgatgctgcatccgaactgtccggcgattggcagaatgacctactatctctcgggccaagcaactgacgattatggagtctgcgtcacctcaccactgtggtttatgacggtgactgcgctgagtgttgtcgcgattctctgtctgaccgttgcgggagtacagggcttttcgcgccatcggctctgttcccgttgccctgttctggtcaggtctcacgttctttacctacagctacaacactggtagacacaccgatttctgcccagcgctatcggcaactgacaatgcaggtcttgtcgcttattgcatcggccgtgaagctttgggactgctgaccgtcgtgttgtgcgtgctgccattgttctccctgctttcggcgattatggccatcacgttggctgcgcacgacgcgacaccaccggcataaaatctccttcatatcacgaaacaacgggcacccgttttgcgaggcattctatccgtcccgtgtttcgcaacgcatgagacggcacatccattgaatcaggagtctagaccatatctcgccgaatcttgcggtaggtggcatagaacaggaagccggccacgatgccggaggtggcgtcggagatgggttcggcgatgaagatgccgttgacgccgatccagtgcggcagcagcagcgcgagcggcacgagcaggatgatcttgcggaagacggccaagaacaccgactgtttggcctggcccatgccgacgagtgcgcattgcgcgcccatctggatgccgaagataccccagccgcagacgaaaatcggcatcatgcgggtcacgatgtcgatgaccgtctgttccgaggtgaaccatgaggcgaagaagccggggaatgtggcgagcacgttcgcggcggccgctcccctgacgccccatccgaacacgaaaatgaacacggggtcaagaaggatggatatgccggtgccgatgagtacggagaccatggccacagtggtttcgccaactgcagcagcacggtgagggtcagggctatggcgatgaggaacgcggcgctggtgccgaggatgcgttcggctttcttgaagttgccgcgcccaagttcaatggaggcgcgaggcgcgccgcctgcgccgatcagcgaggcgaaggcggtgacggccggcagaatcgggaagcagatgcccacgccggtcatcgccgcgttgcccacttcggggatgtgcccgatgaacagtcggtcgatgatcgtgtacgaggcgttcgccgcctgcgccacgatggtggggaccgacatggtcagggccagacggggcaccggtttggtgcccagcccggcatcgatcgtgttcgcctgtaccaaggatcagctctgccagtagtagctgaagaagtcggcgagctcccccatggtttcgtgcagcatgcccatgcgcggcaggtacaccacgcggaagtggtcggggcgatgccagttgaacgcgccgccgtggctgatgaggatgtgcttgtcatgcagcaggtcgagcgcgaactgctcgtccgagtggatgttgaagcgtttgacgtcgatcttcgggaagatgtagaacgcggccttcggcttgacggcggtgatgccgggaatctggttgagcatgtcgtaaacgaggtcacgctggtcgtgcacgcggccgcccggcacgatgtagtcgttgacgctctggtggccgccgagcgcggtctgcaccacggactgggcgggcacgttcgagcacatgcgcatgttggcgagcatgttgaggccctcgatgtagtccttggcgatacgcttgttgccggacaggatcatccagccgatgcggtagccggcgatcatgtgcgatttcgacaggccggagaaggtcacgcagaacaggtccggggccatcgaggcgatggagatgtgctgcaggccgtccatgacgaggcgatcgtagatttcgtcggagaagatgatgagctggtgttcacgcgcgatgtcgacgatctgctggagcacttcctttgggtaaagtgcgccggtgggattgttcgggttgatgatgacaatcgccttggtgttgctggtgatcttggagcggatgtcatcgatgtccggataccattcggactgttcgtcgcacaggtagtgcacggcggtgccgccggccaggttcacgcaggcggtccacagcgggtagtccggggagggcacgagcacttcgtcgccggtgtcgagcagcgcggacatggacaggttgatgagctcgctgacgccgttgccggtgtagatgtcgtcgatggtgacgttcgggatgttcttcagctgcgcgtactgcatgatggccttgcgcgcggagaacaggcccttggacggcgagtagccttcggtgtcggtgagctggtgggccatgtcatagacgacttcgtccggcgtgcggaagccgaagggtgctggattgccgatgttcaatttcaggatgtgggtgccgttggcctccatgcgcatcgcctcgtcggcgaccgggccgcgcacgtcgtagagcacgttgtcgagcttgtgcgatttgccgaaggtacggcggcggcccacgggaatctcgctgtccgtcaggggcttggcggtgcccgtggcaagcggcgtggcggcgtgttcgccgtccgtgacgctgttggaagcgtccgagttcaattgcggggtggattcctcgccgcgcagccagttcgcgtcgacgtccagttcgctggccaggaattcgagcacgtcttcgcggggcatggtcttgccggccacgtattggctgatatggctcttgcccatctttacgccacgatgttcggcggcgtgcaccaaatcgacctgcttcaatcccctactgttcatcgcattgcgcagacgttccgcaaacaccgatacgctcatatccttatgcctccaaccgggagttcaatttatcttttgaacaacagttcaaagcatactcccggttcaacacaagttcaattttggcgtgttctcgagtctcggccggttcagcccaactgcgcttcaatccattgggcgacgccgtcctcgttgttgggcgggcagatctcgtcggcgatagacaacaccttggggttcgcgttggccacggccacaccccggccggattcgctcatcatgttgatatcgatgaggtcgtcgccgaaggcggcggtctgttcgagcggcacgtccagtcgttcgcacagcaggtgcagcgcgtgctccttgttggcctgcgggttcatgagcatccacatcacgccttcgctaatggagatgtcgaagtccggcggaatcagcgcacgcagctcgttccactgttcaggctcggggaagatggtgatcttatccgccacgccttcgggcacgtcgtggaagttcgtatattggaaggcctgtgttttccaatacacgcgcacatcgaagttggtgtagcgcacgtcgttcatcacgatgccgagcttcaggccgggcatgcgatcgagcaggaacagacagacttcgcaggcacgccgtgaggagaagccaatcttgatcaaatggttctcatcggccggcgtggcacctgaggtgagcaggtcgaagtcggagtgggccgggtcgaaatcgatgagggcaccgttcagatagattacggcgtccaccggcagtttttcggcgaactggaggccggtactcaccggccgcgcggtggcgatggcgaatttcagtccggcatcgtgcgcgcggttgatggtgtcgatgctgcgctgggtgatgaaccggtcctcgaatacctcggcgtcgtgcagcaacgtaccgtcgaggtcggcgaccagcagtcggggttgtttcggtgtgatggcgtcgagaatcacagcagcccctcgcagtgttcacgcacgagttcggcggaatggtgcaatttggcctgctcgtcctcgctcagatcgagttcgacgatctcgttggcaccattggcgcgcagttcagtggggacgccgaggaacacgtcatgttcgccgtattcgccgttcagcagggtggagacgggtacgatgcggcgttcgtcccacaggatggtctgcacgatgccggccacggtggaggcgatgccgaagttggtaccgcccttggccgcgacgatctcatcgccacgggtgcgggtcttctcttcgatttcggtggtggacacggaggcgaaacggtcttggttgtcggccaggaagcgggcgaatggcttgccgccgagcgagacggtggaccatgcggtgaactgggagtcgccgtgctcgcccatcacgaagccgcccacgttacgcgggtcgaggccggtctcttcgccgatgatggtcttgagacgcgaggtgtcgagcgcggtgccggtgcccagcacctgggtgcgcggcaggccggaacgtttccaggcataccaggccatcacatcgaccgggttggagaccatgacgatcacgccgtcgaagccggaggccatgacgttgtcgaccacttcgcccacaaggcccacggtgaagccgagttcggccatgcggttggagttggccggcggcttgcggcccacggtgatgacgacgatgtccgcgtccttgcagtcggcgtagtcgccggcgcgcaccttgacgtggcggtcctggaattcgctgccgtcatcgaggtcgcgggcctcccccagggctttggcggcggagcggtcgatgagcacgagctcattgcacaggccgtgcgtgacgatgccgaaggcggcggtggcaccgacctggccagtgccgacgataacgactttgttgcggttcatagtgaccatggtgatgtcctttcgtaatactcgatagaacgcatacgacccatgaccgacggtaacggtcatgggtcgcgagcgacaagtctatatggcgtgcaagccgatcagccgaggttgaacttggtcatcatgtcgaggccgatgatcaatgccacccacaccagagcgatgataacggtccaacggttcaggttcttttcggcgacaccggaagtaccggcgttctgggtcagaccgccgccgaacatgtcggacaaaccgccgcccttgcccttgtgcataaggatgagcagggtcagcacgaagctgagcagcacgacgatgacttgcagcgtgatcttaagagcggtcacagggtacctccggattgattggactgttgaccagcatagcgcacacacgggaaaaccgtggtattagttccgtgatttcgtggatttcagtgccagtcgagcgattttggcgagttcctcaacatccagggccgcccctccgatcaggaagccgtcgacgtcgggttgggaaatgagttccgccgcgtttttcgaggtgaccgatccgccgtacaggatacgtacgctatcggataccttcgtgccaaaagtggtcttcaaatcgttgcggatggcatttgcggcatcctgggcggattgcggagtggccaccatgccggtgccaatggcccagacaggttcgtaggccacgatgagttcggcggcttgttcttcgttgagatcgcgggtgacgtctcgtacctggcccacggcgaaatcgagttcaatgccttgacgtcgttcctcgaagctttcgccgacgcacaaaatcggctgcatgccggcggcgagcacggcacgtacctgatcgacgatattggcgtcatcttcaggatggtatttgcggcgttcggagtggccgacgatgacgtacgagcagccgagatgggcgatcatgtccgcggacacatcgccggtgaaggcaccttgggtggtcacggaaacggattgtgcgccgtaggcgacatggagcttgtcggcttcgaccagcacctgtacgctgcgcaatgacgtgaacgaggggaaaagcgcgacttcgcagcgtttgaagtcaaagcgagcgtcacgcaacagccataccagcttctgcacgaagtaagtggcttcaagatggtcgaaattcatcttccagttgccggccaccaacggaatgcgtttggacgccatatgtttcccctctaaaaaatacgtagctcccctcaaggaggggagctagaaaatggattactcaagcaccttcagaccagggagctccttgccttcgaggaactcgagggaagcgccgccaccggtggagatgtgggagaagccgtcctccgggaagccgaggttacgcacggcggaggcggagtcgccgccaccgacgatggtgaacgcaccggctgcggtggcgtcgaccagaccctgggccacggccttggtgccggaggcgaactcaggaacctcgaacacgcccatcgggccgttccacacgacggtcttggagtcgacgatcttgtcgtggaagagcttctgggactccgggccaatgtccagacccatcttgtcggccgggatggcgtcggcggcaacgacttccggagcaaccggggtgtcaccggccgggaagccggcgttcacggcgacgtcggtcggcagcacgagctcaacgccgttcttctcggcggtctcgatgtagcccttgaccttctcaagctggtcctcttcaagcagggaggtgccgacctcgtagcccttggccttgaggaaggtgaacaccatgccgccgccgatgaccagacggttggccttgtcgagcaggttctcgatgacgccgagcttgtcggagaccttggaaccgccgagcaccacggtgaacggacgctccgggttctcggtggccttggacagggccttgacttccttctcgaccagcaggcctgcggcggccggcagatcggcggcaacgtcgtagttggagccctgggcgcggtggaccacgccgaagccatcggaaacgaaggcctcgccgagggcggcgatcttcttggcgtaagcggcgcgttcgtcggcgtccttggaggtctcctccgggttgaagcgaacgttctcaagcagcacaacatcgccatcgttcatggcggcgaccttggcctgagcgtcctcgccgtaggtgtccttggccagcggcacgttggtgccgagcagctcgccgaggcgggcggcaaccggggccaggctcagctcaggaacgaccttgcccttcgggcggccaaggtgggccatgaggatgaccttggcgccttcttcgcgcagggtcttgatggtcggcagagcagccttgattcgaccgtcatcggtgatggtggtgccgtccagcggaacattgaaatcagcgcgaaccagaacgcgcttgcccttgagatctccaaggtccttgagtgtcttcatgaatatcctttccttgacgaatcgcacgtcaaagtggccaattttgccactttgcatattacaggcattccggaacaaaacaccgcattcgcctactgactgaatgcggtgtttcgttacgtcgttgtcgggttacttgccttcggctgcgcgagccttctccgttttctcggcaagctgaagcagtcggcgaattcggccggcaatcgcatccttggtgatttgcggttcggcgatcttgccaagctcctcgaggctcttgtccacgtgatcgatgcgcagctggccggcctgacggaggttgtccggaatgttatcgccgagcacttcgaaggcatgctgcactttttcgctggcttcggcggcagccttggcggaacggcgcatattggcgtcatcgaagttggccagacggttggccttgccgcgggcctcgccgtcggagcgcttgccggtccattcgcgggccgaacgggtggcgcccatgagcttgagcatgcgttcgatggcgtcgggatccttgagggtcacgcgctcggagctgcgcagcgtgcgatgcttggcctggatgccgagacgacgggccacgccacacagggccatggcggcctcttccgtggggcaagcgatttccaggaagctggccttaccgggatcggataggaagccacgggccatgaaggcgccgcgccatgctgctttgatttgggcgatggatccgttgaccacttcagacggcagtccacggacctgctgcttgcggcggtcgaccagtccggtctgcaaagccaaggccactacgttgcgggtgacgagcaccacgtaggtctcgacagggccgttcggggtctgacgggtgaggtggttgacctcggcttcatgcccgaacgtgttcctcaatgtgttcttcagccattctgcaacgtcaagcgaggtgaatacggcttggataacgtatgtattctgtaccggtcgaagaccgccgccaaaacggatcatggccgcagcttgggccttgatcgcggctggcgaatcgccttcaaaggccgccaactcgcttttgacatcgtccagaagagccaagatctacctcctacagtcccgttcttctcaatgcttcaggcgcttcgtgccgttatctgctgtcatacggtcggaagccatcggctttctgtgatacctaatctggtggacaagcgaacccgtttgatacgtattatgggctttgctttctcgcagtgtggtcaccgaacgcttgcccgatgaccgctcgacgcctgcttacgatgagtgacgcttatgctgttctctcgcggaaacggttacgttgagcccatgtgcgcgtaagcggcgagccagctcttcgctcatcgccaccgaccggtgctgaccaccggtgcagccgacggcgatggttacatagtgcttgtcttcctgggcgtatccttccaacgcaatctcgatagctttctcataagcgtcgagaaattccttggctcccttgctggaaagcacgtagtcggcgaccggcttgtcgtgcccggtaagctcgcgcaggttgggaacccagaacgggttgggcagaaaacgcacatcggccacgaaatcggcgtcgataggcatgccgtatttgaagccgaagctgaagatgtgtaccgccacggtggtggggccggaaccgagcatcgtctcgtagagtttggtggacagctggtggatgctcagggagctggtgtcaatgacccagtcggctcgctccttgaggtcttccagcaggtgacgttcctcaaggatgccgtcgatcagtcggttgccgtgctgcagcgggtgcgggcggcgcacggattcatagcgcttgatgagcacttcgttgctggcgtcgaggaacagaatatgggttttgacgccgagatcatccagatggccgagcacggcggccagctcgtcgaaatagctggagcgcacgtcgatgacggcggcaagcttgtggacgcccgatcccgatccggaaccggaggtggtcatcatgtcgacaagcgggataagcagtttgggaggcaggttgtcgaccacataccatcccatgtcttccacgcagtcagcggcatgagagcggcctgcgccggacataccggtgatgagcagcacctcgaaggcatcaagcggggtcggctggttgtccggagtcgatgtggatgtcgcggaattcgccggcgcattcgtggcggccgcctcgccggtatcgcggattgttgtctgttgactcattacaacgcctcctcaagagctttgcgcatcgcgatctccagctggtcgtcttcggtggtggtgtcctgcagacgctggtcggcatcgctgggcgggtcgtcatcccagataccggtcatcagcaatacctgtacgagagcttggtacagcagcatttcttcgccgccgatggcgtgaccgccatgagcgcgccaggcttccatgagcttggtggggcgtggatcgtagaccacgtccagcagcagtccggagaatggctcggttccggcattggtgagggcatccgcgacgttgtcggccgcatgtccgggaatcgtgttgatgacataggtggcgttgcgggctgcctcgagcagggcctgatcgtcgcctaattcgatttcgctgtacgggttatgcacgttgacgaacttttcggccactggtttaagcccggtgtttttcccagggtggcgggcggcgacgatgatatggccgatttcgggcatcatgcagcatgcggccaacgccgaagtggcggtgttgccattgccgaggatcaacgcggcgccgcttctcgatgcggtgtggtgttcgccgagttcgcgattggcgtggtcgaaggcgagttggatgccgatgacatcggtgttgtacagcttgatgcccggcttgccgttcggccaagcgggatcatcggtagccacactccagtcgaataccgcggtattcgccaccttcagttccttggcccacagattttccggaacaccgtacggttggatggtcttcttcaacggcatggtcaggctcaggccagcccacatcgagccaaggcctttgaggaaagcgtcgaggtcgtcttcccccacctcgtgcttgtcgtacagccaatcgtcgagtttcagcgaacggtaggccgcgttgtgaagcacgggtgacaatgagtgtgcgacgggtttgccgagtacagcgcaacgatgattggccatatcccctccttgatgtctgtttccatgctagccgacactttgcttcgaatatgtcaaccacaggccccgcaaccgaaaattcactctgggctgctggaccgggccggctcactgctcgtgcagcgcgttgtacagcgctttggctttggcgtggccgatgcctttgaccttctcgaagtcctcgacactggcttcgcgcatggctttgaccgagccgaagtggttgagcagccgcttctggtagctttcgccgatgccgggaatctcgtcgagcgcgctgcgcagggcgcctttgcgccgctgttggcggtggtaggtgatggcgaagcggtgggattcgtcgcgtacacgctgcagcagatacatgccttcggactggcgtttgaggatgatcggatagtcgtcgtccggcacccacacctcttccaagcgtttggccagtccgcagacggccacgtcgatcacgccacagtcctcaagcgccttggcggcggccatgacctgtggcttaccgccgtcgaccaccaccaggttcggcgtgtaggcaaagtgatgccggtttgtgttctgctggacgatgtcgggcgaggactcccgtgcatcgttctgcactccgaccggcaccgcgtgccccttgccactgatgtcggaaccgccctcaccattgtcgttaccgttcgcaacgattgtctccgccgccacggcagtggtcatcttgccggcggccgaggccgcgcgctgttccgcgtcgatgctttcgccggagtcgccggcgatgttgccgtgcctgaagcggcgggtgagcgtctcgtaaagcgcggacagatcatccaccgcgcctttgccgtccttgcctcggacggcgaagcgtcggtattcggatttcttggcgatcgcgtcttcgaacaccaccatggaggccacttggaaggcaccgcccacagtgttcgaaatgtcgtagcattcgatgcgcagcggggcttgcgcgagtcccaatgccttggccacatcgttcatggcctgggtgcgtgcgcccatgtcggagatgcggctcatcttgctgcgttgcagtgcttggctggcgttctcgttggcgcggtccataagctgcttcttgtcgcctcgcgaggccacgcggatggtcaccgcgcccccgcgcagattggtcagccagccttcgagttcctcgcggcgggccggttcgacgggcacgatgatttcgcgcggtaccggtgcgatgggtgccagcaggtccgcgcgtccggtggtctcctgacgggtgttgcgttctcgggtggcctgggcgcgtgccacagcgtccgtggccgtgatggtctgtgtggagccgatggcctcgcgattggtggagatggtcgcggccgactgggggtgattgtccccggcggagtccgaatacacctgcaccagaaggtcggccatcaagtcggcgtcatcgatgtcctcaactcgttcgacgctccagttgcgttcgccgcgaatagagccggcgcgcacataaaaggcgtgcaccgaggcttcgagctcgtcgctggcgaagccgaacacatccgcgtccacatcctggtcgaagacgacggcgttctgttgcaccacggtttccagcatttggatctggtcgcgcagtcgggcggctttctcgaattcgagttcggcgctggcctctttcatgtcgcgggtcaactgggcgatgtatggccgtccgagtcgtccggtcatcacgccgaccagctgttcgcacagccgccggtgttcgtccgcttcgatacggttcacgcagggtgcggagcatttgccgatggaggcgaacagacatggccgtccggtcagttgcgccttgtggaatacgttggtggtgcaggtgcgtaccgggaacgtgcgcagcaaccggtcaagactgtgccgcaattcccacactttggcataggggccgaaataccgggtatcccgccgtttgcgcgaccgcgtgacccacacgcgcggaattcgctcccccgtgctgaccgcgagatacggataggtcttgtcgtcgcggaactgcacgttgaaccgtgggtcgaattccttgatccacgtgtattccaacgtcagtgattccagttcggtggcgacaaccgtccactccagactgcgtgcggtcagcaccatggtctgcgtgcgcggatgcagcagatacagcggctggaaataattggtgagcctgttgcgcaggttcttcgccttgcccacataaatgacgcgcccttccccgtcgcgccatttgtacacaccgggtttggcgggaatatccgaggtcttgggtcggaacaggtcgcgagaatcccccagcaaaggtgccccattcgcattcaccttcgccgtcgtttccccggcacccacagctatgctttccgacattaacgccgccgcagtcttccgccactcatccggactatgccgctcaatatcgttcgtcataatcctcctcgctattaagcaaaaccaatcatcagggattgggtgggttggggtgtgtgttgctggaccgtaaagacttgacctgagcggcccggagcatgtccagc

SEQ ID NO: 291 - DNA, 5825 bp, Unknown
  R101_18m  MAG No. k141_76601
ctgctgcgcgccatcttcggcgagaagtcccgcgaggtgcgcgacacctccctgcgcgtgccccacggcgagaccggcaccgtcatcggcgtcaaggagatcacccgcgaggatgccgaggaggacggcgacgagctgcccaacggcgtcaaccagatgatccgcgtctacatcgcccagcaccgtaagatcacggtgggcgacaagctctccggccgccacggcaacaagggctgcatctcccgcatcctgccggaagaggacatgccgttcctggctgacggtactccggtcgacatcatgttgaacccgctgggtgtgccttcccgaatgaacctcggtcaggtgctcgaactgcaccttggctggatcgcccactccggttgggatatctcccttgacccgaacatggaagccgagtggaagaagctggttccgtccggtgccgagaaggccgagccgaacaccccggtcgccaccccggtgttcgacggtgtcaagcccgaggtcctgaagggcctgctgtccaccacgctgccgaaccgtgacggcgaccgtctggtcggccccgacggcaaggccaccctgttcgatggccgtaccggtgagccgtacaccaagccgatttccgttggctacatgtacatgttgaagctgcaccacctggtcgacgacaagattcacgctcgttccaccggcccgtactccatgatcacccagcagccgctcggtggtaaggcccagttcggtggccagcgcttcggcgagatggaggtgtgggcccttgaggcctacggtgccgcctacacgctgcacgagatgatgaccaccaagtccgatgacgtcgacggccgcgtgcgcgtctacggcgccatcgtcaagggcgacaacctgccgccggccggcatccccgaatcgttcaaggtgctcctgaaggaaatgcagtccctgtccctgaacgtcgaagtgctcaacgccgaaggcgtggccatcgacatgaaggatgaggatgacgatccggccagctccgctgacgacctcggcttcaacattggcgcccgccccgacgcggccgccaaggaagaccagaaggccgaagagcccgaataccagtgatccctcgggctgcatgcggtcaatacgccgcgtgtagccccgccaacgtgaaatagataacgtacagagacctttccggtttgcactacccctcagtcagccttggctgacagctcccctgacaaggggagcttgggaaggtctcaagaacagaaacggattaacaagtgctggacgtcaacgcatttgacaagattcgcatcggccttgccaccgccgatgacatccgtggttggagccacggtgaggtcaagaagcctgaaaccatcaactaccgtacgctgaagcctgagaaggacggtctgttcggcgaacagatcttcggcccgacccgtgactgggagtgcgcctgcggcaagtacaagcgcgtgcgcttcaagggcatcgtctgcgagcgatgcggcgtcgaagtgacccgcagccgcgtgcgccgtgagcgcatgggccacatcgagctcgccgccccggtgacgcacatctggttcttcaagggtgtgccttcccgcctcggctacctgctgaacgtcaccccgaaggatctggagcgcgtgatctacttcgcctcctacatggtcaccgaggtgaacgaggacgagcgtcacaacgatctgcccggcctgcaggacgagttcgattccgagatcaaacgccttgagcagcgccgtgactccgacatcgaagcccgcgccaagaaggtcgaagaggatctcgccgcccttgaggaggccggcgaggccaagggcccggcccgcaccaagctgcgtaacggtgccgagcgcgatatggccgccatccgcacccgctacaacgaccagatcgcccgtgtggacgccgtcttcgacaagttcaagaagctcaagcccggcgacatggtcgacgacgtggacctgtggcgcgagatgcaggaccgctacggcgattacttcgacggctgcatgggcgccgaagccatcaagaagcgcctgcagtcccttgacctggagaccatctccaaggaactgcgcgaggagatcaaggacgcttccgaacagcgtaagaccaaggccctgaagcgtctcaaggtcgtcaacgccttcctgaccaccggcaacaagccggaggccatggtgctcgacgtgatcccggtcatcccgccggacctgcgcccgatggtccagctcgacggtggccgctttgccacctccgacctcaacgacctgtatcgccgtgtgatcaaccgtaacaaccgtctgaagcgactgatcgagctcggcgcccctgaaatcatgctcaacaacgagaagcgcatgcttcaggaagccgtcgactccctgttcgacaacggccgtcgtggtcgcccggtcaccggtgcctccaaccgtccgctgaagtccctgtccgacatgctcaagggtaagcagggtcgtttccgccagaacctgctcggtaagcgagtcgactactccggccgttccgtgatcgtggtcggcccgtccctgcgcatgcaccagtgtggtctgccgaagccgatggccctcgagctgttcaagccgttcgtcatcaagcgcctcgtggacctgaactacgcgcagaacatgaagtccgccaagcgtctcgtggaccgcggcgacgccgaagtgtggggcgtgctcgaggaggtcatctccgagcaccccgtgctgctcaaccgtgcacctacgctgcaccgtctgggtattcaggcattcgagccgatcctggtggaaggcaaggccatccacctgccgccgctggcctgcgccgccttcaacgccgacttcgatggtgaccagatggcagtccacctgcccctgtccgccgaggcccaggccgaggcccgctcgctgatgatggcttccgacaacatcctgaagccggctgacggtcacaccgtgaccatgccgtcccaggacatgatcctcggtctgtactacctgtccaccgtgctggaaggcgccaagggccagggccgcgtgttctcctcgctggaagaggccgaaatggccctcgaccgccacgagatcgacatgcaggccaaggtgctcatccgcctgcccgagagcttcgtactgccgaagaactgggagcccggcgaggtcaaggtgctcgacccgcgcgaaggtgaggacgaggtcgtcaaggaagagcgcttccacgacggcaccgtgctgttcgccacctcctacggccgcatcctgttcaacgagactctgccgaccgactacccgttcgtcaacgagcaggtggccaagggccgtctgtccaagattgtcgatgacatcgccatgcgttactccacccagcaggtggccgccacgctggatgccctgaaggatcttggcttcacccgtgcaccgtggtccggcgtgtccttcgcgttctccgacgtgaacgagccgcccgagcgcgacgagaagatcgccgagtacgaggccaaggccgacaaggtcaacgccaactacgagatgggtctgttgaccgaggaagctcgtcgtcaggaactcatcgacctgtggaccgagtgcaccgccgaggtgtccaaggaagtcgaggagaagttcgacccgacctccaacctggccatcatcgtgcagtctggtgcacgaggcaacatgatgcagatcaaccagatcgcaggtatgcgaggcctcgtggccaacccgaagggtgagatcattcctcgtcctgtgaagtccaactaccgcgacggcctgtccgtgctggagtacttcatctcccagcacggtgcacgtaagggtctggccgataccgcactgcgtaccgcagaatccggttacctgacccgtcgtctggtcgacgtctcccaggacgtcatcgtgcgcgaagaggactgcggcaccaaggccggtctacccatccgtgtcgccgagcgcgacaacgacggcaacctggtgctcgtcaaggccgccgacggtggcccgtactcccgtctgctcgccgccgacgtcatcgacccggccgacggacagaccgtgctgtacaagcgcgacgacgccctgtccatggacgtgctcaacgacctcgtggcccacggtgtcgaggaagtcaagtgccgttccgtgctgacctgcgagtccaagcgcggcgtgtgcgccaagtgctacggctggtccctggccaccaacaagctggtcgatgtcggcgagaccgtcggtatcgtcgccgcccagtccatcggtgagcctggtacccagctgacgctgcgctccttccactccggcggtgtggccgcggcatccgatatcacccagggtcttccccgtgtcaccgagcttctcgaggcccgcaccccgaagggtgaggccccgatcaccgagttcgccggcagcatcaagatcgtggagaacgatcgcggtcgccagatcatcctgaccccggacgccgattccggcgcgccgaaggaagacggcgtgatcaagccgatcacctaccaggtctccaagcgcgtgccgttgaaggtcgccgacggcgaccacatcaaggtcggcacccagctggtcgaaggttccgtggatccgaagaagatcctcaccatcctcggcaagcgcgccgcccaggtcaacatcgtggaggaagtgcacaccgtgtaccgctcccagggcgtggatatccacgacaagcacatcgaggtcatcgtgcatcagctgacccgtcgcgtgaccatcctcgactccggcgacaccgtgctgtacaaggccggcgacgcgctgtccatggacgtgctcaacgatctcgtcgcccacgatgtggaagaagtcaaggcccgttccgtgctcacttgcgattccaagcgcggtgtgtgcgccaagtgctatggctggtctctggccaccaacaagcttgtggacgtcggcgaggccgttggcatcgtggcagcacagtccatcggcgagcctggtacccagctgacgctgcgttccttccactccggcggcgtcgcttccgcatccgatatcacccagggtcttcctcgtgttaccgagcttttcgaagctcgtaccccgaagggcgaggctccgatcgcggagttcgcaggcgtgatcaaggtggaagacaccgagcgcggccgtcaggtcatgctgaagccggacgacgaatccgtcgaaccgatcgtctacccggtaacccgtcgcgccccgatgatggtcaaggacggcgagcatgtcgaagctggcacccagctgatcgaaggctccgtcgatcctaagaagatcctgcgcatcctcggccctcgtgccgcccaagtgaacattgtggaggaagtgcacaccgtgtaccgctcccagggcgtggatatccacgacaagcacatcgaggtcatcgtgcaccagatgctgcgtcgtatcacggtgatcgattccggcgataccgacctgcttccgggtgaactggtggatcaggcccgcttcaaggccgccaatatgaaggccgtgaaggaaggtggcaagcctgccgccggtcgtccggagctgatgggcatcaccaaggcttcgctggcaaccgattcctggctgtccgcggcttccttccaggagaccacccgcgtgctcaccgaagccgccctgagccagaaggtcgacgacctgaagggcctcaaggagaacgtcatcatcggtaagctcattccggccggtaccggtcttgcccgttaccgtaacgccgtggtcgagcccgacaaggccattcgcgac

SEQ ID NO: 292 - DNA, 20561 bp, Unknown
  R101_18m  MAG No. k141_77193
aactactcttccgctgctccggctaccggtaccctcgccgactccgatcagctcgccgccctgcgcgaccagctgctcggcaagtgagtttgccgcgaagctagcgcttagcgtgtaaagaaacccggtccgattgggccgggtttcttgtgtttttggagttatccgccaatgactcccctcagtctcgctacgcgagccggctcccctccctgaggggagctgtcggcgatagccggccgaggggagcgccagctatcatgggcaccatgatgcgaataggactgaccggcggcatcgccgcgggcaaaagtacggtggcggcgcgactcaagcaactcggcgcgttgcatatcgactacgatgcgctggcgcatcagatcgtcgaacccgggggagtggcgctgccacagatcgtcgccgcatctccctgtccctcaagcaggccaacgactccgttgacccggcttccgaggacttcgatccggccatctacggtatgccggccgagtacgacgagcagggcaactacaagtaccccgaaggcttcgacccgaacaccaacgagtggatcgctggttacgagaagcagcgcgaggagtgggagtctcagtacgccgccgctcacgagctgtgggaggagcacaaggagttcgtggccaaggagctggagaacgctgccgaatccgcagccgccgacggccagggcccgaaggaagagaagccggtcgaggagacctccaactactcttccgctgctccggctaccggtaccctcgccgactccgatcagctcgccgccctgcgcgaccagctgctcggcaagtgagttcgccatcgggcgattgacgcctggcgtatagtcaaaacccggtctcgcttcggcgggccgggttttgccgttgtgtgcatgaacctcgaaacatggccatgatgggggagcatgattcgaataggattgaccggtggtattgcggcgggcaaaagcacggtgtccgcaagactgcgggagctcggcgcggcgcttatcgactatgacgagctcgcgcgccgagtggtggaaccgggcggcgtcggtcttcgtcgtatagcggaatgtttcggccccgacgcgctgaccgatcaggggcggctcaaccggcgatggatcgccgagcacgtgttcgccgggcccgactcggaacggatgcggaggaaactggacgatatcgagcatccgttgatctatgatcttgcgctgtcgcgggagcggcaggcggtcgcggacaatccggatgccatggtcgtgcatgatgttccgctgttggcggaagtcctggacgccatgcccatgcgattcgaccatatcgtcaccgtcgaagcgcccgaacaagtacgggtcgacagaatggtgtcgacccgcggcatgacgcgagatgatgcgcttgcgcgcattcgccaccagtccagcccggaacaacgccgtgtcatagccgacgcggtgatcgattccacgcagccgatgggtcgaatgctcgaagccgtcgatgcgctgtacgaacagtggctggcggaatcataatgcgatgatgcggtcggcgagggccgcggtctcctcgttgtgcgtcgtgtagatcacgatcgctccgttgtcggcgaaatcacgcaggtgacgcatgaccatggcgcggttgtcggcatcgagggccgctgttggctcgtccgccagtatgacgcgcagcgattgacggatgagaagcctcgcgattgcgactcgttgttgttcgcctccactgagtgtgtagataggtctattgccgtagcccgtcagattcacggcccgcaatgcgcgtctgatgagccgacttctatctgccgatggtattccgacgctgcgcagagccagaatcagatttctgttcaccgtccattgctccaccagggcgtaattctggaacatgaatcccatgacgttgcggtgcatgagccgtcggccctttctggaggcaattgtttgcccatcataggtaattgttcctgaacttggctcttccaaaagacctaggacattcaacaaagtggttttgccacatccgctttctccggtcagggcaaccatgtcaccgggactgaacgtcaggttcagtccttcccataaggtgcggtcgtcgattcgatatgtcagattatgcgtgatcaataaggcgctcatgattgatgttccttacgtggtaagcggttgctgatacaggtttgtggatggcgatcagggatgtttgatactgtcggcgcgcagccgcgaatcgtaaagcactgtggttgccagagaaacgacgatgaatagtaaggaaaccgaggtcgtggaaacggcgttgtaacctcctatgagcaactggatcggaagagatgcactgcataacgccgctgctaggaacagtatcgattgaaaacggagatatgacggcgctccatgcatatattccacgaacataatttgacgtcggagtgtgcatagtgtcaaagccaccatgattgcgccgcccagcagacatgttatggatatgcaagctgtgatggaaaaatagttcatttcctgagttgttcgtgccaaacgagtttgtatctcgtcgtgccgattgacgaccgaagccaccaaagagtccacgcccttttcccgtaggatttcgagcagctgatggcgggagctgtaatcgaaggtcatgccgccggtggacaccatcgatgtagtggtatcgccagagagcagtgacgggtcaatgacaacaacaggaacagaggaaaggccatcggtgttggaaggggtgtcaaatgccgataagacagcatctcttggtctggattcaatggagatgctcgtgcgattgatggcgggcagactctttccctcttctgccgccaaactttgctcgaatgagtatgcgcgaagcacattgttcgtaatggattcgctgttccattgttcattctcgggcataatcacactgattcgtgcaagtgtcgtgttgtttcgtataagatgatgaagccttgccgtacgggaatccatgaggatgcagggctgtgggtcttgcgagctatccacccacgtgcatcctagccggaatgaggcgaatcgcgtatgttctgattgggaagtttgttcgacgaagtcattccatgagggcatggaacgggctcggttttgatcgctgctataccacagttgcaattggaatccgtcgttggatgacaattgatgctccaatgttgttttcagtgtttgggattgccgccatttgaagttcgtaacgttcaaactggcagagctgagagcgagaacgatgattgccatgatgcagccggaaaccatgagaaaacgtaaagggcgctttccttggattaatttgagtgcgttcggcaccagaacccttactagagcaatcgacaatgacaaggcaaccaatgccatgcacgttgtggcgatgatgatggagaggaatacctgaccggcgaatcctaagggagaagcgaaaggccagaagatcgcaccaatggaaatccaagtcatccatccgatgcagacgcagatgatgaaaaagaacgcatgccgcaggaattgcctcataataatgccggttgttctcatgccatgcaaggcttgtatcgcgcaaacgcgtgaagctgtcgacacggaaagcgcgccggacacaaatactacagcaagtccggcgaatatgacttgggcgatggaattggagaagaattgtttggtgatttgtgtgatgccgatgggggttgctctgttaagttcgaatccttggcgccgtatggatttggctactgaagcggtatcccgtggtgatccatagagaagccatcttcccaatgggtcggtgaatctgtctccgcgttgcacacgtgtgcgcggcccgaacccataatccgggtatggcgaattcgcatgcatgccgttgccgtctaatgcgccgaaaatagaaattacgcgtctgttggtaccgtgaccgtccggctcataggagactctcgcgagtacgacatgatgggtcgctgcgagaccgatcaatgtcgatagaggctgcccgtgcgcgtcggaaattccaatatcgtagctagggccggagggataggtttcttcgttattctgcgcatagaatcctgctgcgagagtgatgagagccacggccaatatactggcgattttataagtccagtgcatgatacaccttattcccggtaacaatgtgtttgtgcggcggacgataggaagttcgctcgccgcacattcaataaatggtgtggatgctgcgaaatgattcaagcatcaaatccatagaaagcttgatccactttgccgcataccgcgtaagtccttgcgtaggcctccggtgattttctttgcgatcatgagtgctccttgttgtccttcattgagcggctgttttgccgcatgcaacacggtaagatgccaatgaggagcgaacgaagtctgtgtgacgggaatcgtcacagtgttacgatttcgtttgacggaggcgatttggggagagggtacttatgaagaacgggcgcctgattcggcttgccttggtggacaacgatcgttgctctgcggagatgatggctttgcttattggcaggacgattcccgaggcgcatatgctatgggttacggataatcccagtcttgccttggaacgttgtctgttcgatccgcggaagccggacatccttatttgcgatctcatgatggacgggctgaacggagtgcagctgacggaacgtattcgacagcggaacgtgcaggttggcgtcatcgtagtcacttcgtatgacctggcaacctatggtgaggatatcgcgtgttgcggagcccaagcgttgatttcgaaaagagatttcgcagcgaccatacgcgaggcggtcaaatcggtgtttgacgggggaacataccctcatggttggggtttgcatagccttgaagagacattgcatacggtggatgccgcacagccggaagcggatggtgccaggctcttctccgatcgagagctggcggtgttgcgtctctatgcacatcatgtaccgaccgttgaaattgcgcgccgcttgggaatcggtgtcgaaactgtgtacagctatgtgaaacgagccatgcgcaaggtcggggtgacgaggcgcggcgaactccttgattactgtgagcgataccatgttctgtgacggcagccgttttcttagacgtcgcttccgcgatttcgggaagtcttggcatggcgaaaagctcgcggcgctagcctgcgccttgtgcatagccgctgatacggtcatcgaatcgtgtatcaatccggtttgggatgcgtgggccctgtgggtgggtctgttgttcgtcatcctgtcgttgctctgcgtggcattcccgttcggcggcaatatcgcgttggcgatctcatggtgcgtggtgttccccttgccggtggatctgtccatgtcggtgagcgtggtgatagccgagccattaatcgtcctctcctatcaacgcatatggtgcggcgtggtgttggcggtggctgtgaccgtatctcgcgtggcgcagctgatatggcagtatgggttgccgatgggttgggatgccggggcgttggtgtccgttgtgccttggaccgtcatgccggcgttggcgtgcgttggaatcggtctgctgctgaattggcatcatcgtgagggggagagggagtcggaagcgcgtggcagggccgaatcgttggatttggcggcaaggctgcatgatgcgacgaccaatgatctctcatatctcatcatgagcatcgacaggatcatgtcggaacacccttcgcaaggagagtcgatggacttgccactgttgcgcgaagtggctcaacgggcgctcgatcagacgcatgatgtcatagcggttctcgcaaagcacaatgtcggtactgcgcgaatcccgcgatgccatgcgcgtcgctccggagaagccatcgttccgatcggtgcaggtcgattcgaggccgagatcgaacggcaccggcgggaactcgcagcgcttggtttccgaggcgaggtggttgtgtccgatcccttcgatctcctgagtcggtttgacgagaagactatccagttgacgcggtcgttgctggaagagacgtttgccaatatcgccaagcacgcggatcgcgaacaagggtatgtactcgccatacaagtgcggcaagacggactgtacgtatcggtggctgacgttcccgccaagatggcggatggagcattggcggaatctccgagaacattgggcatgggatttggaatggctcatctgcgtcaatcaattacgcggagcggtggttggctgcgcgtccaagaggaagacgggtattggagttgcctagcgtatattccgatatatcatcgggatacagcgtgaatcggaaggaaacagcgcatgggattcaacatcgaacgtgtggacaagccgtttgtggtcaaatcgccgtaccgaccatccggagaccagccgaaggccatcgaggaactggccacgcgcatcgagaacggcgagaacgacgtggtgctcatgggcgccaccggcaccggcaaaaccgccaccaccgcatggctgatcgaacggctgcaacgtcccacgctcatcatcgagccgaacaagacgctcgccgcgcagctgtgcgccgaattccgcgagctcatgcccgacaacgcggtgagctatttcgtttcctactacgactactatcagccggaggcctacataccgcagaccgacacctatatcgagaaagactccaacatcaacgacgatgtggaacgtttgcgccatcaggccacggccaacctgctgaccagacgcgactgcgtggtcgtggccaccgtctcctgcatctacggcctgggcactcctgaggaatacgccgggcgtatgctgtttctcaaggaaggccagcagatcaatcgcgacgacctgctgcgccggttcgtggccatgcagtacaagcgcaacgacatcgccttcacgcgcggcaccttccgcgtgcgcggcgatacggtcgaaatcatccccgtctacgaggaactggccgtgcgcatcgaattcttcggcgacgagatcgaccgcatctccacgctgcacccgctgaccggcgacgagatcgacgaggaaaacgaaatccacatcttcccggcctcccattacgtggccggccccgaacgcatggaacgcgcgctcaaaaccattcgcgaggaactcgacgaacgcctgacagaactgcgtaagcaaggcaaggagctggaagcgcagcgcctcaacatgcgcaccacctacgatctggaaatgctcacccaggtgggcgtgtgctcgggcgtcgaaaactattcgcgccacttcgacggccgcgccgccggcaccccaccgcacacgctgctcgatttcttccccgatgacttcctgctggtcattgacgaatcacacgtcaccgtgccgcagatcggtgccatgtacgagggcgatgcctcccgcaagcgcacgctggtcgaacacggcttccgtctgccctccgcgatggataaccgaccgctcaaatggccggagttcctgcagcgcgtcggccagaccgtgtatctgtccgccacgcccggcgactacgagttgggcttgtccgacggggtggtcgaacagatcatccgtccgaccggcctgctggacccgaagatcgacgtgcgcccggtcaaggggcagatcgacgatctgctcgccgagatcaaggcccgtgtggccaggaacgagcgtgcgctggtgaccaccctgaccaagaagatggccgaggatttgaccgactatctgctggaacgcggcatcaaggtcgaatacctgcattccgatgtggatacgttgcgccgcgtcgaactgctgcgcatgttgcgcgaaggcaagatcgatgtgattgtcggcatcaacctgctgcgtgagggcctcgatttgccggaagtatcgctggtggcgattcttgacgccgacaaggaaggattcctgcgctcctaccgttcgctcatccagaccatcggccgtgccgcgcgaaacgtgtccggcgtggtgatcatgtacgccgacgagaccaccgaggccatgaggcaggcgatcgacgagaccgaccgccgccgcgccaagcagattgcctacaaccgggaacacggcatcgatcccaagcccctgatcaagaagatcagcgatgtcaacgatatgctcgccaaggaggatgtggacacccagaccttgcttgaaggtggctaccgcaacgcgggcaaggccggcaacacacacctgggcgtgccggtactcgatcccaacgaggcagacaaacgccacgaggagatcctgaaggccggcctgcccgcgcaggacctcgccgacctgattcgccagctgtccgaacagatgcacaccgccgccgaacaactccagttcgaactcgcggcccgtctgcgcgacgagatccgtgatctcaagaaggagctccggcagatgaccgaggcggggcgatgacccgtcacatacatgggttagtgtagggaatcatggcagaaaccccactcgcatttgaaatcatcaccttcgtggtgctcgcgctgttcttcatcgtcgacctgttcgtcatcgggcgccgaccgcatgtgccctccaccaaggaatgcgtgcagcatatcgccttcttcgtggtcatggcgttgatcttcggcggatgcatctggttcttcgccggctccaggcccgccatcgagttctattccggctggctcaccgaatactcgttgtccatcgacaatctgttcgtgttcgtcattatcatgtcgaacttcgcggtgcccaagcagattcagaagtacgtgctttcggtgggcatcaccattgctttgatcttccgtggcattttcattctgatcggcgcggccctgatcacccgcttcacatgggtgttcttcctgttcggcgccttcctgatctacaccgccgtcaaactggtgctcggcggcgatgaggacgaggaatatcacgaaaacggcatcatccgtaatctgcgcaagatcatcaagatcaccgacgactacgacggcgagaagctgcgcaccaccaagaacggcgtgcgttactggaccccgatgctcatcgtgttcctgaccatcggcaccaccgacgtcatgtttgccttcgactcgattcccgcgatcttcggcctgaccaaggatccgttcctggtgttcacctccaacgtgttcgccctgctcggtctgcagcagctgtacttcctgttgggcgctctgctcgacaagctcgtctacctgcctgccggcctgtccgtggtgctgggcttcatcggcgtcaagctcatcatggaggccctgcacggcaataccttgccgttcatcaacggcggcgaaggcatccattgggtgccggaagtgcccacatggctgtcgctggctgtgattgtgctcgcaattggcggcgcatccgtggcttccgtgatcaagatgaagagcatggaaagcgccgagaagggctgaaatcgttagagaatacaacccttaaacccagtcaacacaacaatgtgagcgctcacaacacaccgtgaagaaaacttgtcatgagtcggctcgcgctagtagactgggtttcggcaaatggggcaatcgtgcctcgaaccaaattgaacaagaataggcaggcattcatgcgtaaagccaagatcgtagacaccatcggtccttccaccgaggattacgacaacctcctgaagctcgttgaagccggtatggacgttgctcgtctgaaccgctcccacggcacccccgaggatcacctcaaggtctacaacaacgtgcgcaaggccagcgaagccactggtcgcaacgttgccgcgcttgttgatttgcagggcccgaagattcgctgcggttggttcaagaagaacgccgatggcgaagacaaggttcagctgcagctcggccaggaattcgtcatcaccactgatgacgtcgagggcgacgagcacatcacctccaccaccttcaagggcctgccgggcgattgccacccgggcgacccgatcctgatcgatgacggcaaggtccgtctcgaggtcaccaaggtcgagggcaacaacgtgtacaccaaggtcgtcgtggccggtcctgtgtcctcccacaagggcatcaacctgccgggcgtcgccgtctccctgccggctctgaccgagaaggatgaggctgacctgcgttgggccatccgcaccggtgccgacatcatcgccatgtccttcgtgcgtttcgccaccgacatcgaccgcgcccacgagatcatggacgaggaaggccgtcgcatcccgatcgttgccaagatcgagaagccgcaggctctggagaacctcgaagagatcgtcaagaccttcgacggtgtcatggccgcccgtggcgacatggccgttgagtgcccgctggaagaggtcccgctggccaccaagcgcatcatcgagctggcccgccagtatgccaagccggtcatcgtggccaccgaagtcctcggctccatggtgaactccccggtcccgacccgtgcagaggcctccgactgcgccaacgccgtcctcgacggctccgacgccaccatgacctccaacgagaccgccgtcggcaagtacccggatgtgaccgtggccaccatgtcgcgcatctccggctacgccaccgaccacggcttcgaccgcatcccggagctcaagaacctcgacatgtcctccaccggcgccgtctcctccgccgccgtggacctggccgacaagctcaacgccaaggccatcgtcgcctacacccagaccggcgccaccgtgcaccgcgtctcccgtgagcgtccggccgccccgatctacggcctgaccagcaacgagcacacctaccactggctggctctgtcctggggcaccgaagccttcctgctcaaggaggactaccacgacaagtcccgcaaggatctcatgatctacacggacaagatcctcaaggacgccggcaaggttgctgacggcgacaagatcgtcatcctgagctctgctcagggcgatcaccagccgggccgcaccgactccatctacgtgcacaccgttggcgcttgcgactgatttcaggccgctggtagctgctgacagctagcacatagcacgcgaaagcccccccatccagaaagtggatgggggggctttcgttgtccgttatgttgcgattgtgcggtgattgcaatggcacgtagtcaccgcgatgatcgagcgtggtgactagtcgttgagatgatcgagcgtgccgctcttcagacgcagaatggcgaccatggtcttggcatccacaatcgtgccattgaccaccatctcataggcatcgtccaccgacaccatacgcacgtcggaacgcggagtctccgggccgatttcctgacgggaagccggggtaagtccggtggcgaagaagattgcggtgtgctgggtggaatagctcggcgtgttcataaaacgggtgaactgcgtaagcttggaggcatcgaaaccagcctcttcggccagcttgcgcttagccacatcggtcgggcgttcggacgggttgttggcgtggcctgccggaatctccaacgtccaacgatggttggcgatgcgatactgctcgaccagcggaatcatgccgtcatcggtgacggccagcacagccacagtgtcgccattgttctcctgaacaaagtagcgttcaaacgaaccgatctgattcgactcataggagacgtgatcgacattgaaataatgcgtctccacaatctgtctacgggaaatctccttgaccggagaggggcgccagggatcgaactgacggtaagtttcgttgctcataagccctcctaacaaaagcgatacatcgaaactacagcccattgtaagcggtgaaaccacgcagaagaacgggcaacacacgggtacgccgtccacgatatcgacgtgtttcgcctgttttaccggggggaatggaggactggcgcgtgtcttgtgtcgcaggagtcgaatcggtatgctactctcttcagagtgcttaggcacgccctcgtatcccaattggtagaggaagcagcctcaaaatctgcgcagtgtgggttcgagtcccaccgagggcactttagctaggagttcgctgaaattattacgaaccccattgttgggtaattcaagaaagaggttggcatggctgcaaggaagaagtccgaagaaccgagtatcaacgtcgatgaggtgctgaccgacgaagaactcaaggccgtagccgatgaaagcgaacctgctgagcgcaaggccgtggccgaggatggtccgcgtaccgtcgtcgtggccgaggatgaagccgtgaaccgcatggatctggtcgccatgctggaagacaacggttatgaggtcgttggtcaggccgccaacggcgaggaagccgtggaactgacccgcaagtatcgccctgatgtggtgtgcatggatgtcaagatgccgcgtatggacggcatcgccgctgccggcattatctgcgatgagaacatcgcccctgtcgtcatgctcaccgcattctcccagaccgatctggtgaagaaggccaccggtgccggcgccatggcatacgtcaccaagccgtacgaggaatccaagttgctgccgaccctcgaggtggccatgggccgtttcgccgagatcaacgatctgctggacaacgtggagcgcagcgaacgcaagctcaaggaaaccaccgaccagctcaaggaaaccgaagagaagctcaagaaggccgaagacacgcttgaggagcgcaagctcgtcgaccgcgccaagggtctgctgatggacaaggctgacttctccgagcagggtgccttccgttggattcagaagacctccatggaccagcgcatccccaagaagcgcctggctcaggccatcatcgccaagtacggcgatccgaagccttctgattcgggcgaacgctgattatcggcatcaccgtgctgagtcgtaaagcaacacaaacacactatgggagaggccagcgtgaccgtacccaccaatgaaacattgctggtggtggacggccactcgctggccttccgtgcatttttcgccctgccggtcgacaacttcagcacttccagcggccaggccaccaacgccgtctggggttttgccaccatgctcgcgcaggtgatcgatgcggagaaccccgaccatctgggcgtcgccttcgatgtgaagggcggcacattccgcaatgagatgcttccgcaatacaaaggcacccgtgaggcggctcccgaagagctgctcacccagctgccattgattcaacgcatgctcacggccctcggcgtcacctacatcgagaagccgggattcgaaggcgacgatgtgatcgccaccctcgccaccatgggagacaaggccggctaccacacactggtattgtccggagaccgagacgccttccagctggtggatgacaacgtcaccgtgttgtacccgggtcatcacttcaaagacctgaagcatatgacgccgcagtccatcatcgacaaatacaaagtcactcccgcacaatatccggatctggcggcgctccgcggcgaaaccgccgacaatattcccggtgtgcccggtgtaggcgatggctttgcggccaagtggatcaaccaattcggttccctcgacggcatttgcgagcacgccgatgaaatcggcggcaaaaaaggcgaatcgctgcgggccaatatcgaccaggtcaagctcaatcgcaaagtcaacgcactggtacgagacgtcgatcttggcgtcgatattgaggatctgacattcggcaccgtggacgtggcacaaatcgacgccctgttcaaggagcttgaattcggaccgcgtaccaggagtcgtgtactgaaaaccttcaataccggtgccaaggtttccaacacatacggagccggcgagtctacgaataatgaacaggacgagcaggataacagtctcgatctgaacctgccggaacccacgagcatcacctcttcggagcagttcgacgaatgggtcaaggcccatcgcgccgaggtcaaagttcccggtgaaatcgccgatttcacggtttccgactatggcgatggatcgcagcggcatgccgtctgcggcgacgcggtcggccgcgcttggaccgtggccgcatggggcgacgaaaggccggggcgtgccacggcacaaaccattgccgtggccacggcaacatcagcggccatagtgccccttccaatcaccgataccctgcgagcacagcttgcgcggttcctggaaagcgagcactcccgcaccatcgtgcatgggtataaagagttgctgcatcttctgggcgcggtagatcttgacatggacctgccgatgttcgacaccaagcttgccgggtatctggcccaaccggatttccacgccgatagcctcaagcaggcggccgagcacttcctcgacatccacttcaccgaaaccgaacagccttcgcaaggcacgttggacttcgatgacgatcaggtcgaagaagatccgaacgaacatcgtctgcgcgatttggccattatccgcagcctcgccgtcacgcttgggccgattatcgacgagcgtgaacaatgctggctgatgcgcgcgattgaacttcctgtttcccgcgtgctgcacggcatggagcacacaggagccaaagtcgatagcgttcgactcgtttccatgcgtgaccagtttgccgccgaggctcgtcaggcgcaggaaatggcttgggagtatgccggcaccgaaatcaacctgcaaagccccaagcagctgcagaaggtgctgttcgaagatatgggtttgaagcccaccaaacgcaccaagtccggctcatacaccacgaatgcggccgcattgcaggatctgtatgtcaaatcagtggacaatgagcgggccaacggtttcctcggggcgttgctgcgccaccgagagattaacaagctcaagcagatcgtccaaacgctgatcgatgccaccaacacatcagatgagcgcatccacaccactttcgagcaaaccgttgccgccaccggtcgattgagctccgtggacccgaacctgcagaatattcccaaccggaacgccgccggtcgtgagattcgcggcgtgttcgtgccgggggaggggtacgaggccctgatgagttgcgattactcacaggtcgagctgcgcatcatggccgatctgtccggtgatgaggcgctgatcgaagcgttccgctccggagccgacttccacaaatacgtggcctcgatggtctacaagctgccggtcgaccagatcaccggcgaccagcgcagccacgtaaaagccatgagctacggattggcctatggtctgagcacgtatggtctcgcccaacagctcaagatcgcgccacgtgaagcggaagcgttgaaaaaccggtatttcgataccttcggcaaggtgcacgattaccttgaatcgctggtggccaatgcccgagagaaggggtatacggaaaccattttcggacggcgtcgctacttcccggccctgcattcgaccaatcgtgttgcgcgtgaggccgccgaacgtgcggcactcaacgcaccgattcagggatctgccgccgacatcatgaagatcgcgatgattcgcgccgagcagaccttggcagaggcccacgtcaagagccgtatcattctgcagattcacgatgaactggtagtggaaatcgcgccgggagaaggcgaccaggtcaccgaactggtacgcaacgccatggaacacgccgtcgaccttgccgtgccgctggacgtatcgtgcggcatcggttccgactggcagctcgccgcacactgacaatttctagctcccctcgggtgaggggtgctgagccgttgagcaaacagtccagtggattgtttgtaggcgaaggcgagccgatagtcgagcaatgaagagcacgagcatggcttgtccgcaattgcagaatgagtcccttgccgcaatagcccactacaatgggacatatgccgaatctcaagcaaatcatcgacgttctcgagaccctgtacccattgcgctacgccgaggaatgggatgagccgggtctcatcgtcggcgatctgagccacgacgtgcaccgcatcgtgttcgccgccgacccgacctccgccatcattgacaaggccatcgctactggcgcggacctgctcatcacccatcacccgttgttcttccgttccgtacacgagacgagcggactcggtttccggggcgacatcgtccgcaggctctaccagcaaggctgcgggctgtgggtagggcacaccaatgctgacgctgcgtatcgcggcgtggggcaggcggcggccgactacttcggactcatcgaccagaaaccactcgtgccgattgacgatgccaacgcctctcatccggtcggcttggggcgtgtgggtcgtttgccgaagcctgttgccctgaaggatttcgctcagcgtgtattcgacgaagtgtccgatcatggcatgaccaccgcgctcggcatccaggtatgcggcgattcggacacttttgttcagtatgtggccattctgcctggctccggtgactccctgttcaacgaggtgcgtgccaccggtgcggacgtgtacgtaaccagcgatttgcgtcaccacccggtgaccgacgccatcgaacaagcccggtatgaagcccgtatgaggacccaaggcatcatgctcggccatggaatggcgggggagagccatgtgcgtccctgcttcatcaacacccctcatgctgccatcgaatccatgtggttcaactacgcgatcgatgacgtgccagccgccatcgaacaagcgaccggagcaaggcctgaagtcgagtggttccacgacacgaccgatccatggacgctgtccattacctcgcatcgggattaaggcgctatagtgacgtggcgaaaacgttttttccgaggagatgacatgtttgggggaagcaagcaggaacaactggagcatcggctcgaccataagctgaacgcctcctcggacggcatcgacatggacgtgcccgccaaagtgatcagtagcgaaaccgtttataccgggcgcatcttccacgtggacgacatgcgcatcgctctgaccgacaagcagggcaaggaacacgagatcggccgccaggtgctgcgtcatgccccctgtgtggtcatgctcgtgcacgacatgtccaccgaccgttacctcatcgaacgcgaataccgtgccggatcggacatgttcgcctacgggcttcccgccggtctcatggacgagggcgaggacatcatggacgcggccctgagggaactggccgaggaaaccggcgtggtgccggaccgtgacaccatgggtgttgacttcgtgggcgatttctactcgtccgaaggcatgaccgacgaactggcccacatcatggtgttgcatttgggcccgttcagacgggagcagcgccatttcgacgcggacgagcacgtggaatccgcgtggattccgtggagcgaccttgccgccacgcgcatcacctcatccaattcgatgatcgccatccagcatgaggcgttacgcagactcatcgccaggaactccgacaaagacaagccgtcgctgttctcctgacgttcaactccccggcacatcagtgacacaagaaagtgggatactgaaaactatgcagatcagacctggatcaatgtatccgctgggcgccagctatgacggcgccggtgtgaacttcgcgctgtactcacaggttgcgcagaaagtcgagctatgcctgttcgacgagcacgatgcggaaacgcgcatcgaaatgaccgaacagaactcatacgtatggcataactacatccccggcctccagcccggccaacgctacggctaccgcgtctacggtccctatgacccgatgcacggcctcagatgcaaccccaacaaactgctgctcgacccgtatgccaaggccatcgaaggcaacatcgacggcgacgaaagcctgttctcctactggttcaaaagcccggacgacacctcggcgatgaacgaccttgactcggccgcccacaccatgaagtcggccgtcatcaatccgtatttcgactggggcaacgaccagcacccctacatctcgtaccacgattcggtgatctacgaggcgcatgtgcgcggcatgaccaacctcaacatggacgtgccgccggacatccgcggcacctacgccggcctggcctatccgagcgtcatcgaatacctgaagaagctcggcgtcaccgccatcgaactcatgccgatccaccagttcgtcaacgactccttcctgcaggagaagggcctgtcgaactactggggctacaacaccatcggcttcttcgcgccgcacaacgcctactcctcctccggagagcgcggcgagcaggtcaacgaattcaagtccatggtcaaggcctaccatcacgccggcatggaggtcatcctcgacgtggtgtacaaccacaccgccgaaggcaaccatatgggccccaccctgagcttcaagggcatcgacaacgcctcctactaccgactggtggaaggcgaccagcagcactacttcgacaccaccggtaccggcaactcgctgcttatgcgctcgccgcacgcgctgcagttgattaccgattcgctgcgctactgggttaccgaaatgcacgtcgacggcttccgcttcgatctggccgccacgctggcacgccagttccaggaggtcgacaagctgtccgcgttcttcgacatcgtggagcaggacccgatcatctcgcgcgtgaagctgattgccgaaccgtgggatctgggctccggcggctatcaggtgggcggcttcccgtccagctggtccgaatggaatggccgctaccgcgacacggtgcgcgacttctggcgctcacagccctccacgttgcccgaattcgcatcacgcctcatgggcagctccgatctgtatcaggtcaacggccgtcgaccggtggcgtccgtgaacttcatcaccgcgcatgacggtttcacgatgaacgacctggtcagctacaacgaaaagcacaacgaagccaatggcgagggcaatcgcgacggcgagagcaacaatcgctcttggaattgcggcgttgaaggcccgaccaatattccggacgtcaacgacttgcgtcagcgtcagatgcgcaacatgttcgccacgttgctgttcagccagggtatcccgatgatttgcggtggcgacgaagtggcccgcacccagcagggcaacaacaacgcctactgtcaggacaacgagatctcctggaccaactggcatcttgacaagggacgcaaggaactgctcgccttcgtttccaaactcattcatctgcgtttggatcatccggtgttgcaccgccgtcgcttcttcacaggccgtgagcccggcgacgattcgaacatgattccgcaggtcgaatggttcgaccacaccggctcgatcatggatatggacgactggcagaacacgcatgcgttctccatgatgatctatctgaacggttcggatattccggaggtagactggtacggcaaccggatggtcgacaatgacttcatcctgatcttcaacgcgcattacgagccgattatgttcaccctgccggatgagcgatacggccgcaaatggcagctggtcgtggatacgcacaacccggatgggccggaactgagctatgaggcgggcttcatgatcaccgcccagtcccgcagcttcctcatgctcatgagcgacaaaaagcccaagaagcccatgggcctataaccagaccgaatttaagctccctctgacgagggagctcccagtgtagccgggtgagggagagaccgcagcaaagccgcgaacccctactcgcgccccttacgctcctccacgagccgagcatccccgaacgcaagtagatgctcgccggcaagcgggcgcggctggtcgagcagctcgcggaaatccaggattccatcgacttcatcgacgccaaacagcgcttctacgacgacgtcctgtctggcgcaaccccatacgtaagcgtgctcatcccatccgcggcgctcgcaaaggagtcagaggaaccgggagcattgaagggtgcggagaggaaataggttcgaccgagccgtttcttcctccgggatgcaagtgcgaacaacggtttgttgtacccgcgcttggcgaacgggccatgcccttagaatggaatcagcaagcgcacagcgaggcgctcgaatcgttttccgatgtcgggaggtagtcatgtcgatcggtcaggttatcaaagtcgtgcgcgaggagcgaggtcttacgcagtcgcagttcgcgcac

SEQ ID NO: 293 - DNA, 6611 bp, Unknown
  R101_18m  MAG No. k141_77311
gggaaccttggattcccggcggccttgtcggagatgcttgtccaaagccacgatggctggattcgcgttcttccggccctgccggaggattggcatgagggaagcttccatgcgctccgcgcaagaggtggaatccaagtggatgcgacatggacggatcagacagtggaatatacgttgcgctgttcgaagcctatggagattacgctgaacgttctggggactgatatgggacgtgtcgcattgtctccggataagccattcaagggaaccatccggcgttaacgtattgcgttatatccgttactaaatgttgcggaccgtctttcctaatagaggaggacggtccgcaatctttttttgatgggaaaggagattccgccattttccacgattggtatgcgcagatgaacctgtacagtgaaagctatgcgtgtaatttctggacgattcaagggtgtggcgcttgctacgccgaaaacgggtacccggcctaccacggatcgcaccaaagaggcgattttctcgcacctcgactcatggggagtgctggatgatgcccgtgtactggacctgttcgccggtactggtgcgttgggcatcgaagcgctgagccgtggcgcgcgagaactcgtggccgtggaaagttcccggcctgcggcggcgctgattaccaagaccttgtcgcagttacagaagaatcgttcgtgggatgcctcgctcaaggcccgtgtgttcaccaaaaaggccgagcaagtggctggcggctttggtgaatcctttgacgtgatattcattgatccgccctacgcctatgagaccgctgaatgcaatcagttgttggccaatctggcggtgggcagcgccaccaacgagaacaccgtgattatgctcgaacgctcggtacgctccgacacccccaccgcccccgaaggctggcaaatcactgaaagccgcaactacggcgaaaccgccgtcttctacatcgagcccgcggatgacgactcggatatagagcgttccgacgattccgccgcgtagtgaatctcccaccgtgtggtgaattaatcggcgagccggcgcggatgggtggcggagacctcccagcccaaggccatcagggtcttgcggtcggccttatccagcgccttgcaatccagtgccgcgataaggtctggccggatctcggcggtgcgggccagcgcttcgtcgcggcgaaaacggtccaccttgccgtggtcgccggacaacagcacgtccggcaccgcaataccacgccacacggccggcttggtgtactggcgatgttcaagcagtgcgtcctcgccggtgtaggattcctcgacaatcgaatctgggttgcccatgaatccgggcatcaggcgggtgatggcctcaagcatcaccgacaccgccacttcgccaccgttcagcacatagtcgccgatcgaatattcgcgtacgtcgacgccctgggagcggtagtagtccgggatgcgcgcatcgtagccctcataccggccgcagccgaacagcagatggtcggcatggctgagctcggtggcgtcgcgctgggtaaacaacggggccgatgggttcgggaagatgagcaccggtgtgccggatagggcggaggattcagacggtcgcgagaatcccagcagttcgtccaggcattcgctccacacctcgggcttcatcaccatgccggccccgccgccgactggcgtatcatccaccgaatgatgcacatcgtgggtccagtcgcgcaggttgtgcgctttgatctccaacaatcccttggcctgggctttgcccatcaggctgaggttcatcacctcaaagtattcggggaacacgctcacgatatcgatcttcatgttatccagcctaacggtagccccgcccgcattacacggccaccactacactattgcggtgatgaatacgacgatgaacctccccacccgcaaaaagcccgaagtgttgtccccggccggcaacctgaggggcctgaaaaccgcggtcgattatggtgccgacgccgtctactgcggcggcaaagccttcggcatgcgatcggcccccaaaaacctaagccttgaggactttgaggaaggctcgcgctacgcccatgaacgcggcgcccgcgtgtacgtgacctgcaacgtgctgccgcgcaacaacgagatcgaagccatgcgcgagtacgtcggccagctcaaggacaccggcgtggacgcgctgatcgtctctgacatcggcgtgatgatgatggcccgccaagtggctccgaacctggaattgcatgtctccacgcaggccggcgtcaccaattaccaagctgcgaacgccttctatgagcttggcgctcgccgtgtggtgttggcccgcgagatggacttgcaggccgtgcgtgatattcgcgccaacattcccggtgacctcgacatcgaatgcttcgtgcatggcgcgatgtgcatggcgttctccggccgttgcctgttctccaactatctgaccgggcgtgatggcaatcatggcgaatgcgcgcagccatgccgctggaagtattcgatcgtggaagagaagcgccccggccagtacttcccgatcgagcagaccgagaacggcgcctatctgttcaattcgcaggacatgaatatgctggggcacttggatgatttgattgactccggtgccaccagcctcaaaatcgaaggccgcgcgaaaagcgcctactatatcgccgccatgaccaacgcctacaaaaccgcggttaatgaatacatgattcaacgcggttttgaagacgctgatggcaatgttctgaagcctttccgtgaccgtgtgattcgcccgggcgaccccgattttggccaaggaaccgaagatcaagtgatgagcaatgccgatgccgcgttcgccggtgtggccgatgagggatatgaccgtggctctgatactgcggttgccgattcggtcaccggctcggttgccgcagaacgtgaccgcgtgacggttgctgatgccgccgactcaactgcctctggtacgtcggccggcaccgccgtcgaacccgacggcatgagctcccacgcccgctccacgcgccgcaagtccaacaccgcggtcgaacagatcgagaccgattggaagcatgcggccgttcgcccggccccgcacgtcgaactgcccgaatggctgctcgaggaaaccgacaaggtggcccaccgcgactactccaccggcttctattacccggagcacaaggtcacacagaacaccgaccgctccgcctacttccgctcatggctggtagtgggcgaagtgctgagctggagcgcggacgaaggcggacgtgtcacgctgatgagccgtaacaagatcgagcccggtcaacaggttgaattcctgctgcctggcgagagaccattggtctttaccgtgccggaaaccggcctgcgcgatgccgatggcgcgccagtacccgccatcaataatccggcgcacgtgttctcgatgccctgcccgcaccaggtgcccatcaacgccgccatccgctcgcgcaccaaaaagcccaccctcaaagccgaataacctaccactccgcccccgctgactgggggtggtcatgggaatcatgaacaccgcccgcacccaagaaagaatgccttatgcctgaatacagcgaagaaatcctcgattccaacagcatcagctctaccgataaagccggtcgccctattccggtgaccatccccatcgcactggcccccggcatcaaggtggtgtacaccacgcgactgggtggactgagcaccggcgattacggcaacctgaacctcggcggcaagtccggcgacgaacctgaggccgtgctgtcgaaccgcatcgcactcgccgaagcggtgcaagcccgcctatcgctggtctcccaagtacattccggcgtggctgtggacgtggacgactcgttcgtcatcaacacccccttcggcttcgacgtgtccggcacacatggtgagactgacactccgcacgtcatcgaggcggacggccaggtcaccgcacaatccggcatcgccctaggcatgttcgcggccgactgcctgccggtgctgctgggcgacccggtcaccggcatcatcggtgcggcccactgcggccgtcgtggtctggagcgtggtgtgatcggcgccacggtagacctgatgaagagcaagggtgccgacccggcgaacatcgtcgccacactcggcccgcgcatctgcggcgactgctatgaagtgggcgacgagatcgccgatcagttcatcaagcgcttcccgctgaccaagacgaagacccgcttcggtggtgccggcatcgacatcgccgaggcggcaatgatcgacctcgccttcgccggcgtacatcaggtggtcgattctatgccgcgcgtgcacgccgccacccagtaccttgaggaagacccggaactcgccgaactgtgccgcatggacggcgaaggcccggccgagctcgcggagcgcatcgacaacatcagccacagcatgtgcacgctcgaaaacccactgtggtactcgcaccgccgcgccgcgctcgccaacaaaacacacgaaggccgcctcctcgccctcatcgtgcgtgactaaacggagaatgcgggcacattccgtggagaagatgtgatgcagttcacggacggccagccctcaccctacggtggtgcctatgactgagagagatttcgatacccccgtcgagacgcctaccgtccagccggcccccgctcagggcgccaaaccggcacaaaccgtgccggtggtggccgtggtgctggccgccggcttcggtacgcgcttcgaccccgacaatcccaagcagcttgtctccgtgggcggcaagcccatcgtgtgctggagcattgatgcctttgaacattgcgatcgcgtcagcgacatcgtggtggtggtcaatcccaaggtgcgcggtgaagtggaaacgttggttggcgagatgggctacaccaaggtccgcgtcatcattgacggcggtgacgaacgtgtggacagtaccgccgccgcgctcgacatgctggctacggctggcattccggacgatgccaagattctgatccatgacgccgtccgtccgttcgtggaacagtccgccatcgacggttcgattgatgcgctcgaccagttcacggccgcgaccgtggcctacacctcaaccgacaccgtgctgttgaccgaggatctgggcgatttgaaagtggtcaagtcggtgccggaccgcccgaacaccttccgcgcgcagaccccgcaatccttccgcttcgcgacgattcgtcacgcttacgatctggctgccgccgacccggacttccatcccaccgacgacacgcgcgttgtggtcgattatctgcctgatgaacccgtcgccattgtctccggtgcggaaaccaacctgaagatcaccacgctggaggatattcccacagctgagcgtatcgccgaggagattctcggtcgtgatcccaaggaagaggcccgcgcccgcatgcacgccctgctggcccaagcggccggccagatgcatcgctagactggcattatgcgtgaactcaatgttgtgatctccggcttcgaccactatgacggcgtggaggtcaatcccgccgtcgaagtgcccaaggccatcgccgagcaggggttgggcgtctcctctgctccggacgatccgttggagcaggtcgccgtcaccgtccatgccgtcagcatcccggtgagcttcgccaaagcctggcccacgctgaaagagacgattgaggccaccaagcccaatatcgtcatcgccaccgggctcaagcacgcagcccgaggcgtgatgcttgaacgatgcgccaccaacctgatggacgcgatcaagccggacgcggacaacgtgaccccacgccgcgaacccatcgatcccaatggcccggccgcctattggacccgcctgccgttgcgctcgatcctgaatgatttcacggacgattcgattccggccaccctgagctcggacgcaggcacgttcgtatgtaattcgctgttctacaacttgctgaactggaccgccacccaggagcgggtgctgggcggattcgtcagcttcccgccggtcgtgccggcggattccagccagcatggtctgccactcgaccagcagatcgccgctggccgtgatgtggtgcgcgaagccgtgcgctactatctcaagccctccagctccggcatcctcatcgcctagcacgctgcgcgccacgccggaatagaacatggttcgcacgcattgtaacgattgcgcgtcactcaacgcccagcgctagtgcgatgcgctacagtgcttcaaggatgtgccaagagctttatgcgtgtgcgaaaggaataaacagcgatggtggatcgtttcccggtggtgctgcgaggatatgacaaggagaaggttgatgctgccttcgacgctactcaggagagtgtgaagcgtgcgcagcagacgttggccagcatgcgtgagcagattgcggcggatgacgaccgtattctgcaactgcaggccca

SEQ ID NO: 294 - DNA, 44290 bp, Unknown
  R101_18m  MAG No. k141_77510
cggcaaggtgagcgtcggcgtcacctacgaatggccggcgaagacggtgaagcgcatagcgggggtggtcggcgcccgctacgagccgtctatcgttcgacggtcaggaacgcctggctggcgatgaggttcatcataggattctggctgtcggatgtggtactccttgcggcgtacctgtatttcaaggatttcgcctttctgttctgcctcattctgatgacgatgatatgcatggtcacgatgatggtgggacggcccgtcgcctggttccgcctcatcgcacaggcgaaggccaacatcgtcgatgatgagacacgcccgtaatcgtcgttttcgctctgttgggggagcacatatgcggttgcgatgacggcgcgtccacggccatgatcattcaccatccttgatgatctcgggggcggaggcgtccgcgctggcggtgaatcctcccgtataccaggagtcccacgcgggcgtctccgtcgaatggcgcatagcgtcccgtgcggccccgatggtgaatccgtcgccgtcgatgcgtgtgatctgcgcgatctcgtagtggacgtccagcccgtctttccgcatggcggtgatgaacgccgatgcgaatgtggcgaaccgctcacggtccgtcacggtttccggggagatgtagatctccatgctgccaacgaaatacgaggcgagatcgtcgacggcggcggacggcgacaaccgccattgggtctcgttcttcggaccggtggggtcgctgatccggtagacgcagtcgagatcgggatgcgccgcgaggaaccggtcgatccgttccgtaagatgaccgttgtagtcgtcccggcgcagcgccgtgaaatacgtgtccgcgacatacggaccgagatcgttcccgtcggcaccattgccttccacataatccacttcgaacacgtcgccttgcaacggccccgatgcgggcgtcacgttgatccaccatgtcgggtcaagcagttccggacggtgaaatccttctgatgcacggaattccacgccataccgttccgacatccggtcaagcagcgtctccgccagcgtgaccagacggaacagttgcgagtcgggccaaccgtccttcatgccggcgacgttcgcgtcccgctcctgtcgatcgttcagcagcgcctccgctatcgagatctgcctcgctgtgggtgtggcatccatgtcgtatcctttcttcgcgtatggcggccagtccgaaaacgtcccatttccggtaccgccggcgcccgccccgttcgcatccgcatcggcgtgatgcgtgagccatacgggaggagcgcatccggtgagtcccgcggcgatggcgacgagcgccgccaatgccgcggcgcatgccgccagccgtcgtctacccgcccaactcattgatcttccccgcctcttcggcatccgactgttagaaccgttgcgacgattctacagcaagacgcatcgaacgatcccgggaattggcggcacccgctgacctgatgtaggctgttcccactgggcaatcgcattcggggaagaggcgtcaatggctgtactgacagatgctgaagctcgtcgtatgctggaactgctgaaggaagctttgtctccgaagtccatcaccctgaataaaggcgagaagcaattccaattgcatcagataagtttgtagtcaaatgaatcgtggtgtttacgacgagaagaaagtatgacgagttctgattttgactcattaattcgaagctacggaaaatggctgtctgataacacgacttatacgcaactggatgagtggtatgaagttaatgttccgcttctggatgaagacaacgactatacgcagttctatgtgaagcccgggaagaacagcgtaacgttctctgatgactgtgccacaagtcgcatgggatgactgtgacggaatcacgtttggcagtgctcaaagatattctgaatcagtttggtattgaacgtaacggcgacgagcttactctgacgagcgatactgctgattttgctgatgccaagaatcggttcctgcaagctatcatcaaagttggtgatatgtctatgctggccaatcccatgtgcagacgtattttgcagatgacattcgtatgttctttaatgcgaacaacatacggtatgtggaagacgttcaattccgtggcaagtctggtttgctgtgcccgtatgactttgtgttgccgttcacgagtaaacagccggaacgattctgcacatctattacgcggccttcccagcgactcatttccagtaccttattttcatgggaggatacgcaggcggcacgaaagacaccaagtgaactggttgttgttttcctcaatgattcggatcggcgcattgacaatcagctaataaccgctttggaaaagtacaatgcgtatcccattaagtggagtgagcgggaatttaaggagaacttgtacaagcttgcttcgtgagtggtgtttgtggccttggtcgggagcgaggtttctgctgtttgccgtgttgacctcccctcagtcgcctacggcgacagctcccctcggggaggggagttaaggaagcgcttaacgtgcgtggggcttcagccgctcccaatacgcccgaatcgcgccgaacgaatacaccgcgatcgcgacccaaatcaccatgaacgccgcgtagccctgcgcgcgcatcggttcgtgcagcaggagcacagccacacagaactggatcagcgggttgagatattggatgaaactcacggtcaggtaatggctgtgctgcacgccgtaggagaacatggccagcagaatcgcggtggccaggacggagaacgccactaacagcgcgaccatggccgccaacgtggcgaccaaacgatacgcgagcacgctgatggcattcatactggacagtgcgcgccagtacagcggcagcacgccccagccgatattggacacgagcggcgcggctatccccattcgcgtctgctcgacggtacgaaccgaagtcacgtctcaccaccatagcgactgatcacatgagtgtcccgcacctggtcacatggcatattggacttgctgatgatgaacagtaccggttattgttagagtcttttccacaggacacggagattgaacagatgattcggccttttctgagggcgcgaatcagattcgtaacgcagtggtttgccccagactctgttacggtgataataacttcatcgttgataagggagtcttcatggcaggcaatggcaacacggcatttcgtttccgagtcactttgcgccttgacgggcgtgaatgctggcgggagattctggtgccggcatcattgacgttcttcgatttgcatgcggtattgcaggaatgctttatgtggtacggcgagcatctgttctgcttctgcgccacatttccggatgggaagcaggtgcaagtggaagaattgtggggagaggagccctcataccatgaggcgaaatacgaacaatatatgccggtggagccgttgccggaagttcgcattgcttcggaaaccgagctgggcgacgtgtttcccaaggcgcgtaccgctcgctattactacgattatggtgacgattggatccatgatattaagctgctgcgtacctaccgcagcgtgcacgttgcggatcctcagctttgggatggggcaggggatgcgcctccggaggatgtcggcggggtgtatgggttcgatcggttccttgataccttgggcaatcccgaagatgaagaacatgatggcatggttgagtgggccgaggaccagatgtgggatcgtttcacgctgaaccgccatcgtgagcgtctgttccgttggcacaagcaccgtgacatgatgttgcagtagatggcgtggctacaatatgagcagctgtcagcggaatagccgtttgtggcttgcgggctaggggctgaaaatgctataaatatattgctttactcggaaacgagaaaggctccaagtcgccggggggctcccccggcattttttgtcaacggggacgggggtgcgatgccgtctgtattgagcatcttcgctgatgagagcggtgagtggggtaaacgatcagaatattatttaattactcttgtttttcatgaccagtctaaggatattagtcttgccttagagcggtaccgccagtcgttggctgactatggacttcctgatgtccctttccatgctgggccgctgcttaccgggcatgatgcttacgaagggatgagcctatcggagcgtaagaggcttctgggtttattcgttatcatgactcggcggctgccgattacatatcggacgtttgtgcatcgtaaaagtgattttgacgataaccgccaacgttttgaagcgcaactcaaacgcgatattgttaatctacttttggcgcatctttcggatttccattcttatggcactgtcaaggtgtattacgacggtggccaacagatagttactgatgccctgcgaggcgggattgagtatgcactctccatagatgccattgtctatcgtgacgcttctccacgcgactaccggcttgaacaagttgcggattttctatgcacccttgaattgacctgtgagaaattccggaatggggaacaaactgaaacggacaacaagttttttggtgattggaaatccttcagagtcaattatcttaagccgatccgcaggaaaagattggaatcataaatttggcagtgcccatatatattcgggacacaattgaataacacgaaatagcaaacaaaatccccggacctacacaatcatcgccacgacaatctcagaaaacaccgttacggcaatcagtggtgcggtgctgtcgatgaaggcgggcatgggtggcagatggcagtaggcgaggtagcaggccatgtcggcgataagcaaaatcagcaggatgatggccaaaacgatggcggcggttgccccgagagctccggaactgtgcaacatagtcagcgcacatagttccagcgtgatccacatgacgatgagcaacagttccgtggtagtcggccgttgcaacagtcgcgaagtaagcacggccagaatggtataggcggcaaggccaccgaccgcgaaccgctgaatctgctgatttcgccggccctattaagtccctcaactccatcaatcgccgtctgacccatcacatcacgcttcatacacattgccgattgacagtcctagaacacagtctagaactgtcatggtatgttcgcgcagataggggctccaacaaaattggctaaaagagaactcggcaacctataacaaggacgcgcccgtgtacccttaccgttcagctccgctcacgaatgaaatcgaagatcacgtcgaagacctgttggctccagaaatcgtactcatgttcggcgccgtcgactagcaccagctgcgcgtccacgccgtgctcggccagccggtcgcgcatcttgacggattgatggtaggggaccacggtgtcggcggtgccgtgcaacaggagcatcggtggatactgctggtcatcccgcacctgcaggtaggggctcatgtcagccgcgcgctgacggacctcggcattgatgccggtctcatgggtcgcacccaccacggccgcgaacgggccgaaatagtacagccggaatggattggtctcatcgtcgaatgcgtcgacagcttcaagcatgtcggtgggcgggaagcagctgaccacgtacttcaccgcatcgctctcatcggcattggtgccgtcctcataccgcggatcgtcggaggtcaaccccaccagcaacgacgtgttgccgccggacgacgtgccccagataccgagacggtcggggtccacgtgccattgacgtgcgtttgccctgagatagcggatggctgctttgacgtcctcgagatatgcggggaacacgtcatggggatcgttcgaggcgtcgcgatgattcaccgtggccaccacaaagccttcgcgggccaaagccgagagctgcgggatctcgtagtcgcgatgcggcgtggtccaggcgctgccttgcacgaataccacggtggggtagcggcggtcatcgtcatcgccggtggattgcggggcgatgatatccatcaccagatcatcggccccggtcttgtacgccacgttgcgggtcagcgtggccaatccggcaagcgtgggattgtgcgggatatggatggcattgtttgcgccggcattggcatcggtgactttggctgaatcggtagtgttcatggaatccccctagctctgttgctatagaggtcatcatacaagaaatgggcatgattacggcacaacgatgtctcggtcacagcgaagacatgaaggcgcgaagacgcgcccggcagcgcgcgctgcctgcctgcgagttgccttcaagtgcacttcaagcgataaggtgacataagcagcggcaatggagattgctgcccggcaacgaagcggacagtgcccgttcgccgattcacgataacagaaatgagacactatgaagactcaggaaatcggacaacccggcatgattgcgtcacgagtggcgctgggcgtgatgcgcatggacgcgttggatgccgccgatgcggcacgtaccgtggccgtggcccatgattccggcatcgactatttcgacacggcggaatgcatacacagatgctcgacgctgaaatccaattcaatatggcgagcgatcccgcagccgatcgcaccggcggcatcctgccttattcacggctgaagcatatgaccattcaggcatggtgcccattccaatccggcacggaatacggtccgttcgtcggcaacgagcatttccccgagctgaacgccgaattgacccgtcttgccggcaatccgttggtgtgagcgagagatgacgagaccaatgccgttgaggcgcgtgttcagcgtgcatacatctcaacggcggtcaatgctgtgtcaatgccaacattcagtgcctccgggcgtgcaccatctggcgaaagctgatgcgtatgtccatacagcagtctgcggccgtcaaacggcaacgccttgccgctgaacttcgccacatcatcgggccaactgtatgccagatccttccgatacgggtaatgtgaaagattgaccgtaccgagtccctcaatctcaaccgtatcgtgcggctccaaactttcgaacaggttgagtgcggggcggtcttccagccaccagtcatcatggttgccgatcacaccatgcagatgcttgcaattgagcgctcgcaggcagttcttcagatgggtcagcgatgtgcggaaaccgatatcacccagaatccacagctcatcatccgggccgaccaaagtgttgatatgatccacaatcgccttgtcatgcgcatccgtatcggcgacctgacgaaacgtcagccccgcgccgaacgtctcctccttggcccaatcctcggcggtcttgcgatcatgcgcgcgcagcacctcctcatagcgcgagcgcgtcggatcgaacgtcgtgaaccctcgcaacaccgtgaccagcggatgcccgaaatgcgtgtcggtcgtgaaatacctcatgacagtcgccttcccttttcggcgtgcagcaatgatttcccatcctaggcgcagccggcacctgtcggttcgtgttgccataatgaggcgcattgcaggggaacccgtgaacgcaagctgccggtcatcgtggcggcgaacgggttgagaaaggcgctgtgcctgacccttggaacctgttggccaacaccatcgaagggagcaacgatgacttttgacgccgtcgcattcggcccgatcactctgaaccacctgccgccattcgcccagcgcctacgacatgcagtacacgtggaaacccgaatgggatgtgtgaggagttcgatggatgagcggtgggcgcgtgctttgcgcgccaaaggcattgatattgacgaggctgaaggtgctggtgagaaacgggcgcacgacggcaaacggcataccaacatcacgggtactggtcgacgctccgagtcccagccggctgccgggctccgcggtcgatccaataccagcacgaatctgccggggccgaaggtgacggcacgcgccacgccattcaaggccaccggtcataagggcggcatcagccggcaggggaattgagctgatcgcagaaccatcgtgcgatgaatgggcgtggccaacgccattccgccattgttgagccgcttctacttggaccggtacctctttgaacggagatattccatattgaagctattccggcatcatatggcacgtaggaaatcccggatatcggcgatttcctcatcacagatggcatgggccatgccggaatactcgcgataggtcagatgcccggcccgttcaaggacctgatgggccgtttgctggtcgggcagcggaatcgtgcggtcctgcgcgccatacgccaggaagaatcgggtaggggagtcaagcgccgcctgttcctcgcccatgaacgaaggactgagcaggatcgcggcatcgaacaacgtcggatgcgccttgaccagacgatacgacagataaccgccttgggagaaaccgatcaatatcttcctgcgatgggcgaatgccgaggcatccagcagtgaagccaccgcatccccgaccgccgcgcattcgcgttggcgctcgtccacgccgcagccgtcgggataccagtaattgccgcccatatagggcctcgcgtaggtggcacggaacgagatatagctgggtacggcggcaattgcggccggggccgcatcggctcgcgtcggcgcatatacggcgtcgagaatccgcaccatctcgctttcgtcgttgccgtaaccgtggaacatcaggaaaatggggtcattgccgccggcatcgatctggcttgtcatctgcattcgcatcgtcatcacctcaccaacgagcttacatgcattagacttgtagcgattgacccaccgagcacacaaggagcaagttatggagccgaggcgcgggcctctcaccgcaggcgagaaggtgcagttcaccgaccgcaagggcaagaagatcaccgatcagcttgtggccggcggctccacgcagaccgagcatggcctgattctgcatgacgatgtgatcggcaagaccgaaggcaccgtgatcctcaccgtgcatgccaagcgcgaggcacaggtcaatcaggtctaccccgagaaagacaagaacaagccgtggaaatcgtcgcgcgccatcggcggctgggagtatgcggtgatgcgcccgcgactggccgattatgtgctttcgatgccgcgcggcgcgcagatcatgtatccgaaggacatcgcccaggttgtccagctcggcgacatccgctccggcatgcgcgtgcttgagtccggtgccggctcgggcgcgatgagcgtgaatctgctggacgccgtgggcgagcgcggccatctgaccacgatcgagctgcgccccgaattcgccaaagtggctcaggccaacgccacgctgtattatggtgaagcccccagctggtgggatctcaaaaccggcgacttcgactccgtggccgccgaactgcccgaacactggttcgaccgtatcatgctcgacatgctcgacccgtggaacagactcgagcaggcataccgcgtgattgcccccggcggcgtgttggtcagttacgtaactaccaccacgcagatgagtcgactggccgaagccctgcgcgcggccggttgctggaccgagccgcagatccaggaatcgttcgaacgcacatggaaggcccaaggcctcgccgtacgccccgaccaccagatgatcggccataccggtttccttgttatctcgcgcgccatggcctccggattcgaggcgctcagaaagcgcgatcgcgtgaccaaggacacgcagaccgacatcgactcgctcaccgacgaacagcgtgaggcgcagatcgaggaactggaactgcgcgacatctccgaccacaaactacgtaaggtgttgcgcgacctcgaccgtcaggtgggagaactcggcaacacgcatgaataaccgcccgacgatgagtttgtgaacgctcacacacctctatactggaagcaacaccacaccgccacaccgggcagacggttcgtgaagggagccacggatgggcatcaagctgagcaaagtcgccaaagcagcgaaaaaatacgaccatatcctcatcatcatgaggcatgccaaggccgagccgttcggcgacaagggtgactcggagcgcgagctcaccgacaaaggtctgaaacaggcgaaggccgtgggcaagggcatcgagtcgctgggactggtgcccgaccagatctcctgctcgtccgccacccgcacgcgccagacactggaccgcatgctcaagacctttggcgacaagccgatcgtcgactaccgcatcagcctgtatgacgggggagtgcaggcggtgttcgacgagctcgcccacgtcaaggccaagaaccgcgtgttcatgatagtgggccacgagccgactgtgtcgatcagcgcccaatggctcgcctccgccgactccgacggcgaacgactcgacctgctcaacttgggactttcgcccgcatccatcgtgatcatgggatcgaacaaaccgttcgacgaatggcaggtgcacagcggcgaactgctcgcggtcatcaatgtgaaagacttcgactaaagcggatataaattccatctataacgacactctgcggccatttataaggggtggaatccggatgttttgctaccctaagtcgggttacgaacgcatacattggaggattcatgtccactctgacttccgtctccggcttcccccgcatcgggcagaaccgcgaactgaagaagatcatcgaaggctactggaagggtgccaacgacctcgccgccgttaaggccaccgccgccgaactgcgcgccaagcactggaagctgcagcaggccgccggcatcggcctcatccccagcaacgacttcagctactacgatcagatgctggacaccgccatcctcctcaacgtgattccgaagcgttacgagcgtctcgccttcgataaccaggaggacacgctcttcgccatggctcgcggctaccagggcgacaagggcgacgtgaccgccctgccgatgaagaagtggttcaccaccaactaccactatctggtgcccgaagtcgagtcggccgcggagatcaagctcaactccaccaagccgttcgacgagttcaacgaggccaaggcgctgggcatcgacaccaagcccgtgttcatcggcccgtacacgttcctgaagctcgcccgcaccccggaagccaccgaactcgagctcgacaagggcctggtcaacgccgtggccgccgtctacgccgaagtgctcgacaagttcaacgaactcggcgccgcatgggtccagctcgatgagccgtacctcgtgctcgacaaggagccgggcgatgtggagctcttcaagaccctgtacaccaagatcctgtccgccaagggcaacgtcaaggtgctgctcaacacctacttcggccacatcgccgacgtgtacgagaccgtcaacctgctcggcttcgacggcatcggactggacctcaacgaaggccgtgaagagaacctcgaagccgtcgccaagtatggcgtggcctccaacaccgccatcttcgccggcgtgatcaacggccgcaacatctggcgcaacaactacgccacctccctcggcctggtcgacgccctgaagcaggtcaccgccaacgtggctgtctccaccgcatcctccctgctgcacgtgccgttcagcactgaaggcgagaccggcatctcgtccgaagacctcaagcacttcgcgttcgccgtggaaaagctgaccgagctcaaggaagtcgccgctctggccgacgccaccgaggacgagaagaaggcatccgccgccctcgccgccaaccaggccctgttcgacggcacccgcgtggccgccgacccggccgtcgccgagcgcatcggcaagctgtccgacgccgactacgtgcgccagcctgcccgcgaggagcgtcaggccctgcagcgcgaggccctcggcctgccgctgctgccgaccactaccatcggctccttcccccagaccaaggagattcgcgccgagcgcgccaagctgcgcaagggcgaggtcaccaaggaagcctacgacgagttcatcaaggcccagatcgacgccgtcatcaagaagcaggaggagatcggcctcgacgtgctggtccacggcgagttcgagcgtaacgacatggtcgaatacttcggccagaacctcaacggcttcctgttcaccaagaacgcttgggttcagtcctacggcacccgttgcgtcaagcctccgatcgtctggggtgacgtgtcccgcgccaacccgatcaccgtggaatggtctgcgtacgcccagtccaagaccgaccacgtgatgaagggcatgctcaccggcccggtgaccatcctcaactggtcctggccgcgcgaggacatcacccacgaggagcagaccaagcagctcgccctcgccatccgcgacgaagtgctcgatctcgaggccgccggtatcaaggtcatccagatcgatgaggccgccctgcgtgagaagctgccgctgcgcaagtccgactggcacgtcaagtacctcgactgggccgttccggccttccgtctggtgcactccgccgtcaagccgaccacccagatccacacccacatgtgctactccgagttcaacgacatcatccgcgacatcgacgcgatggatgctgacgtgatctccttcgaagcctcccgtggcgatctggtggtgctcgacgccattcatgacgcgcacttcgagaccgaggccggcccgggcgtctacgacatccactccccgcgtattccttccgagaaggagatcgaggatcgtatctacgagatccttgacaagatggacgtcaagaaggtgtggatcaaccccgactgcggtctgaagacccgtggtaacgccgagacctggccgagcctggagaacctggtcgccgccgccaaggccgtgcgcgccaagctcgacaagtagcggaaatcaccgagctccctctgtatgagggagctcgggtttatgtaaggaaatcagcatgcattccccgatgttcacccttgaggtctttcccccgaagcgcaacgctcccgtggacaccatctatgacaccctcgacggactcgaagggctgaaccccgacttcatctccgtgacctacggtcacggcacccattccgaccgcaccgccaccgcgcgcattgctcatacgatcagcaaggagtacggcattcccgcagtcgcgcatctgaccgcgttgtattccgacaaggcgaaaatcgacgaggccctcgacatgttcgagcaggccggcgtgagcgccgtactcgcattgcgcggcgactacatcgacggcgagcagctggtaggcgagttcaaccacgccagcgacctcgtgtcatacatccgctccgtgaagccgggcctcaaagtgttcggcgcctgctacccggaaggccactaccaggctgactcgctggaccaggacatcgaaaaccttaagatcaaggtcgatgccggcgtcactcacctgatctcccaactgttctacgacaacgaggacttctatcgcttcctcgacaaggcgcgcgccgccggcatcaccgtgccgatcgaggcgggcatcatgccggtgcgtggtgccaagtccgtgcgtcgcatggccgaacgcaacgcctcgcgtatcccggacaagctcaacaccctgctgaacaagtgggaggacgacatccagtccctgcgtgccgccggcatcctctacgcttccgagcagatcgccgacctcgtggcccacggcgtggacggcgtccacctgtattcgatgaaccaccccgccaccacgcgccgtatctggcgcaatgcggaaccgttgttcctcggtacgcaaggttgacgcatatcgcggcgcggcgcatctcaatgcgtcgcgccgcacgttaatctgctggcgaaacccagagttcccccagcggccgatgggtatcatgaacgtacaagccaaccaaagcgatggaaggaagtccgttatgtgcactggtgtccgtttctccgatgatgagggcaacacctatttcggccgtaatctcgactggagtttctcatatggggagaccatcctggtcactccgcgcggctaccactatgacacggtgttcggtgcgggcggcaaggcgaagccgaacgcggtgatcggcgtgggcgtggtcatggccgataggccgatgtatttcgactgcgccaatgagcatggtctggccatcgccggcttgaatttccccggctacgcctcgttcgtccacgaaccggtcgaaggcacggaaaacgtcgccacgttcgaatttccgctgtgggtggcgcgtaatttcgactccgtcgacgaggtcgaggaggcgctcaggaacgtgacgctcgtctcccagatcgtgccgggacagcaggagtctctgctgcactggttcatcggcgacggcaagcgcagcatcgtcgtcgagcagatggccgatggcatgcacgtgcatcatgatgacgtcgatgtgctgaccaatcagccgacgttcgacttccatatggaaaatctgcgcaactacatgtgcgtcagcaacgagatggccgaaccgacttcatggggcaaggcctccttgaccgcctggggtgcgggtgtgggcatgcatggcatcccgggcgacgtgagctccccgtcgcgcttcgttcgtgtggcctacaccaacgcgcattacccgcagcagaacgatgaagccgccaatgtgtctcgcctgttccacaccctcggctccgtgcagatggtggacggcatggcgaagatgggcgacggccagttcgaacgcacgctgttcaccagcggatattcgtccaagaccaacacctattacatgaacacctatgatgaccccgccatccgttcctacgccatggccgattacgatatggattcctcggagctcatcagcgtcgcccgatgactccttcccggctcatgccccattcggagggcatgagcgtatatagtggaatcttatggaatcgtcgatgttcaaacccagctccatggatctcatcagggcaggtctgcaagacctcgacaaggcccgcaccttgttcgaccagctcaaggcggacgacattcccgatgagcgatgcaccgaactgctgagcatgctggcccacgcctgcgaccccgatatggcattgagcaatttcgtggatatcgtcaacgcgatgcaatccagccagcgcgatctgaaacacgtcatccccgacaacgacgccctgaagcgtctggtcacggtgctcggcgtctccgacgcgatgggcaagttcatgcgcttcaagccgcagcttgtggaggccgcagcagtcgacaactgcaacagccatctgttcaatcacgcgcaacgccgtgcacgtctgctcaaggcggtcggcgcggacccggacgaaccggccatgcccgtcgcctccaaggatctggccgaagcggccacggccttgcgttccagctaccggaaccaactggccgccatcatcgcccaggatgccgtggcggacgacccggcctccatccaaccgaccatcagccgcgaactgtccgacctcgcggacgcggcgctcgaaggcgcgctggccatcgcccgccacgaaaccgagggcagcgagcacgtgcgcttcaccatcatcggcatgggcaaactcggcgcacaggaactgaactacgtctccgacgtggacctcatctacgtggtcgaaccggccgacaaggacgtggaccatcagacgctgatccgcgtgggcaccaagatgggcaccatgttgcagcgtgtctgccagtccgccatcatgggcgtggccgagcagccgctgtggcagatcgacggcggcctgcgcccggaaggcaaggacggcgcgctggtgcgcgtgctctcctcgcacaagaactactacgagcagtgggccgagaactgggagttccaggcgttgctcaaggcccgcccggtggctggcgaccccgacctcggctgggcctacatggatatgactcggccgttcgtgtggagcgcgtccaagcgtaagaacttcgtctacgactgccagaaaatgcgcaagcgcgtggaagatctgattcccgcacctctgaaggatcgcgaaatcaagctcggccgcggtggtctgcgcgatgtggaattcaccgtgcagatgcttcagcttgtgcacggccgtaccgatgaatcgctgcgcaccagcaacacgctcgactcgctgcagcgcctgtccgaaggcggctacgtttcgcgcaaacaggccgtgcgcatgtcccaggactaccgcttcgagcgcgtgatggagcatcgccagcagatctggtccctgaagcgcacgcacctgttcccggacctcggccgggcctcggtcggaggcctcgaaaagaagcgcgacatcgacgtggatgagctcaaccagaaccaggagctgcgtcgcctcgcccgcgcattcggcctgcacccggaagaactcgtcgacaaatacgacgacacccgtcgcgaagtacgccacctgcacctcgacatctactatcgcccgatgctgccggtcaacgcccagatggagaacgaccagatcgtgctgagcgtcgaggccgcacaggaacgattcgaatccatcggcttcggcgacccggacgccgccatccgccacgtgcaggcgctcactgccggcgtggggcgcgcggccaaaatcaaccgcatcatcctgcccgccgtcttgcagtggctgggcgagggccagaacccggacatgggcctgctcaactggcgcaaactggaggagaacttcggcaccgaatccggctacctcggcttcctgcgcgactccacctccgctgcccagcgtctgtgccacatcctgtccaactcgcgattcctgggcgacgcgctcaacaagtcggtcgaatcgatcagttggctcggtgatgacggcaatctgcaggcccgcacgcgcgaggcattggatgtgcagaccggctcggcgctggaacgtttcggctcgaacatcaacgagttcgccacctccatgcgcgccatgcgccgccacgaaatcgaacgcatcggcctgtcttggatgagcggtgtgatcagcgactccgacagtctcaaggccatgaccgacgtgtatgacgcgatcatcgacgcctcactgacctgggccgtgcgccaccagatcgccgcgttcggcgtcgaaaccgcgccggccggcatcaccgtcatcgccatgggccgttacggcgggcgcgaagtgaacttcagctccgatgcggatgccattctcatctaccgtccggccgacgatgccgacgacggccaagccaacgccttcgccaagaaggtcgtggaagacctgcgcaacatcctgcaaggcccgacgacgctggaacccaagatcgaactcgacctggacctgcgcccggaaggcaagaacggcccgctcgtgcgctcctacgcctcctgcgaggaatactacgaatcctgggcctcgacctgggagcgccaggcgctgctgcgcgcccggtacgcggccggcgacgccgaactggcgcgggacttcctgatcaacatcgccgacccgttgcgctacccgaccacggagctgaccgaggccgaattgcagaacatccgcaagctcaaggcccgtatggaggccgagcgtctgccgcgcggcgtgcgtcgagaacgtcatctgaagctcggcaagggcggtctgtctgacgtggaatggaccgtgcaactcatgcagctccagcacgccggcgatatcaaagatctgcgcgtcaacggcacgttggaggcattggacgtgctggaagccaagaagctcatcagcgctatcgacgcgattcagctgcgcaaggcatggacgttgtgcaccgcggcccgcaacggcaactatctgtggagcgggcgcgccaaccaggccgatattctgcctgatgacatctattcgctgggcggcatcgccgtctacctcggctacggcgcccaccgcggccagcatttcgagaacgacctgctggccgtgatgcgcaaatgccgtgacgtatgccagcgcctgttctacgggcaggccgaagacgaggcgactgcggcaaccaccgccacggcctccgccgcaacgcagcagccgcaaaccgcgcttcgcccgcgtatgcacgtgatcgcaccgcgactggagcggaaccgacgccgcgcgcagcgatagacctttcttgtattgcgttcactacgttcattaggtcgattcatcgttcattaggtcggtccgccgccgcataccttgttggaatggcggcattccaacaacagatacgagggtgcagtgacctaatgaacgtcaaatcgacctaatgaatgagctctggcgttccaaagcagatatcagctatacagacacagcatattcgttggattttcaggtgaacactcggtgaatgcggctgtccgaaaaatggcgtaagttatattaggtcacacaagggtggccacctgaaaaccacgagcgaaaaggtgagccttgtctgaagaaacgccaatggtcggcaaaagcgtcgtaacgctggacggcctgtctacaaaccagattctcgacctgctgcataaggccgaatacatcgattcccaccgcaaagaggttgcccatacctgcgatgggcgagtgctggccacgctgttctacgagccctccacccgtacgcgcctgagctttgagacggcaatgctgcgtctcggcggcaaggtcatcggattcgccggcgcgcagctggcctccgtgaccaagggcgaatccatcgccgacacgttgaagaccgtgtccaactacgtggacgtggtcgccatccgtcacccgaaggagggtgccgcgctggtggcctcccgcgccgcatccgtgccggtgatcaacgccggcgacggcggccacatgcatcccacgcagacgctggccgacctggccacgctgcagtcgcgcttcggccgcatcaccgacctgaccgtgggactgtgcggcgatttgaccttcggccgcaccgtgcactccctgatcgagaccctgtgccgcttcggcaacgtgcgcttcgtgcttatcagcccggacgagctcaagaccccgcagtacgtgatcgaccgcatcaacgccactgacaactgctcctacgtggaagtgcgcgacctggcctccgtgatcggcgacctcgacgtgctgtacatgacccgcgtgcagaaggaacgcttcttcaacgaagacgactacctgcgcctgcgcgacacctacattctcgacgaagaaaagctgcagctcgccaagccgtccatggccgtacttcacccgctgccgcgcgtcaacgaaatctccgtggacgtggacgacgacccgcgtgccgcctacttcgaacaggtcaagaacggcatgctcgtgcgcatggccctcgaaagcaccgtggtgggcgacgaactacccggatacgaaccgctcaaccccaaggaggttcaggcctgatggaagtcaccagcattcagaacggcatcatcatcgaccatgtgccggccggaacctcgctgaaggttctcgaatacctgaaaatcgacccggccaaaaccaagcttgcgctcatcatgaacgccaactccaagcgttacggctccaaggacatcatcaaaatcgaggatgacaaggacatcgacctcgacgtgctcggcttcgtggcctgccaggccaccgtagacgtggtgcgcggcggcaagatcgtcgaaaagaagcagccgaacctgcccgagcacatcgtcggcgtgatctcctgcgtgaacccgcgctgcgtgaccaccaccgagcccggcatcaagcagatgttccacctcgtgcactctgaacggctcgaataccgctgcgactactgcgacgaggaagccaaactgtgagcatcaccctacgcaacatcaaggtctggaacaccggcgaagtcatcgacctcgtggtgcccgggaccgctgccgcctacttcgccgacacctccgccgtggctgacggtgccgatatcgacgccaccggactgaccgtggcccccggtttcgaagacccgcacgtccacttccgcgatcccggccagacctacaaggaatctatggtctccggctgccgcgcgtccgcatccggcggatacacgaacgtgctcatcatgccgaacacgttgccggcactggatgggcagaccgtgtctgacctggaagcggccggtgcgaaagaggttctggatgccggcttcgacaacgtcatcgacttcctgcagcagtacgatactgcgcacgatgttcaattgccggttcgttacgatctgtgcgtgtgcgcgtccaaggatcgcgccggtcatgaggcaagcgacgttgccgactggctcaggtacgtgcccggattcgaggacgacgccaagacgccggccatgctcacgcaccccatcaccgcaattagcgacgacggttccgctgtgacgccggagatcctggaccaggtgctggagaacgtcaaggcctccgacctgtacctaatcgagcattgcgagcatcacgatacaggtgccgtgaacgaaggcccggtctcgcgcgaacttggcgtgcccggcattccggaagacaccgagctcaagatcgtggcccgcgatatagaagcggcccgccgcactggtgtccacgtacacttccagcatgtgagcactgccatctcgttcgaggcgattcgcaaggccaaggccgaaggattgccaatcacctgcgagaccgcgccgcactatctggcgttgagcgacgaggcgctgctcaagtacggcacgctcgccaagatgaatccgccgctgcgctccgaagcggaccgcaaagccaccatcgcggccatcgccgacggcaccgtggatctgctggccaccgaccatgcgccgcacacgttggcagagaaggaactcggcttccttgaggcgcccaacggcatcatcggactggaatgcgcgtacggcgtgtgccacaaggtgctcgtcgacggcggcttcatttccgatgagcgtctgatcgagctcatgtccgtgggacccgccgaactcatggggcatgtgccaaccgacgtggccgcgctggtcgaggactacgccgaacccgcgcccactggggatgatccggatggcgtgattgcgggggagagcgacgctcagccgcagcgtgaaggcgtcaaccgactgctcgacctgagccgcgtggatgacgccgacaatgtcgacctcgtggtgctcaacaccgctgaggaatggaccgtggaccctgaacagttccactccagggctcgtaacaccccgttcggcggctggcaggtcaccggacgccccctcgccacgatcatcggctcccagctgatgttcagccgtctgtagataacataaggagcagcatggatcgcctgatcgaagcgattgacaacactcagaaccccagcgtcgtgggcctcgaccccaccgaggcgttggtaccgccgcaggtcgtggcgagctttgccgacgaggtgcgtgactcggtcgaatccccggaggaaatcgaatccgcgcagctggccgtcgcctacttcgaatacaaccgcacgatcatcgacgccatcgccgacatcgtgcccgccgtcaaaccgcagatcgccatgtacgaggcgctcggccccgccggcgtggacatctacacgatgacctgcgaatacgcggcccagcagggcctctacgtgctcggcgacatcaaacgcggcgacatcggctccactgcagccgcctacgcccaccacctgaacggcgtgggcgacttcgacccgtggcatgaggatgcggtgaccgtcaacccgtatctcggcaccgacggcatcaccccgttcgtcgaggccgccgccgaagccgacaaggacatcttcgtgctcgtgcgcacctccaacccgtcctccagcgaactgcagatgctcgacctggccgacggcacgaaggtctacgagcatgtggccgatctcgtggaaggctggggcgccgagaccatcggcagccacggctactcccgcgtgggcgcggtggtcggtgccacccaccccgaggaaggcaaggcgttgcgtgaacgtatgccgcacacgttcttcctcgtgccgggctacggtgcgcagggcggcacggccgcggacgtggcaggcatgttcgacaagcagggcagcggcgccatcgtcaactcgtcgcgcggcatcatcggcgcatggaagaagagcggcaagtactccgaatccatgaccgccgacgaggcgctggaccttgtggcgagcagcgcgcgccaggcggcgctcgacatgcgcgataatctgcgggttgccgtatataggtaggtagattgtccggctgtgggctatacgtgagtgtgggctggaaaccggagccgagtgtgtttaactacccctcagtcaacctgcggttgacagctcccctgataggggggagcttgatgtgctgaataggaatgaaatgacaactttcacccccacccatgatgtggttgcggaggcgactgcggccggattcttcccgccgcgccacaacgtcgaaatcacgcaggttacggaactgaccgaccgcgtgatgcgactgacattccgcgacccgttcatcgcctcccacgccaagcccgcccagttcgtcaacctgttcacgcacgacgacttcatgctcatgccgcgtccgttcggcgtcagcgaagtcgacggcgatgaagtcagcgtgatcttcgccgtcgtgggccacggcaccgaacagttggcaaggctgcaggccggcgacaccgtcgacgtgctcggcccgctcggccgcggcttcaacctcaaggaagacgccaactacattctcgtcggcggcggactcggcgtgcccccgctaatctacgccgcgcaaaagctcgccgaacacgacgcctcctttgccaccgccgtattcggctaccgcaacgaccacttcgctgaggaatacgtctcccggtacgcggactggtcgtggagcatcgacgacgccgaaggcaacgtggtcgacctgctcaacaaactcgaacaaggcgacgacctgaaggcctacgatcgcaagccgatcatcttgtcctgcggaccgctgcctatgatgaaggccgtggccgcttgggccgccgaacgcggcatccccgcgcagctgagcatggaacagcgcatgggctgcggctacggcacctgcgtgctgtgcaccatcgacaccgtggacggccggctcaaggtctgctccgacggacccgtgttcactcgcgaacagctcggatggggggagtgacgatgagcgcaaacaaccagtccgcgcagggcatcgacaaccacatcaacctgtacgagccccacgtgtggaagcaccacaccaaggtggccggtctggaatggaagaatccggtcggcaccgcctccggcaccttccagtacgccgccgtacgctggttctacgacgtcagccagctcggcgccgtatgcaccaagggcgcctcgcccgtgccgtgggagggcaacccctcgccgcgcaccgccgaatcgccggccgcgaacatcaacgctgtaggcctgcagaaccccggcatcgaccattacttggccgaagacctgcccaagctcaaggccgcgggcgcgttcgtcatctccaatgtcgccggacattgcgatgacgattacgcggcggtcgtggaaaagctcgccgactccgacgcggacatgctggaaatcaacgtcagctgcccgaacgtttccgccggcggcatgagcgtgggcaccgacccggtggccctcgccaatcttatggaccggctgcgcccgatgaccgacaagccgatgatcgtcaaactcacgccgaacgtcaccgacatcaccgtgccggcgcgcgcggccgtggaacatggcgccgacgcgttgagcatgatcaacacgctcaaaggcatgcgcattaacattcgcaccggcaagccgatcatcgccaacgtcaccggcggcgtatccggcccggccgtgctgccggtcggcctggcagccgtctatcgggtgcgcaccgcactgccggagattccgatcatcggcctcggcggcatcgacagcggcgagaaggcgctcgaatacctgtacgccggcgcgaacgccgtcgaagtgggtgcggccgcgctcttcgacccggtggccccgctgcgcgtcgcccgcgaacttgacgacctgctggacagccgtcccgaactcgctgctaaactggccgcaggacagacttggaggtaaggaacatcatggcagaaacactcgcacatcgcttcactgaattcctgttggaatccaacgcgctgaagttcggcgacttcacgctgaagtccggccgcaagagcccgtacttcatcaacgccggcgccttcgacgacggcaagaagatcgccgcgctcggcacgttctacgccgaaaagattagccaggccatcgtgcacaacacgattccccgcaacatcgacaccgtgttcggccccgcctacaagggcattccgctggccgtgtccaccgcgatcgcgctgaacgccggccacaacatgaccgttggatacaccttcgaccgcaaggagaagaaggaccacggcgacggcggctggatggtcggcaccccgctgaccgacggcatgaaggtgctgctcgtggacgacgtgatgaccgccggcaccgccgtgcgcgaagtcatccccaagctcaaggccgaggcgaacgtcgaggtcgtgggtctcgtgctctccgtggaccgcatggagaagaccaaggactccgacctgtccgccgtgaaggccgtggaagccgaattcggcttcccggtgctctccatcgccaacgtgcgcgagatcttcgacgccgccgccaagatgaagaactccgacggcaccccgttgctcagccacgatatccagcagcgcgccgccgcctaccttgaggaatacggcgcctgatcgtcttcaatctaaaaaccaaaagcgggcttgcgagcccgctttttttattacgatccatgaacagcagtaccatattaaggcagaagctttggcaaggagcgtgctatgaactggttagttggtatagggctgtttgcgctcgtggggatatgcagttacttcggcatcgagcatcatctggacagcaaagcgaacaagttgtcgcaaggtaatgaagaagaccgccgagatgctgccgaattacgtgatatcgccgccaaaatcgatcacggtaagtattacccgatgctgtaacgggcaatctgggcctaaattgatgctatctccgtttcgaggggctgatgtcgtggtttccagagatctacttccgtttcgaggggctgatgcccaagtagaagcagcatgaaaatggcggaatgacgttggggtgatgccgctcatactcgggatatgacggatgaacagccccttgaaacggagatagatgtctccagaaggccaaatcagccccttgaaggcgagatagggttttaaactctgggaccgactcgcctgtgatgaaaacccgctcggcgtagaattaccgtaggttcgttacattcgaacaaggaaggccgccatggggaacatcaccgacgatatccggcaacatttcgacaccttcgccgcactgccgttcaccgaggcggacagtctcgccctgtcccagctggcctacgcgcgcatgccggataacgtgccgcgctatcacgaggattcggcggacgccagcggcatgattcccgcggtctccatccgcgacctgctacgtgccgaatgctatgacgacatgttcggcaaggtgtggtcgccgcagatgaacgtcgatctgctgcgtgcgatgggggagagcccgcgctggcgcgacctgcgcgtcggcgaatacgtggatgaattcgacgccgaaaccaccaaacagttctcggcctgcgtcttcgaactgggcgacggcacgctgtacgtggctttccgtggcaccgacagttcgatcgtcgggtggaaggaggatttcacgatggccttccgccgtccggtcgcctcgcaggaggccgctgtgcggtatgtgactgatattgccggccgctgggccgggccgattatggtcggcggccattccaaaggcggcaatctggcggtatacgcggcggccaatgtgcccggcgaaattcagggacgtatcacggccgtgtattcgcacgatggtccaggcttcgatgaggcgttcttcgatgaggatgggtatgcgcgcattgcgccgaaaatccataaatcggtaccgggatcgtcgatcatcggcatgctgtttgagactcgtgagcatgtggaagacggctatacggtggtcagcagcgacggtgccagcatcatgcagcatttcgcattgcactggcaagtagatcatggccaattcgtacaggctgatggactgacaagtagcgcgcgatacctggcgcgcacgatcaacggatggatggcgaaatacgatgatgagcatcgccgcaggttcatcgaaaacctgttcgccatcttcgaggccggcgggtacgtcacgttcggcgaactcacgtcgcacgtgacgcagtcgttgccggtaatgctcgccgcggcccgcagcattgatgttgaagaccgtgacgtgatgattgaggtgcttaagggatttgccgcgacagccgctacgtcggtaatctcggccaagtagccggaggccatcaaactggttttgccagtcagtctcaatagcgcaagagccggcccctgagatactcaggggccggctcttacttccatttccccagcggggttggcttaatcgcagtatatctcactgctgaccatgtctgttttacttactcctaatcaatgagcttgtagccgtgatcggcgactacggacttgagcttggtgaggtaggtttcggcggccttggagagcttggaacgctcgttcgtgatccagccgaccaacatcgtttcgtcggtgtcgagcggcacggtgacgatcttctcgttgttgaggtcgccgttgtcgatgccggtgcacaccgtgtagccgttgaggccgatgatgaagttcagaatcgtggcgcggtcggtcacgttgatctgcttgggggagtattccggccagaccgcctcctcatagaagtagaacgagccttcctcgccctgttcgtactggatgaacggatagggcttcagatcctccatggtgatgatcttcttggcggccaatgggttgtcccgtgagatgaacacgtgcaggggggcgcggaagagcggatggaattcaaggtgtttctcgcgcaggagtttgccgatcacgtccttattgaagtcggacaggtagatgatgccgatctcggactgcatgttcgccacctggttgatgatgtcacgtgtacgggtctcacggatcgtgaactcgtattcgtcggacttaatggagttgatcatctccacgaaagcctcgacggcgaacatgtagtgctgggtggagacctggcacagctgcttgcgcggcttggcatgcttgtaacgctcttcgagcaggtcggcctgatcgagcacctggcgggcgtaggtcaggaattccgcgccgtccacggtcagggcgatgccctgcgaggagcgggtgaaaatctcgatgcccagctcgttctccaattccttgaccgacgagctcagggccggctgggagacgtacagggcatgggaggcctcgttcatcgagccgcactcgacgatcttgacgatgtatttcagctgcagcagtgtcataaagtctatttatatcgctagggatggtcgccacacgggtttataacctcatcaatccactatggcgacacaatatgagatgcctcgcatatcgcggacgctgtgtaacgggatatgcgccacattggtaacctgaggcaggaccagtacgatgccatccagaccttctccttctccagcatcgaccgcttctccacgccgagcctgatgaccaggctcggcgccgacgtgatgaacatccagaacgccttcatgatgattctgcgcatggtgccgcgtgccgcgtcgttgaagtgctcaccgaacagtgcgacatgccggtcgccaaacggccggtcaccgtcgtcaaggacgggtccatagacttcaactgccgcgacgcaatatttggcgacttacaggcgtacgccgagttcggcgagcgattcgcgcgcctgcgacgcgttctcgaagaggatgctgtggatgccgacctcgttggcgccgacgatgttcttggcggtgtcgtcgaagaacacgcagcgctcggccgtgagaccgaagcgggtcaggaccagctcgtagatgtcggcgttcggcttgtgcatcttctccacgccggagaccacggtgccctgcagcagctgttcgaggcgcgggtacttctcgaaggccaggtggaaggtctcatgcgaccagttggtcagaccccatacgccgtagccgtgggccttcaaatccgccagcagttcgaccatgcccggcagcgtgcggggcagcgcgtccgcgtagtggccgatgtagaacttgaagatgtcggcgagttcctggccttgttcgcgtaccacatccgggtagatgtccgcgaaatcctcgccggcgtccatgcggtcctcgtagtggaagaagccgcaggggtcgtcgtcggcgcagatgcgttccacgatttcatcggggaatcggccttcaaggcatgcgcgggtgttccagtccagcagcacgccgcagaagtcgaaaatcacgtcggtgatgggggagttggccatgatggttccttgtgtgtttgggtcgttgggtgaggtctgcgatttagtgtacggggtttgtgtataggtcggggtatgtggagtttgaggcttatgtttctctccctccgtcttggttttgccgagacacctccctcgtcagagggaggtcaacaaggttatgcgatgacgtcggcgatggcttcggggatggcgtggaccacgtcgccggccacgatcgggtggccgagcgtcatgaagcgctggcgatgctcgcggccgatcagttccggctcctgccagccttgttgctcggattcggaggcgatcgccgccgccaggccatgcaggtaggcggccgaggccacggtctcgcccgtggtggccacgtcatcctgctgggcgagtagggcgccggtcagaccggccagtacgtcgcccgcgccggcggtgcccagccaggccggcgcactgcccgacgcatagacatggtcctcatccaccacgatggtcaccgcgcccttcagcaatacggtggcaccggtgagctcgtgggcgcgcttcgcgctggccaacgggttcagccgcacgtcgtcggcggtgtacggctcgtgcgaatcggcatgctccgcggtgctggcggtggtttcgaaccggttgagcagtttcgccatctcgccggcatgtggcgtgatcaccacctggccgggcacacgctccggcagcaggtcgagtgcgccggcatccaccacgattggcggcatgtcgtaggcgtccttgttctcatcctcgctgccgagcgcgtaatgcttgagcaatgcggcgatggtgtcccgctgcatatcgccgtcggcgccctcgacgctagcctcgggcacgccggaccccacgacccaggactgcacatgtcccttgccgatcacggcttccggcagtgcggtgagcaccatgttctgcgcgcgctccgggcccagataccggaccatgccggtgttcgcgcgggcggcggcgctggtggtgagcacggcggcaccggggtagcgctgcgagccggtcaccagaccaaccacgccccgggaatatttggaatcctcgaaccgggggagacggaccgcgtcggacgcgaacgaattatccaccacctcgacgtccggatccttgtcgtcgatatcgaatccgaaatcgaacaactcgatacggccgcaggcgaacgtggcgggcggcagcaccgcgcacggcttcatcgcgccgaacgtgaccgtgaccgtggccggaatgtacgggccgggcagagaaccatcgttcacaccgacgccggatggcgtatccacagcaagtaccagcggaaaatcgcctgacgactcatggttcggcagggcgggctcatcgggagactcgccgtcgagaccaagggcggaggcgagcgcggcgggaatgccgcgtagcgagccttgaatgccgatgccggtcatcgcgtcgatgatcagatgcgatttcctggccacggcgatggcggtctgcaatcgctcgccggcctcaccggcggaaaacccggacgcgcaaccgggaatatcggctgccgggtcaagcaccagcaccttgccgccggcgcgcacgagcgcggcgaatccggcctcatgcagcgaccggcccacggcgatggcagtgacgttcgcgccctcctgggccagcgcggcggccgcgaacagaccatcgccaccattgtctccggccccggccagcagcacgatcgacgtgtcctccagcgccagatcctcgtcgtccagcatgccggccgccatgtgggccgcggcctgggcggccatgcgcatcagcggcacgcctttgtccagcaggggtcgctccatggcccggaccgtatcggagtcataggcgctgtgcagcagcagttcgcgatgatcggcgtcttcggtgtattccatggcaacccctttcttgtgtttgttacttgcggcccgtgtttacaggccgtacacctcgtgggcgaacttttcgagcacggggatcgaacgcttgactttctcggtgtcgatgcagtaggccatgcggaagtatccgggcacgccgaagctgtcggacggcacgaggatcaggtcgtattccttggccttcatgcagaacgccacggcgtcgtcctctaacgccttggggaagatgtagaacgtgccgccggggcgcaccacgtcgaagccgatgccggtgagcgcatcgtagagcaggttcatgttcgtctcgtagacgttgaggtcggcggtctggtcgatgactttggctacgcccagctggatcgagctcggcgggcagttgtggccggtgccgcgcgagatttggcccatcatcggcacgagcaggtcggcgtcggtggctgcggggttcaccgcgacgtagccgatgcgttcgcccggcaggctcagcgacttcgaccacgagtagcaggtcagcgagttcgcatagaagctggccgggtagggctgggtggctccgtcgaacacgatttcgcggtaaggttcgtcgctgatcaggaagatgtcgtggccgtactcggcctgcttggcggtcaggatcgcggccagacgcttgagcgtgtccgccgaatacaccgcgccggacgggttgttcggggtgttgatgagcacggcctgcacgttcgggttgagcgcggcctcgaacgcctcgaagttgatctggaagttctcggtgtcggccggcacgatggtcagcttggcgccggtgcccttgacgtacagctggtattcggggaagtagggggcgaaggtgatgatctcgtcgcccggcttggtcaccgcgcgcatcgcgtgggacagcgcgcccgccgcgcccgtggtcgggaagatatggttgccggtgtatgccatgccgaaacgttcgttgaggttttcggcgatcgcatccttgacggacgggatgccgagcgagggggagtagccgtggatggccaccggatcgccgttttcgtagaggtcgaccatggcgtcggtgaaggatttcggagccggcaccgagggattgcccaggctgtaatcgaacacgttctggtagccgatttcggcaccgcggctcgtggcatactcgctcagctcgcgaatcacggacttgccgccaagcatggccttgtattcctcattgatcatggctgttctcctcgcatggttgtactggtatgcaccacgctactactatcgcggccggtttgcgccatttaccgcgccgtgcctaagtcggctgttctatttgttctattagtggagtttgaaccggcatatacccttgcaataaagccatttgtagggtctgaggctttccggggttgcttgtctcatagattttcggcctcttgatatttgcggttgatagctgtgatgtgtgtgggcgatggctgttgaggcatcatgggggtctcttcgactgtccgccgtcgccatgccgccatgatgcctacagaaagtcgagttgcgtatttccgccaagcagggtggtgaccggtggggggcgatcggtggggggtgaccgacacccgctataggcagcaggcagccgcacacatcccaatatctgtgggacggcagacgagtcaatcgtttgtcgtccgcgccgtccctcaagagcgcgggatggcagacaagtcaaccgtttaacgtccgtagcgtcccacaccgacgactgtagaaaccgcggaataacgccgattctcgctgcagctccatgattatgcacaaccgttcatagcgagcgctgtgggacggcgggcggaaaacggccgaatccgcgtgccgtcccacacctcgtacaatccgcgttttgggaaagcatcaccgtaaggctgacgcgcatccgcatccacagcaggagccttaccggccgtaatcccgcactcgattattttttctgacaggaaatcgaacccgaaacactaacccatgcccgccccaccgcaaacagcgaataaccaaaaaaatgcatgatctatccttggtgccgaataatgagagcctgactgtagtggctacgggtagctatatcggagaaggattcgatcagaagcgtttcgacacgcttctgcttgccgctccggtctcgtttgagggtactctctcgcaatatgtagggcgacttcatcgcgagaatgatggcaagaccgaggttcgtgtctatgattacatcgacgtgaccgtgcctttatccgctgtcatgtatcgaaaacggctgaaggcatacgcaaatcaaggatattcggtaaatcctgaccatactgagaaaatggacatgctcagtgcaaaggcggaagcgttgcgcgcttgcatgacggccgcgacgcagggcgaagatgctgcggatgcgttgctcgacacccggtctgacggattattcgaaggcagcatcgttacagccacgaattatgcagagatactccgcaaggatattgccggttgcgcacgttccctgattatctcggctgaatatgtatcacaacagggactcagcgcaattgacgatgaattgctccgactggccgacaggaaagcgctcatcgaagtttatgtccgtttgccggcgactgctgcggtggcaaccagaacacgaatagaacggaatattaatcggctgcgtgctattgggtgcattgtccggaccgtcgaatcgtgttccgattttgctataatcgatgacggattgatttggtttggaggcatccctttacttggcaatccaaggagtgacgactgtgcacttcgattcaaagatacgaaaatcggcgagaatctagcagatggactgaaacgacggtcgtcctgagtcaatattcagttaagataatcgcgcagtacgagggcgtgattgatatgcgggtccttggcggcatagagcagggtcacgtcgggatgctccgcgcagatgtggcgcagattgtccacggcggcattggcgtcgagctcggcgatgtaacgcatgcggaattccgcgaatttggcggggtcatggccgaaccatttgcgcaggaggggagagggagcgacgtccttcagccacaggtccaacgccgcacgctctttcgtcatgccgcgaggccacaggcgatccaccagcacccgatacccgtccgacgcagtcggctcttcatatatacgtttgattgcaatacccatacgccccatgattggcgtgcgcttgccggaagtcaaggggagacgcgatccatctacccgttcgatttctgggtgttctgtctaaggccttgtgctatgacagctagcgattcagcagcttttggtgatatcgtccaaccggaccgccttgcccctgtcgaaggtgttcatagtgagatcgacgggtttggtcttgatgaacgctgacagcgcggtgtgcggcgggttgtcgatcaagtgggtgatgggggcaatcgcctcctcgacgctgacgcccacaatggcgtaaatggcacgcgccagcagcttcatcagtggcgaatcgaaactgttcaatgccccattgctgcgcacggcccaagggttgaacaacacatagcggatgcggcctccggtctgctgttgtttttctgcgaagagcgctccccagcagatcgttcagacgactcgtacagatagtcgcgcaatgctagaacgtgattgatgtgcacccttcattgacggtctctcaattgatctcctgcgattcatgccgtataaggaagttctcgaccaaggcgatcatcgtgtctttctccgcaggtgcggacagtgcaatcatcagcgtcatcgccgccaaggcattaccctccacaagcaggggagtcatcgtcgcccagtatactgttgccgttcaggaaatacacgaacagtgcggcggcacaacgtttattgccgtcggagaacgggtgatccttgacaacttgatacagcaggttcgcggctttcttctgggtggaacggtacagttcttcgcctccgaacgtctggtagagtcctgcgacgattccttggaacgaaccgttgcgttccctcccgaacagatcggattgcgtgtagaacggcatcgaccggatgaacagcatcgcgtcctcataggtcaagacccactgggactcgtcgcccttgggtatagggacattgcctgtgtcatagtcgttaagcagcacaagactcggcaaatatcgttccaagatctctgcggtgccagcaatttccggttcggtggacctcgatagcaccttgacgacggcgtgaagtgcgtcaagccgcttgtgattgatggtgtaaccatcaacgagatgctgcttcagaactgagttggcccatcgccggaaattagatgccttccttggatttgacgcggtatccgaccgacaggatcatatccaagttgtaatgctcgacttggtatgtcttaccgtcagatgcagttgtcgcaaattttgcgacaactgaaaatccattgagctcttccctcaatgcattgccgatatgcttgccgattgttttgatatcgcggccaaacagcaatgccaattgctgtctgttaagccacaccgtgtcctcgtccaccttcacatcgaggtgcacggtgtggtccgcgctctcgtactgccggtcgagaaccgggtggcaagggcggccaccaccagtatagtcaccacaccggcgcacaggatgccggcgatggaggccacatccgaagcgatgtccgcacctgcggccggcagcagtgtgccggaagcgtagtcgaagcgcgcgatgtacaggatgtagagagcgaccgtcaccaccgtctgcaatgccacgtacacggcgtagataccaaacagggcaaggattttcgcattgatgatcgtggcgcggtccagatccttgtacaggaacatgcggccggaggccacgggcgtatagatggcaccagccaccagataggccatgaccaccatcggcagcatcagcatgttctgtacgacgaactcgccagcgaggaaatccagcacactcaccgaaccggtctttccgctgactttcatgaaatcggagttgaacaggttcacggccggcagaatcagtatgaatgacggcggccggatccaaagccgcgaccgccgcacgtttcgcgacaccgagcggccggccaagctcgataaccgtgatccgcttctgttcgccggcgaattcgtccgcaagccggccgcctttgatgaacaggaatcgcccgcacaactcctgcaattcgttgagctgatggctggagatgagcatggcgatgctgcggtcgcggtacggccaaagtcccacaagttcaagcaccgggcggattgggaggtgcgggcggcgggtcggacgatcacagtgtgagccgaatacgttcatgaatcatcgaatcacaaggcgaggcggaccgcaagtattcgagagtcgccagttcggtcgatttcaatgacaatggtgtggaagattacgcggatatcgtggcgggtgcgcgcaaggacgccgaaaaccatccggcttacgattccggctactatcagggcggctatccgccggccgatcgcggggcgtgcaccgtacgtgattcacaacatggcgcagcggcagcgcgaaaacgactacttcgccttcaagaagcacatgacggtcaccgggcactaccgtttcgacgcttcgaaagtgctgtagagcgtactcagggcttggcggtgacggtcggagcggcgtcggcattgccggctttggctccggctgcatcagctgaatcggtgccggccgcactggcgttagcactatcgtcagcgttggcaccgccggctttggccttggcatcagccgcgctcccgccatcgatcaccagtcgcagataatcgcggtcggcggacttgcggcgcggcacgaaccgactgatgatggagtttttcttgccgcggttcttcacgtacaggaagccgaacacggagaacacgaccgcgccgatgaagttgacgataagatcctccatcgtgtcgatcagaccgatgtcgaggtagccgccgaggcccaagtcttggccattgaccgtgacctgggtgatgtcgttgatgcgaatcgcatggttggtgtgcgtggggtcgagcatcaccgagctgatggaatgcacgatggcgtctttctgcatgtcgaatccgaacaactggtccatgccgaattcgaagaactcccagatcacgccgatggtcatggagaagcagaaggagacgatcgccagatacaggggcgaaagctcgaacttcacccggtcggaccggttgagcaggtcgaccagcgagaagccgatcgccgcggcgaggaagccgttcatcgtgtgcaacaccgtgtcccagaacgggaagatctcatagaacgaactgatctcgccaagaatctcggacgagaacacgaacaccagcacgatgacttccagcaccgaaggcagctcgatgcggaactgcacctggatgaacgccggcgccaacagcaacagcaacgtcaggatgcacaggaacacattttcgtagtcgccgttaaagaactggagtattgccatggcgagcaccagcatgcgcagcaccacatagaccgcgaatgagcttttgtgttcgcggatttccatgtctacggctcggctcatggtcttccagcgtacgcgccaggacggtttgcgttgtgcgtcgtgctgttgtgaccgtttccgggtcattcttgcctctttctcgcattgttctcgcgccagtctatccgaacctgcttacaggcaatcggcaagaacgggcgatagtctggccgcatgaaccgaatggaaaccgatgctgcctcgattgtggaccgcacgaatcatgcggcgatgctcgatagggccattgtgccggcggcacgccaccgcgtgtgctgattgcagtgctcgccgtgctgctgtaccgccgtatgggcatgattacaccgctgatcgtggctcatggcatgtatgacgtctccgccgccatgaccaatctgaccggaatcgccggctcctcatggtcactggtcgtagggctggcaatcatggccatgccggtggtttgggctatcgtgaggtgtgcgagataggctttgtaccggttggcagcaaatcaaaccagcgagacaacggaatgaacgaagcgaaaggaacggtatctgatgactccgattgaattgtcaacccgacgccgggttacgggactgacttcggatgagttcgccaggctgttcgtctctttgcaacgcgatgtggacggcgaagccgcgcattggagcgccacggacgtcgaatcctgggagctggtcggcccgccggtgaccgccgaacagcatcttatcgacacgttcgccgcggccaacgaattcgtggccacgcttgcggaccgtctgtaccacacgatcatgccagtcacggaagaatcggtcatcaccgcatacgctgatgacctcacattctgggcatcgcatccggaccttggcggagtgccgtgcgcattatggaacatcgccgcactgcaggcggccgaatgggcccgcaaggaaaccggcatcgcctgtgaactagacgtgcgcgaaccgctggtgtgacagctgagctcaaacatgggcgtaggtaacggcatggtttgaggactatggtgttgcgttaccggtcggaaaggatatgatggtggggcgtcatagcaaaaaagcgcgtggacagtcgaggagacatgcgcgaaagccctccgtttggagtgaaattcgcggctatctgcttacggtgatcgcggtgatgctggtcgtgttgctgggacgcaccttcgtgttcaacgtctatgtgattccatcccgtagcatggaagacacgttgcaaatcggcgaccgcgtatttgcctcgcgattgactccgagactctttgcactgcaccgtggcgacatcatcgtgttcaaagatcccgcagactggatggagggggagcagcttcccaccaatctgatgtcgataatcgacagcaatcgttacctaatcaaacgtgtcatcggtctgcccggcgataccgtcgcctgcaagggatccgaggagcccatcacggtcaacggcaaacccattgatgaaagcgcttatcttaagtccggcgtgaatccaagcgacagtcctttttccgtaaccgttactgacggcaacgtgttcgtgcttggtgataatcgctccaattccagagattctcgataccatcttgacgacggcaacaatgggctagtgccatacgacgatatccaaggtgtggcgttgttccgcttctggccatttacgagaatcggcatactgaactgagtttggcgtgaatccacgagttgatacgtgccgcacggtccggtgcatcctgcagccggaccgttaccggaaccctccccccgaaatctgacgacccccctgtctcacagctatcgtacagctccgatacgggaaacgtgcgggtgattccataacgactacgtatttcaggaagtgacgtgtatcacattatggtcatgtgttcagtgccgcagataggcgaagtttattcatgagccgaatagggccggtgaagcgggctctcactgcgttcataatacggcatatcgtgaacggcgttatcatcacagtcaggccgaattaagggaggctcggtcatggtcgccgcatccacggcattcagcccgtcaagcacgatgacggccagtttggtggaatcgactggcctgcccagtgccgctattcctgtgcacgaggatggtaacaacggcaacggcgacagtagtgccgatggcagcggcgacgacggcggcatggtcagatcgctgagcctgtggaactacttcaccatgggattcggcgcaatcatcggcaccgtatgggtgctgctggtcggtgactggatgatcgtcggcggtggcccggtcgaggcgatgatcgccttcgtgttgggcgccgtgtttctgctgccgatcggctcgacgtccggcgcggttaccatggtcgggtcgtttctgcccggagtgctggtgatgacgccgctcttctacaccggtttcgacacgattccgcagagtgccgaagaggcaagcgaaggccttgactggaagaagttcggtatggtcatctcagcttcgctgctggccgtcggcttaatcatcattggcctgcaggtgctgccgttctccccggccgcgctcaaacccacatcatgggcaatcgtggcggtgtggatttgctgggtctggcattgcgttggatcagtgcacgttcacggcgcgaatagcggtgcgccggtaggtcgcgagccgttcagtcacgcgcgacccaaagcgtatcgaggtcgtcggcctcggtcgcctttttgcgcttgcgtacccactgttgcaggaaatacgccccatagcaggccacgatgaacacgagctcggccacgagcgcgaaccgttgctccacgtcgaaaatcaccaatacgaacgatgcggtgcacaggatgaacgccgcccaagacacgtacggatagccgggcgtgcggtatttgagttcgctggtggaatggccggactccagccaacggcgacggaacacgatctggcagtaggcgatggcgatccacaccaccacggcggacaggccggaaagcgccaccagcaccaggtacacagtcgaggcggcgatcacggaagacaggagcgccagcaggccaccggccatcgcggcgcacaaggcgagcatcggcacgccgcgacggttcgttttggcgaaccagcgcggaatcatgccttcgttgcccatcgaccacaccatgcgcgtggaggcgtacaggccggaattcgaggcggaaagcacggccgtcagcaccacgaaattcatgatgtcgcccgcataggggatgccgatgctgttgaagacgagcacgaacgggctttcgcccacgccggcctggcgccacgggatcagcgcgcacatcacggtgatcgagccgatgaagaacagcgccagacgccacagggtggtgtggatggctttcggcacggcggtttgtgggtccctcgtctcaccggcggtcacgccgatgagttcggtgccggagaacgcgaagttgacggtcagaatcgtggcgaacaccggcatgaagccgttggggaagacgccgtccttgatgagattgccgaacatcggggcatgttggtagccggcgaccgggatgacgccgaagatggcgagcgatccgatgacgatgaacgcgcagatggcgaacaccttgatggaggcgaaccagaactccgcctcggcgaagaaacgcaccgacaaggcgttcagggtgaagatgagtgtgatgcacgccgcgctccacgcccatgtgggactgttcgggaaccagcgctgcatgagcagcccggcggcggtgaactcggatccgagcgccaccgtccatgtgagccagtactggatcgcgatcacgaagccggtgccagggccgatgaacttctcggcatacacatggaaggagccggtcaccggcatggccacggacagttcgccgagcgtaagcatgaccagatagacgatgagcgcgccgatgctgtatgccaggatcgtgccgatggggcccgcctgctggatggtgtatccggagctcaggaacaggccggtgccgatcacgccgcccaacgagatcatctgcaggtggcgggattccatgccgcgcttcaggttggtatgcagggcgtgctcgtctttgccatcatgtgatgactcggactggctggtttgcgctggttggttcatctgttccgaatggcttcgacggccatccgtctgaatctgcggttcctgttgcgaggacggcgactgtgccgccgtgtcggtgtcgggctgactcatgtttctctctttgccatgcgtgcgttccataggcgtcgtcgtgacggcccggaatagtatacccgcaccgaggatatagctgcgctgcatgatgctgagtcaaaatcagcttcaaggggccgatttggcgtttgccggaggtctacttccgtttcaaggggctggtcaactggcggaacgcagatagaaatggcattgttctatcgctattccgccgtttttaaccagtggctactttggcatcagccccttgaaacggaagtagatgttccgcaaagtcaaaatcagccccttgaaacggagataggcactcgcagcggctacttcaccttctggatacgtagcacgaacacggcagcgcacacggtcatgacgatggagatggcgaacgccggcgtgtaggtgccggtcgtggtcttgaccacggaggtgatggtgggaccgactgcttggccgagcgtggtggccaagctgaggatgccgaggtccttgtcggcctcttccttgttcggcaacacgtcgacgttgagtgcctggtcgatggccgagtacacgccatagccgaagccggcgatgcccgcgtacaggtacatgcccgtgacactcggcatgatccacggggtgcggcgtcccatcttggaacgcgtgtggtcggagaggttgccgaacacgaggttggaaaccaggcccacgatggcggtgaccgagttcaacgtgccgactgccgcatccgggttagcgacgccgatgtccttgaacagctggggagcagcacggtggccaccacgtacaggccgctgctccacagaagaccgaaagccagaaacccgacagttaatcgaatgttgtttgttttgatgtgtccttggacatgtctgtcagcctcctatggtgattgcgtgccgttgtatggcgattgtagaccggctcggattggcggttttccgggctttttgagtgtgtggtagcggccgtatgcgccgttgcaatattgatcttgtgaacggttaatgtactcggggctcaaaatatattccagcgtgcggcgcgtttcttgtttaaggaaagtaattcgaaaaaagcagccgatgcatggccgtatcaggtgccgtatggcgagcggcgtatggaaaaagtgtctccgtcgggttgtgatgagcatctatgagattgacgtatgtcgtcaggggcagcaattggcatgtgcgggtggatttgcggctcaaagatggggaaacgatatgagactggcgatggcgcagatggcgatgaccgacaatatcgacgaaaacgccgatagggccttggcctactacgatcaggccggcgaggccggtgccgatctgttgttcttccctgagatacagttctccccgttcttcccccagtatgagaaccgcgatgcgtcgcgatatctcatggacctgaccgaccgtcacgtcgccgcattacagaacaaggccctgcaacacggcatgtacgtttcaccgaacctgtacctcaaagcccaggacggccacaactacgacgcttcgctatggatcaacgaacaaggccatatcagcggcatctcgaccatggtgcacatcctgcaagcagaacgcttctatgaatgcgactattatgcgccctcccaagacggattccacgtgttcgagaccccgttcggcaagatcggcatcgtcatctgcttcgaccgtcacatgccggaaagcatccgtacatgcgcattgcgcggtgccgatctggtcatcatcccgactgcgaacatcagcgccgaaccattggagatgttcctgtgggagattcgcgtccaggtcatgcagaaccaggtggccatcgccatgtgcaaccgggtcggcaaggagggcgatgtggcgttcgccggccaatcagtggtggtggacccgtacggcaacgtcgtcagcgagactgatgaccatgaacagttgattatcaccgacatcgatctcacacaaaccgcagcagcgcgcaaacagcgaccattcctgaaactgcgccggcccgaatggtacgcctgacaagaacaaaccgacgtcagcccggaatcttctcgacgatggtgttcagggtgtcgaaagtctcatcgatttggtccaccacctgcttgccctggttgaccatttcggtgatctgttccgtgcggggttgcggcagcgcataaatcgacgtcttgacgcgcttcaagaccgcaccggcgtcggacaggtcctgcttgatggaagcgattttgggaatggaa

SEQ ID NO: 295 - DNA, 6397 bp, Unknown
  R101_18m  MAG No. k141_78365
cctgcttcatcagacggacgtcgtcgtcccacacgctttccgaccactggtccggattgtagtcaccaccgtatgcgatgcctttgccgttatcggtcagcaattccggccatttgaagttgcgtcgtgcactcacgattatctccttttgtaactggcgcaaggccatgatcattataaaatcttctgttttcccaccgtcatgtgatacaccggtgtagcatacacgtcggcgatgtcagagacgcgcacaccgggctgttctagacgggccgccatcgacgatgccacattcacgcgagagtcgcgtctcatcggtgtgatcaccagtgtcaacctgccatccgcggcatctatggcgtccgcgtaatcgcgaagtccgacctgccatgtcccaccgttgcagaaattgtccgaaatcaggtcgtcaccgcagaacagccagccgatatcaccttggtattcgatgttcagcaggatatccgcgaccttccgtcggttgtgcaggagctgtcccatgccatctggcaggatgatttcacaccggtccgcatgcagcctcttcagacgcgcgtccacatccaccggctccaccgaacgagggatgtcgagcagtccttgcggatatgtggcgattccgttttcggcgtgacgcgtttccagcatccattcgccgtcgtccatgtacagcaacgtgttgtcgtcatccacgaaggcaagacctccgtccaacaccgtcatccgtcgggcgagcttcctggtgacgcatataatctccaccgtaccgcgaatcgtgaaacgttcgaagtccgctttgccgacggtgatatccggaagtccttcgaagcggaacgtcggtttgtccatgccgtcgggtttgaggaacacgaaggtgcggaacgggcggccctgcggccgcagcacggtgatcggctgcaggttggcgcatatgagccgcacaccgtccaagtccatgttgaaaggcagtatgcagttctcgtcccgggcgaggccaatgccatcgaactgtatacattcgccggcggccgtcgtcacatcgatccgctcaccgtggcggctcgggacgcgcacatggtcctggaagttgttgatgaacacgaaaccccgttcgccgtcgctacgcaccgcgtaccgtagcgttgcacggtcagacggatcgatgcggtcctggccgtcctgcagggagaccggcattccggcgaactccagcccgaaagcttttacgaattcgtgcaaggtgcgcagccgttgaaaggactccctcatctgtccgaattcgccgaggggcgcctggaagtcgtaggaacgtttcgggacttgtccctcgttgaggaatccgtcaaggcccttcggattagttccgccgtggaacatgtagtacccgaggaaatcacaccccgaaccgagtttgatgttggtcatcgcatcaacggagcggtacggcagcgcgaaacggtagtcgtacgagttgaacatgccaccgcccatctcacaacaagcatagagccggctgtccggattgtatggcgggtcgaagtcggcgctcgtctgcgggccctgcagactgcggtagcgatactcgtcggtggcgggatgctccgtgggcctttcggcgccgacgccatcgtagaacagccatggccggtacgcatatccgccccatagcggcagcatatcgtccggtaccggcgactgccagccagtacaggtaaacatcggagggtcgatgccctcctcgaacgcgatgtcgcgcaggcgttgcagataacgcgccccgtcgtggccggacggcacccattcccgactggcgcccgcggtcatctcccaaggggccgatgacgccatgtattcgttgtcgacctgagccgcgatgatcggtccaccttccttgaaatatagtccgcgcagctgttcggcgatgtgcgagtagaggccacggaccacgtcgaggaaaccctcgtcaagggaacggacctcgtatggcttgccgtacaaccagtcggggagtcctccattgcgcgcttcaccatgacagaacggtccgagccgcacaatcacgtacaggccgtgcctcgcgcataggtctacgaatcggcgcacgttcctgttgccggagaaatcccattccccctcgcgctcctcgtgatggttccagaacacgtaggtggatatgacatcaatgcccgccgcggccatcttcgcaagttccgtgtcccaccggtcggcggagacgcgtgaatagtgcatctcaccggcgatggggatccatggcaagccgtcacgggtcaggaaacggttcgtggctcccaggatctcgccatctggtctgcatgcggcctcggcccggatgatgggagccatgtatgcggatgtccgcgcgagcttgcgggtttccgaaagatcgattccataactcatgatgtagctcctttgccgaattcccccaggtattccaacgtgcaggaagaccggtcagcccttaaccgagccggcgaccagaccggccacaatccaacgctggcagaagatgaagaacacgaacaccgggacgagcgcgatggtggtgaccgtcatgaacaacggccagttcgtggtaaaggtgctgatcgcgttgaacacctgtagcacgatagtctgcttgttggtcgaggagatatacacgctcggcgtcatgaagtcgttccacgtgcccatggtctggaatacaaccacggtggtcagaatcgggcgaatcagcggcagcacaatcgtatagaagatgcggaacgggccggcgccgtcgatgcgggcggcttcgatgatctcatacggcaagccgcgcatgtactgcacgatcaggaagtagcagaaggtggctccacccgtgtagagcactatcagaccgagcagcgagtcgacgagtcccacctgagcctccatgcgatactgtggaatcagcagtgtctggccagggatgataaaagacagcatgagcagcacaccgatcgcggcggtaaacttgctcttcttcagaatcatgccatatgcggcgagcgcgccgaacaacacctgcaggccgacgccaatcaccgtgacgatgatggtgttcttgaaggcgttgacgatgggcaggtgtccgaacgcgtatgtgtagttctcgaagttccatgtcttcggcagaccaatcgggtccacggacatttcggcactgcttttgaacgtgttgatgacgatgacgtacagcggcaccgcgcaaatcagcgcgatggcgatgacgacgacggaccggataatcgagccgatacgctcgcgttgctgcagggtcatgatagcctcttttctaccagattggtgattacctgctgcagggcgactaacagcgcgcagcagatgaagaagataacgcccagtgcggaacccaggccatatcggctcgagccgatgcccgtaaggatgatagattgggtcacggtgtaggtggagtagcccgggccaccactggtgaggccatatggcagatcgtagactttcaggccgccggtgagcagcatgaagacgctcacacccatggccgggaccatctggggcagtgtgatgttgaagaactgctggcgacggttcgcgccgtcgactgcggcttgttcgtagatatcggcggggatggcctgcagataggctaggtagagcgtggcgtgccatccgatctgggcccatactgccacaaagatcacgcagaatttggcgagtccggaattcgacagccagggcaccgcgtcgatgccgattttggcgagcagcgtgttgacgacgccggatttcagcggggagaagatgtattgccataccaatccgagcacggccatggacggcacagagaagaagaagaacagggagcgggcgaaattacggccgaagaacttgcgattgagcaccacggccagaggcaacgcgattacggtgataagcacggtggtggtcaccgtgtacagcagcgtgaagccaagacccgcaagcagcgtcggatccttgaaacactgcacgtagttcgtgaatcccacgaacttcgcgtccgcaaagttgtagccggagtaatcagtaaggctgaacaccaggctctgcagaaatgggatgaggattaccacgatgaacaccaccatgatcggcaacaggaaacgtgccgaggcgaagttctccatgaaattgcggtggcggcgctgcttgagatggaacgcctctacctgatcagcggaatgtggacgcgccgctgacgctgttgatactgacatgttggttgctttctacaaacgtgagattggcaggtccgggcacggcgcggacgaggggcccacgccggcctgtcgtaatagatacctgtccacgatgaatcaggagagggtcttgagcttggagtcgaggttctcggcagcttgcgtggggctgatggatccgagcgcgacttgctgcagctgagtaaaggtctcggctcgcagtgcggtggagcccttgctccagtgcgcggagttcagatacacgttgccagtcttgatgtacaggttgtaagcatccttgaagtgatcatccaccgtggcatcgaagcccttgacggacgggattaggcccagctgcttctggtacagtttgaggccctcgtcggaggtcaggaaggtgaggaacttctccgcggccttgagcttgtctccggagatcttgttgttgatgccgaaggccggatcgatgtatcccggcgcgtatggggtgtcgcccttcttcagcattggaatctggccgaaaccgtagttgaggccggtctcattgaagctgtcgatgtcccacggtccggaggggtagatggcaaggcgtccggcggtgaattccgacttgacctggtcgccgctcagtccggacacgtcggagctcatcaggttctgcttgatcagcttgtcccattcgccgtagtatttgccgtacacgtttttgaaggtatccttgccggtatcaatcctagtgtcgagtgcctcgccctgcttggcggattcggcgccaatccaaccctcgacggcgttgcccaagccatccttcggctcgaggtacggagtaatccccgaggccttgagcttgccgcacatagtcaggaactcgtcccacgtggccgggatggagtcgtagccgaccttcttcagcagatccttgttgtacacccaagcgttggtccaagtgctcacgcccatggcgtacaccttgccgtccacgctataggctttcttggcggaatcgccaatcttgtccatgaagctttcatcggtcaggtccttagcatagttgcctttgaccagatcgttgagggcctcgggcggcacgatgtacacatcagccaggtttccgccggagattcgggtctgcagcgtctgctggtaaccattttgggaaccggtggtggtgctgtagtcaatcttgatgtccggattggccttctcgaacgcgtcaatgatcggctggtacttatcctgcgagttgttcgagaagaacgacagcgtggtcttaccgtcggcggcgtttccaccgccgcatgcggccagcggaacaagcatcgctgcagcggccatcgccgcaatcattctgatggacttcttctccatgatgtactcctccttgtgtcacatcattggcacttcaccgtgtgcgcgctcatacgatgaacccgctccggccgtaacaggcacacatcggcgtgtctccaactgaccgttcagttgttcggaaacatttcctttttttgatacaaccgtgcacctgttgaatcagtatagatattccgttgtaccatgtcaattcggattcacatttttcgcaccattcggagccactcccctacaaaacaccggcgtgtcggccgcaggtgcccccatacatgttccgcgacgcccgcggcgtcggctggcgttgcggtctccggctgcgcgtcccaaaaaacgttgtggacaagtcggtgtattacggggaattgttttttcgtggattccccagtattggctgggattggaaagcatgcgaccatccccggataacaaatcggcggcttccaaggcaatacccttgaaagccgccgatcgcttggtcaagccacgacatggaccacaggctacggatttacaggcccaagaacagctcgtgaatgcgggtatcgtcggtcagttccgggtggaacgccgtagcaagaacgttgccctgtcgcaagccgaccacattgccgttaaccgaggtctcaacggtcgcggacggcccgacctcagccacgaacggtccacggatgaacaccagcgggaaatccttgagcacaatagactcggaagcggcaccttccggaacgcgctcccccggcgcaaccgaaacggcgaaa

SEQ ID NO: 296 - DNA, 12812 bp, Unknown
  R101_18m  MAG No. k141_81581
aagcacgtcttggaactgcttggattcccagctcatgtggttgacgatggcatcgaccatgatgccgtgggtcttggaaagttcagcgacgtcgtcccagctgccgagacgcgggtcgactttggtgtggtcgatcgggtcgaagcctgcatccgcaccatcgaacggagtgaagaacggcaggatatgcacgccgtcatacacgccgtcgaagcgggtgcgcaggatgtcggtcatcgagctaagagtgccatcgccgagacgatcggcgtaagcgatgagctgcactttgtttttcatgggacctcccttggttcatggatgcaggtgcaatgtgtacgcagtgtatgcgtgcttttacatacttatacgtatcgaaccggtttgatattacctcgaaagggacgttgatgtccagtaataccgcaaaatgcgcgtgtcgaaccggtttgatgcggtgttctatgcagcttagcctgtccgactccaatgtgtccgattcgggcacaaccttctataattgagcattatgacctccacaccttctgttcacgacgtcgcgattcgtgcgaatgtctccgcgtccacggtttcgcgcgccttcacacggccggagcttgtctccgaaaaaactcgaaacagagtgttgcaagccgcctccgagctcaatttctccatttccagatcatcgatggcgctcaagtccgggcagagcttccgtatcgcgctactgctgagcaccccggtcacgacatggttcggaggcaacatcttcgaagggctcgacatggtctttcatcccgccggctatgatatctccatctaccccatcaacaatgtaaaaagcagggcggatttctttgacgttctgccggcgcgacgcaatgcggacgcagtgatagtcccctcgttcaacgtggattccagagaggtcgcgcgcctgaaaacgatgaatgtgcccattgcgggcatcaacaccgtctccaacgaaaacatgtcggtatgggcggccatcgacgatgcgcatggactgcggcttatcgtccggcatctggtgtccctgaggcatcgccgcatcacatacgtgtgcagggacccgcaatcgttgctgacactcagtgcggctcagcgcatcaggggattcaaggaggcctgcgcgcaggcccatatcaaagacgacgttctggttattccggacggagacgattcgttgcagtcgaccttcaacacattgatcaatatgcagcccatgcccaccgcgatctgctgccaagaggacggcatcgccataccattgatgtgccgtttacgggaattcgggttgaagattcccggcgacatctcgatcaccggtttcgatgacggaacctactcgcaggaattgggactgaccaccatacgccagcagccgcgattgatggggcacgacgtcgcggaaaaactgctcgatcttatcaatcataagacgatttccgaaccgtaccgaacctatccggccgagctgatcatccgatccaccaccgcgactccgcgggacgtcgacgaataggcgccgaataggggaagcggggccgtagagaggatacggccccgcttcggggatggggaggaggaacgatttactgctcgtcgccattcaacgtggtggcctccggcagcacaccgttggtgtcctcgaaggtcttccactccttggcccagccattggtgtatgcgtcggcgacggcgtcccacttcccggtttggttggcgtactccacaagagcgtcctgcacgtctgcaccccaggcgtcaagcgtggagaagctcctcaccatcggaacgccattcgtctcgtacttacgggcggcggcggtcagcgggttgtcgggctgatcctcatctccgtacgcggtgctcggcacggcgaagcccatatcctgagacatgaccttcttgccttcgtcgctgctgaacagccactcgatgaagtcgaaggtcgcctgcttgtccttctcgctggcgttcttgttcacggcccaggacgcgtcgtagatgccagcggggccgtactcctcctcgccggggatacccatgaaatacggcagcatgcccagatcctcatcggcgacctcgttgtccttgacctgcgtgtaggcccatacgccgttcgggtagaaggccacctctcccagcgagaactccgcggtcacgtcctcatacgtcttggaggtcaacagcgtgcgcgaggtcggacagttgttcatctccaagtcgaacagggccttgtagttgtccacgtacgtgcccttgatctcaggcatgaacgtggtgttgttgtccttatattcgtagaacagcggaatacgcgtcatatgggatgcgaaccggtacaggtccgaagattcgagtccgggggtcgccatggcgccttcgatgccgagatcgtccttatgggcctgcatgtcctccaccacggccttgaacgtatcccagtccttgatatcgtcggcggagtcgatgaccgcatagtccttcgaggcgtagtcgttgacgatcttcttgttatagatgatgccgtaccattccgcggcgtacggcaacgtgtagtggttgccgtcggtttgatacgagttggccttgccctcgtcggtcagcagcttgaaggcggcggagtcctggaccggctccatgtagtccttccacttgatgaaattggggtagccggtgatgctccacatcgtcggggcttcggtcttggccaactcggaggccagcgtattgtcgtagccgtcggcggccgtgagcaccttgacctgcacgcccgtctccttggtgtactgatcggcgagatcctccaactggtcgacgatctccttcttgttgttcacgaagtagaccttgcctttgtccggatcggccgccgacgaggatccgcaccccgccatcgcgcccatcgccatgacggccgcggcgacgatcgccatcattttcttggttttcatggttctttcctttccttgatgaaccgattggttcttgaaatgattggggctcagcccttgaccgccccagcggtgacgcccttgatgatgtacttctgtccgcacaggtagaacaccaggatgggcagcagcgccagtaccagagcgcccatcatcgcgcccatgtccacggatccgtatccgcccttcaggtactggatggcgatggacagcgtcttgaaccgttgaagatccaggcacagataggccatcaggaagtcgttccacacccacatcgtctccaggatcgccacggagataagagccggacgcatcatcggcaggacgatggtgaagaacgtgcggatggagccggcgccatcgatcatggccgcctcctcgatctccgagggaatcgacttaatcacgccggtgaagatgaacaccggcaatcccgcgccgaatcccagatacaccagccacatgccccacggcgtgttgaggtccaatgtgtcggtgagcttgctgagggggaacatgaccatctggaagggcaccaccacgcttgcgataaacgcgagatacataagcttggcgacccagttgttgaccctgacgatccaccatgcgcacatggagcagcacagcaggatcagcgccacggacccaagcgtaagtatgatcgtccatccgaagctcggaaggatatccgtcttttctatgccgcgctcgtaattctccaacccgacgaatgtgtcgccggtcggcaggctgaacacgtccttggagatgtagacgcgctttttgaaggagttgatgaagaccagcgcgatcggatagatccatatcagcgagatgatggcgaaaatggtcgtccacagcggcccgtgcctgagtttgtcggtcatgcctcgacctccttgctggtcgtaatgcggttctggatgaatgcgaccacagccacgatgatgaagaagatgacggccttcgcctgcgcgacgccctcgaatccggtgcggccgtacatggtgcggtagatgttgaacgcgagcatttcggatgcgtttgacggcgcgccgttggtcagggccaggttctggtcgaacatcttgaatccgttggccaccgtcaggaagctgcacaccgtcaccgacggcatcatcagcgggatgatgatcctgcgcataatctgaccgttcgatgcgccatcgacctgcgcggcctcgatcagatcagtcggcaggctttggaagcctgcaacgtagatgaccatcatatagccaatctgctgccagcacatcagaatgaccatgccccagaagccatagaccgccgacgtggtcagggaacggtcccacagcgcgaggacgccgttcaacagcagctgccagatatagcccagcacgatgccgccgatgaggttcggcatgaagaacaccgagcggaacagattcgccccgcgcatcgccttggtgaacatataggccagcaggaacgagacgacattgacgacgatggtcgtcgcgatggtgaacagcaccgaccgccacagcgcggctccgaattcgggatccgaaagcgcatccacataattcttcagccccacccacttggcatcggtcaccgtcctgaacgaggtaaagctcaggtagatacccatggcaagcggcacgacgaagaacaccgcgaaacacaacactgtaggtagtgcgaagagcgcccaccctctgcgcaccacttttccgacagtggtcattgtctgcatctcctctccgagatcgatatctgcagaagattcattcttgaatccatgcgcagcgtcatattgcaacgaagaccaaaatcttcttgtcttgaaaatagcatattttgcacacggttgcaaactctctttgaaaaatgctatgttattagcacagaatcactgaaaacacaggagtacatccgtatgaatacccaacctttcacgaacagcaaaggcgtcatttcagggaactgctggagaatcggagtcctctccgattcgctgctacgactggaatggtcagacaccggcgagttcaacgatgatgcgacgctcatggccgtcaaccgcgatttcggcacacccccggaatattccacctcgatcgccgacggtctgctgaccgtggaaacgaccgcgctacgtctgacctacgacatgcggcccttcagcaaggagggactcagcatcgtggtcaaaggcgtgaaagacaccaaaaccaatacctggcatttcggcgatgcgcaggagggcaacatgaaaggcacggcccgcacgctcgattgggccgacggcgccattcccctgaacgatggcgtggtctcccgcgacggctggtcggttctcgacgattcgaacacctgcctattcgccgacaatggtgacatcaagccccggaagaacgccgggattgacctgtacttcttcgggcacggccaccgttatgccgatgcggtggccgatttctgccgtctttcgggaaggtcgccgctactcccccgatacgccttgggcaactggtggagtcgtttccaccgctacacaagcgaagagtatgtagcattgatggatcggttcaagtccgagggcatcccgttcaccacctcggtgatcgacatggactggcatctggtggacgacgtcgaccccaagtacggctccggctggaccggctacacctggaaccgcaagctgatccccgatccgcaacgttttctgggggatctgcacgagcgcggctgccacgtctccctgaacgtgcatccgcgcgacggcatccgcgcgttcgaggactgctatccttcagcggcgaaaacgatggggattcccccggacagcggcgagccggtcgagttcgacctgaccgacccgcgcttcgtcagggcctacttcgacatacaccacgacctggaggccgacggcatcgacttctggtggatcgactggcagcagggcggcgtgacccgccagcccggcctggacccgctgtgggtgctcaaccacatgcactactgcgattccgcgcgcgacggccgctggccgctgatcctctcccggttcgccggccccggctcgcagcggtatccggtcggcttctccggcgacacgatcgtgacctgggagtcgttgagattccagccgtatttcacggccaccgcgtcgaacatcggttacggctggtggagccatgacatcggcggccacatgttcggctaccgcgacgaggagctggaagcccgctggtaccagctgggcgtgttcagcccgatcaaccgcctgcattccagctgctcgccgttctccggcaaggaaccatggaacttccgcccggagatccgtgcgatcatggacgatgcgctccgcctgcgccatcgcatgattccgtacctccacaccatgaactggcgcgcatcccggacaggccttcccctggtggagcccatgtattggggatcgcccgacatcgacgccgcataccacgttcccaacgaatacatgttcggcaccgaactgctggccgcgcccatcacggaaccgatggataaatcctcccgacggggcaaggccgacgtatggctgccgcagggcgactggttcgacttcttcaccgggcgccggtatagcgcgtcttcgcccaacggacggcgcatgaccgtctggcgtccgctcgacggaattcccgtgttcgcgaaggccggcggcatcgtgccgatgcagcccctgtccgagggggattccatcaactccgtcgacaacccgcagcatctggagatcatcgtcttccccggagcggacggcgacttcacgctgatggaggattcgggacattactctcggcagatcaccccggcgaccaccgcgatcacctatcgatggcgcaaggacggcgccacatccgcactcacggtatcgccagcccagggagacgttcacgctctgccggcccggagaacatgggatttcctgttccgaggcattaccgacagcgacatatccgtacaggccgacggcgcatccgtcgattcggatcgccggtatgatgccgaaaccctcacattgcaggtaacggtcgccgacgtatccacccgcagcgagatacgtgtcaccatcggcgacacgacgatggcccccgatccccgcatggaagacgtcttcgacatccttcggcatgccgaaatgcgatatctgaccaaggaacaggcttatgccgccatagcggagaacggcatcgacgcattggccacgatggattcactcgagcacgtcagcgggccggacatggaagattgctccgattcgcatatgccgagcgccgtccgtcaagcgctgacggaggtgctgctccgatcctagcccgcatgtcgcctctcccggaatacgccacgggagaggcgacagcagcccgtcacagacccatgtccaggcgaacgccgggccgtcaacacgtcgaggcacgacgcaccagatcgtaggaggtcacatacgtgcggaacggatccgccgacccctcgatgcgcgcgatcagcatatccacggcatgtcgcgcgtaatcatccacatgcgggtcgatcgtcgtcaatccgggcatgcagtactcggcatccggcacgttgtcgaacccaatgacctgcatatcctgcggcacgcgcacgccgcgccgctgcagctcatgaatcaccccgatggcgagcgcgtcgttcaggcacatgaccgcatccggacgcggcgcatccggatcgtccaacagccccgccaccgcatcgcggccgccggactgcacccaatccgcgttacggaccagccgccaatcgacctgcaggccacgctcctcatgggccaacacatagccgcgggtacgcatcgtgctggtggtttcgggccgcgactcgcggtcggcatccgggcatgcgttctccgcggtgccgccgatcaacgcgatcctacggcatcccgaatccagcagcgcccccaccgcggtgcgtacggcctccacgttcggcatcgtgacccaatcggccagtccctgcgtatcgtaatcgcccacaatcaccaacggatacggctggtgcagtatcgtgcgatccgtgatcggcgagcccatgaagaaaatccagccgtccgcggccagcttcttcgtctccgggatcgcctgcgccaagccgccggcgctgttgtaggtatcggtgatcaccgcgtacccgcgggaacgtgccgccgccacgatgctgtcggcgagatagggcatgaacggctggcagaaatcggtgatggccagtccgatgagcttcgtgccgccggttttcatggcgcgggcggacacgttaacgcggtatccgaggcgttcgatggcatcctggacacgctggcgcgtctccgggcgcatactgccggtgttgttcagcacattcgacaccgttttgatggagacgcccgtctcgcgcgccacgtcggtgatggtcacccgtttcgccacagcacccctctcgtcgcaccatcgggcatgttccgcacggttcaggcggaacgcccgtctgattccagcataacgcgttttccccggccggtccggtcccctccgcccggcccgggaagcaagggccgtgcgatccgtccttctccggaacggaccgcgcggcccatcgcgtcacttgatgtgcagggcggtccaactcaccggcggcagggagacgcggaccacgccggactcggcatcgtacatggccgacccattggcgtgcggggtcacacggttctggtcgtagagcgtattcgcggcgaacagatcgtcgtcgtgcagcgtctgcgcctcgacggatgccggctgcgcgccgtcctgcagcctgatctcgaactcggcggtcgcctcgagcgaacggttcaccgcaaacacggcgagcgagccgtcggcgcagcgcacggccacggcgttcacgccgtcgacctcgccatagcgcggcgtatccacggtgccggcggacagcttcggctccagcacggtgccgcccttggccaggcgcgcggtcacggagaacgggtggaacgtggtctggcgccaggccgggccgcccggctccgtcatgatcggggcgatgacattgaccagctgcgccaggctggcggcgcgcacgcggtcggcgttcttgagcagcgtgatcatcagatcgccgaacaccacggcgtcggcggcggtgtagatgtcctccagcagacgcggggccaccggccagttgccgatgccctcgggggtcttgctcggctcctcaccctggtaccagacattccattcatcgaacgagatgtacacgtcgtgcgcgctcttcagatgggccttggtggcgtcgatggtggcggccacgtccttgatgaagccgtccatatccacgccggaggccaggaagctggccatgtcgcgcgtgccgtcctccttgaagaacggctggtagtaggcgtggcaggagacgaagttcacgttctcgtaggtcttctcaagaacggtctgctcccacttgccgaaggtcggcatgccatgggcggaggagccgcacaccaccagttccacatccggatcgatctggcgcatgccggcggccacggaggcggcgagcatgccgtagtcctcggcggacttgtggccgagctgccacgggccgtccatctcgttgcccaggcaccacatgcggatatcgaacggcttgtcggcgccgttggcgcggcgacgttccgacagctcggtgccgccgggcacgttcgcgtactccagcaggtccagggcctcctgcaggccgcgcgtgcccaggttgacggcctccatcagctcgttgccgccggtggcctcaagccattcggccatctcgtgcaggccgaattcgttggtttcggtggaatgccaggccagatcgagtcgacggggacgttcctgcttggggccgatgccgtcctcccagcggtagccggacacgaagttgccgcccgggtagcggatggtggtggcgccgagttccttgaccaggtcgatgacgtccttgcggaagccgtgctcgtcggcggtcgggtggtcgggctcgtagatgccggtgtacacgcaacggccaaggtgctcgacgaacgaaccgaacagacgattgttgaccggagcgacctcaaaatcgtcatcgacgacgagacgtgcggtcagatggtcctgctggggcatgggattcctttctacatatctgcatgcactctgcatacgtgacacgtatccatacaacgatgtaccgcggaggcgcgggcgaccggggacatccgtgtggcagccaccagtgtagtacaaccttgtactgactgccggaaggcgcgtcgcagagacggctgagaccttttggcgcaccactgcagcaaaaaagatcccaagaagtcgaattacagtcccatccgacgcatagccaccgtgaacatacggcaaaaggcatcaaccacgtcacccgtccacccgctacattcacaagcagtaccgcccactctgcatcattcgcatatgcaaaggccgcgaaccgtacgatgacggttcgcggccccctgacatgccattaggccacccggctcgcaccggctgttcggcctgccggctcagccctcgcgcttgggcgcctggctggccacgcgggtcaggcgcggcgggcggcgcgtggacacgaacagcggctgcacctcgaccagcgggttgtacggcgccaggccgaaccacttgaccggggaaccggccacgcggcggatcgcgtacttgatctgcagcgagagggcgccacggccggagaccttcgactcgggcatcagcgccttgtggatcaccacgtagcggatggtgccgatgccgggatcggcgtcaagcttcgggtagatcgactgctggttcggcagctcgccggtcttctccagatcgtgcatgatctgatgcaggtaggccgggatggactgcgagaccttgaagccgaggcggatgcgcacacggaacaggtagtcggtaccgaagctctcgaccgaatactcacgggtgaacggctcgtcggtggtctcgacggccaccgcccaccatgcgcgggcgcgcttggggtggtcggcgaagatcgagaagaagatgtccgtatcgagacgcttcaggtccggatcgctggtcaggtagacgatgttgtccgcgaaccggtggatgcggctatcgccgtgcagcttgtccagcgcggggaggaagtccttcggcatcatgtgccgacgctgcgagcgctccagtttggtgccctcgttccacgtgtacatgatcatgaggatcgccagcgtgagcagcagcgtgaaccagccgccgtgcaggaacttggccatcgaggcggcgaagaacaggacctggatcgccaggaacacgacggtgaacacaacggcgccgaacttgttgctgcggtgccacaggtagatgcccagcaggatcgtggtggtgatcatcgtgatggtcagtgccaagccgtaggccgccgagatatgttccgaatcgcggaacagcagcagcacggccagcgtggccacgcacagcaccacgttgacgaccggaatgtacagctggccgcgggtacgggcagggtaacggacctgcagatgcggcatccagttgaggccggtggcctcggagaccatggtgaacgcgcccgtaatcagcgcctgggaggcgatgatgccggcggtgaccgacagcacgacggccacatagcgcacgttcggatccatcatctggaagaacgggttgatcccctcggcgtcggccagttcggggttgttctggttgcgcagcatccacgcgccctggccgaagtagttgagcaccagcgccaccttgatgaacggccaggtgaagtagatgttgccgcggcccacgtggcccatatccgagtacagcgcctcggcgccggtggtcgaaaggaacacggtgcccatcagcgccagaccggtggcgttattcggactgaacaggaacttgatgccgtagtacgggttgagtgcggcgagcacggaccagtcgttgccgatggctaccacgccgacgatcgccaggaacgcgaaccagaccatcaccaccgagccgaagaccttgccgatcgattcggtgccgcgcgactgcacggcgaacaggatcacgatgatcaccgcggtgatcatcatcgtcagatccttgttctcggtgaacagatgctccaacgccggcagcgtcttcaggccttcgacggcggacgagatcgacacggccggcgtcagcaccgagtccgccaggaaggccgcgccgccgagcatggccggtatgacgagccatgcgccgtatttgcgaatcaacgagtacagagcaaagatgattctgcagaaacggacatccaaacatcccaattcacatcacacatgaccgattctccagaatcggacacacagaacacatttttcggaactcagacgtccgattcggcagaatcggacacatgtgcacaagtcggatgatgagcacgaccatcgacgggcgtccgctggttgtggacgccgctgaaatcgatgcgatccacaccgggcacacgcatgaagacgcgcagcatcaacgcgtggtatcgcctggcaccagcgtcatgggaataagcacgttcggctcgaacggcttgggaatattcttgcgtgaagcgttagctgcggccacttcctcattggcaatagcctgcacgatatggtcggctgccgactgtgcgatcgccgagaaatcctgcgcgaccgcggtcagcttcatgccggccaaatcagtcaaatacgtaccatcgtaggca

SEQ ID NO: 297 - DNA, 2922 bp, Unknown
  R101_18m  MAG No. k141_82322
gaatcacttcgtccaactggtcaaggacggcggcggcgaggcgaacatcgtgcgcttccccgaatcgcgccacgaaatcttctccatgcccaacagcacctacaagccctacctcgaaaagatcctcggcttctacgacgatcccatgatcgccagcgccgcgtactgatgtagctcttcattcattgttcaccgtgcggtcaccttgtggcccggcccgctttaggtggcgggagaacaatggaattatgggcataatgtcttctctccgtcgccgcgccgccgtggttgcggccgcggtatgcgccggcgcgctcgcgttgaccggttgcacggcgttcaataattccgatgacggcacagcggacggcaacggcgcgtccgccaccacgcagaccttccagccgtccggcggcaaaccgaccgccaccctgagcattgcctccggctccgagaacaaggaagtcgccactgccatccagaaagcggccgaccaatccaacgtagccgtgacgatgcactacatgggttcgctggagattatgaacgcgctcaaggccggcggccagaattacgacgccgtctggcccgcttcttcgatgtggatttcgatgggagacgccaagcacatcgtcaaagacgcggccagcacctccaccacgccgatcgtgttcggcatcgccaaatccaaggccgtcaaactcggctgggctgacgactccggcgccaccaagcccgtctccaccgcggacatcctcgccgcggtcagcgacggcaaactcacgttctcgatgacctccgccacccagtcgaactccggcgcctccgcctacctggccttcatgacagcgctgcgtggtggcgatggcccgttgactgaagccgatctggccgacgaccaactgaagacctcggtcaccaagctgctgtccggcgtggatcgttcctccggctcgtcggactggcttaaagacatggtcgtggccaatcccgaccgcttcgacgcgatggtcaactacgaatcgctggtcatccaggccgacaaggccttggacaaggacggccacgacccgctgctcaccgtctacccgtccgacggcatcgccgtctccgattcgccgttcggctacgtggatcgcggccagaaactgaagtccgcgttcgattccttctccaaagcgctcggctccaaagacgccaaactcgagttcgagcgcgccggccgccgcaccgggctcggcggcacactcgcctacgccacggacagtcaggtcaagcagtccttccgcgccgagtggggcgtgaatacggacgcttccgcgctgaaaaccatcccgctacccgccgccacggtgatcgacagcgcgctcaacgtctaccagaccgcgctcaggaaacccagctggaccatttgggtggtcgattactccggttcgatgtctggagagggcaagaacggcgtggtcaaaggcctgaacgcggcgctcgacccggaccaggccaagaagtcgtacatcgagcccgccagcggcgacgtgaacattctcatcccgtttgaaaccgaggcccaccgcccggtcaaggccactggcacaagcaccagcgacctgctgcatgaggccgatgccaccgatgccagcggcggcaccgatatctatgaaggcctgctgagcgcgctcgacgagctgcccagcgagtcggaagcctcgcaatacaccaccgccatcgtgctcatgaccgacggccgctccaactccgatcatcaggacgaattcgaaagcgcctataagtcgcgtggccgtgatctgccgatcttctccatcatgttcggcgacgccgatcccagccagctgaagtctctcgccaccctgagcaacgccaaggtattcgacggccgctccggcgacctcgccgccgtcttccgccaagtcaagggcttcaactgatgctccaggtaatctgtggattcgttgtcggactgctgctcgccgggctcggcttcgggctggccggcggcggagtgcccggcctgatcgtggccgtggtgctggccgcactcgggtatatcgccgcctccacgctcaccgagccggagcgacgcatcggcaaaatgctggtttccgccctgcccaacggtcagaaggccgccgatacgatcgacgcggcgaacgctcgactcaactcaatcgccatgctcaccaagcaagtacgtgacccagccgtcaaagccgaagccaatgacttcatcgccgctaccaaagatttagtgcaatacgtgacccgagacacctccgcctacccgacgttgtgccactacatcaccgtgtacggcgagcagaccgagaaactgttgcgctcctacgtggacgtggaaagttccggcgcacgcgatcagatagccacggcacgaatcgaaaccatcgaggcgctgcaagtgctcgaacagaccgccgccggcgaactcagccgggcggtaagcgccaagacgttgggcattacggccgactccgacgccatccaacggttggcccgcatggatggatacgacgacgtcgcaccttcgcctgtgccttcctcggctgccgatgaaggacggcatgcacccagtcagggcccggctcaccagtcggaccagaaaacggacgcacaatgaaactctccaaatcaaaaatcatcggactgatcgccctgcttgcggtagtgggcgtggtctgcggcacgctggtgtggcggcaatcgcaaccagcgccggccgaaccgaccgaacaggtgagcatcaccggctacctgggcggcgagaaaatcggcctgttcgatgacgccaagttcaaggcgcttgccgccaagcaaggcatcgccatcgactatcgcaaggccggatcgctggccatgatggatgcggaccggaaaggcatggattac

SEQ ID NO: 298 - DNA, 14639 bp, Unknown
  R101_18m  MAG No. k141_85269
catacaaatgcatacaaacgccgcggtacctccatgcccgattcacacgagttcgcgctcgcggagggctccgatcgcgtcggccacgtcgtccaatcgttccggccagagcgccgtgtaggtattcaatgtgatgctgggagaggagtggccgagctgcatctgcagggtcttcacgtccgcgccctgggcgatcgcgaagctcgcgtatgtgtggcgcagactgtgtatggtcacgcccgcgtcctccatgccggccgctttgacggccttgttccatatccttgtccgccacgtgttcgtccagacgttcccgccacgggtggcacggaacagccagtcgtcatcacccatgccatccatctgcgccttgatctgcggcatgaggaaccgtggtatcgcgatgttgcgggccttgccgttcttcggggtgccgagcatgctgccgccgtgcccgtcgtcagtccatgtgcggcctatcctggcgcgccgcctgtccgcgtccacgtcaccgaccttgagggcaagcgattcgcctatgcggcatcccgtataggcctgccatctgaccagcagaccatccaccggcttcccgatcttctccgcctcgtccgcgagcaactcgacctcgcggaccgagaggaacaccatgtcgtcgtcggaggcgatcttcggcacggtgaccctgtccacaggattctcaccgatccacccggccgagacggcgtagtcaaagatgcccttgaggacgactttcacgatattgcggatgctcctcgcgctcagcggcttcgaatcacgcccgtccggcaacgcggccggatagccaccgtccatgagctgtccgacccactcctgcagcatgtcagggcgaagctcacgtaacgtcatgccaccccatttgggcaggatgtacaggcgcagctccctcgcataccggcctgcggtgccgggtttcagatcgaccttcgacgcgagccattcgccggccacgtcatccaggacacgaagctcctgacgaggatcgcggtaacgtcctcgcctgatgtcgtcctccatggccgcggcatattcctgcgcttcggcgagtctggcgaactgcttcgccctctgcacacgtctaccatccttgacgatggtccaatgacaacgccagcgcatcccgactccataacggcttttacgccatttctcaggcacattggccttcatcggatcgcgtgagttcgccaaagagcgtttggccgcgcgactcggcggattgccatcatcgtcattcttgagccacagatcatcaatggtcactttcatgacgcttcttcccacatgtttttcaccccggcgctcgcggtattcgccgacgcgggcggcttttaaggtagagtcccgacattcattgagctgtacatcgggactcgaactattttcaaatgatgctgttatagaaggcggcgcacctcttcgcgaatctgctcagagtaggcatagataccattaagcgtatcgataggcatgcgttcgcagttcttgttttcgtcgaaaacaccgagatatttctgcttagtgttgaaataaagacgaacaattggcttacggttgttatcgtcgaggaatattgcgcagtatttctttgcatctctcatcgttacacgttccggatccacatcactgcatgcgatggctttgatgattcggtaaccggcgatttcctcctcggtggtgacgattccatcgtcgtcgttgccattggattcgtcttcgtcgtttgtttcctcgtttgcgtctggctcgattgtgtcgatcttgatatcatccgcgccgagtgccgtcttgagtcgatcgttgacctgatctgacagatactgcttcagcgccttcgccaccaatggcctgaacttctccatgaccgacgcatagaacgcgccttcgtacacgtgcgaggcgagcagcttcacgaactcgtccgacggctctttgaactcgtcgccgacggccctcttgagcgcaccaacgtatttgagctcttcggcactgctggcgatggaatcaaggtcgaacgccggcttggtcagcttctgcaacgccgggattatcgtcgggtcgatatccaatagatccagcaccaggaacggcttcgagtccatgcggttcggctcatcgatgtccatgtagaaattccatacctggccgttggtcagaacgccgatgcgcgcgttcgtcaccgcgaaataccggtacagctggcttgcgttctccaagctgagcggtacgccgatcttcttgcattcgataagaatctgcacttgaccgtcatgcacgagcgcgtaatcgaccttttcgccttttttgaccccaacgtcggcggtgaattccggcacgacttcggttgggttgaacacgtcataaccgagtacttgaccgatgaacggcatgatgaacgcgttcttcgtggcttcctctgtttcgatgccctctttgaggtcgcgtacctttgctgcgacctggttaaggctctcttcaaattccattgctctcccttcctatctggttttaatggaatcttcgattttgatgcggtcggcccacttatcgatgtcgatatcttcgtgagatgtctcaaaatcgcttacaacttctgggtctttgctgagttcatcagcgtcggtgatgatttgcgatagcggcatcttcaaagcgtccgcaatccgatgcagctgctcgtaatcggcaacggtgtttaaatcaaatattttacgaagcgtgctgtatggcacacctgacttcgcggccaacgctgggcctttgatctctcgcgttgccattgctctcttgattgctatcgatagcgcctttgattcgatagttgggattttctttcctgttgccataaatgcaactttagacccaattgggatatagataactcatatgggacacgccgaggttgacatgagtcatatgcaatataacatatcccatatgggaacaaataagctcaattcgcaatatctgggaaaagctatgaagtctgcgattaagcaagctggattcacgcaggacgaggctggaatcaaagctggcatccctcgcaacagtcttaaccgcaaactcaatggcgggacgttcaacttcgatgagcttgtccgtatcggtcaagtcaccggacgcaagctctccgacatcatcaaagacgccgaagcgctcgccgacgcatgaaaggagtggacgcgtgatggatgacaaagaggtgttcgccgcattggcggcggcgttgaagccgatgaacacaacgaaggacatcgcggacaactgcggcatcaaggaaggcaccctggcgtactggcgtagcgcgggcatcggcccgaagttcgtgaaggtgggacgaatcgtcatgtatccgaaggagcagatgatcgcctatttcgcgcaacacctgtaccagtgcacggccgaatacgaggaagaggtgggtgcgtgatgaccgacaacggctggcgtaccgataccccgtggccagatccatgggaagaaaaggagaacaaatgaacgacatccgcaaagcctgcgtcgaagcgatattcagggaattcgaggaccatggcgacgccatccgtccggcctatgccgacgggtgggacgaaatcgaagcaaggcgttcgctcggtcacatcgtcggaccgatggacatcgacgtgaccgacctcgtggacatcgtcatcgacaccatcaacaaggagctgtgatggaatcaatgcctttggccgtcggtcaggccctgctcgatctcagtgttgcgtctgctgcccagttcggtggtgtatgtgacgtgtacagtgacgcggcatgttccgatgtcggcaaagaagaagccgtttccggagttgatggcgtcgatctcggattggtctttgattatctgcttggagaagaactcgctttcgagcgcgatcttgcagaacggcattgtcttgtcgacgcgcgcctgcgcaatggtctggtcttcaaagcggacgaacacatgaacgtctcgtgcgatgttgccgcaatcgttgacaaggaagacggtggaagtttctccatcgtactcgaccctccacttgtaaaccgtctggtcggcggtgactgccaacgcccgttggctgatcgcgttcgcgtctgcagctatctcgttcgctttgccggcaaggtcgttggcgtgttcggcgatccccttcgagtcggcggcgatcccgttggcttcttccgccgagtcgttggcgtccttggcgagcttgtttccagcatgcgtttggaacaaggcgacacatccggcgacaccgccaaccaatcccgtgacggcgccaacgacgccggtgaccacattgatgtccattccaccgattctaaagcagaggcaaaacgatgaaagctcttgcccgcatcatcttgcatcagctgctgttcgcggtgtggttgctggccatgtgggtgctgtattgcacgccggcgtgcacgcaccccatcgaacatctcatcgccgcgccgttcgcggtgctcatccccacggccgtcatcatgcgccgcctgtgctcggacccatgcttcatccgatgggtggacgaactcgagcgatgaaagacctgggcggctcctcacacattgcggcatggacgtggttcgtcatgcgcggccatgccggaaccgccagcgcgtcaaggaaaagacgttaaaaccagccggacgggtcatcttctctcttctcctcccgtccccttcgccggggcccgcggcaggatgcgggcgccatggatcggcgtgttgaggtcacgtcggcggatggatgcgcggttcgactccgcgtcccggcacgacatcaatccaaaggaggcaaacgttgccaagcaaaacaccaagcaggccggaaggcgagaagtggttcgaatggccactcacggcggccagcgtcggcatgacgtccgccgaactgatcggcgaactgtacgagaccatcagcgcgctcaaccgcgaccgtggctggaacctcaccatggtcgcgccggcgcgcttcggcgagatcgtcatcgaccgcgaggccggatgcctgcgcgcgaaatgcgcgtggaaggccaaggatccaagccagctcggcccggaaccggccggatacgtgagaggggagtgacatggccatcggcgagaccgtcatcaccatcgtcggcaacctcaccgcggatccggaactgagaaccaccggccagggtgcgcaggtcgccagcttcaccatcgcaaacaccgcgcgcgtatacaacaagcagaccggccagtacgaggatggggcggcgctgttcatgcgctgctcggcatggcgtgacatggcctcgcattgcgcgcagagccttgcgaagggcatgcgcgtaattgcgcagggacgcctccagcagcattcttaccaggcgcaggacggatccaatcgcaccgtcatagagctgcaggtcgacgagattggcccgagcctacgctacgccaccgcgcaggtcagccgcatcgaccgacggccgcaaggtcccgtctacggcaatcccgccgcgcagacgccgaccgtcaacaccggagcgggcggctggagccaacagccggcccagtccacgcaaccggccgcacctgccgatgatccgtggggcgcgccgtcggacgaccggtcatcattcggaggtttcggcaaacccgatccggaaccggaattctaaggagcagcaagcaatgaaagccagcgaacaacaggcgctcatcccgcaggaggccacgcccgacacgctcatcgacctcatcggcaagacccagcaggtcaccaagtccgcggccgtcgtgctcaaggcatgccgcaccgtcatggacaccaaaaacaagcaggagcacatcgacaagtggggcggcatccacgccatcaccgaagccgtgtacgactgcgcagacctcgctcagcgcatcctcgacgccggcctggccatggagaacatgtgcgcgaagccagccacgtcacggcagatgatcctcatcgacgacctgcgccgcagtctcgacatggacgatggcgacgtggaggcgaccgtcgatccggacaccggcgagatcgactgaaccacaggaaggagaagaagagatgtggttcatcatcgacgaccagatggccgacgacaggcgcatccgccgcctgcctctcgccaccgtgggactgtgggtcaagctgtgcgtcatccactccaaaggcgtctcgatgcaggccaaggaccccaccgcgtaccccggccacttcgacaagctcgacctcaaggacgccggcggcaccatgaaacagctgcagcagctcatcgactccggcctcatggaagagcacgacggcggatggcgtccggtctacgcggaaggcatctgcagggagcccaagatgctcaccgaggaacagcgcgaggcgcgccgcaaggccggaagcaagggaggacgccgcaaggcggccaaccagaaagccaagcaaacattcagcaacttgccggaaaacagccaagcaaacgaagagcaaaacggtagcgagacaggtagcaaaccgtctagcaacttgctagaggacagccaagcaaaaacatggcataaaaccgataccgataccgatataccctctccgacccctcccgccggcaaaccgaagcaacccgccacgccggaatccggcttcgaccatttcgccgaagcctatcccggatccgtcggcgcgaaaggccgcaagaccgaagccgaagcacgaagcctgtacgcggccatcgccggaaaccccgtcgaactcacccgcctccaaaccgcgctccgccgctacaagcacgccgtcaacgacggccaaatccgcaacggccacatcccacggctcaacacatggctccgcgaccaatgggaaacctgggcgcccgagccaatctcgccgccgccaatccacaagcacacctggaactgcgaacacgtccaccagctcatggatccgcatgaggacgaatacgaccacaccggaagcctccgcaacggcaatccaagcgaatggtggaaggcatgccaggcgtgcgccgaagaactcaaccaacaacaaaccagcaaggagaagcaatgagcaactaccaaagcaacgaaatcaagctcatcaacacgagcctgatcgacccccacccggacaatccacgcaaaaacatcggcgacgtgaccgacctcgcggccagcatcaaagccaacggcctgctctcgcccctcagcgtcgtccccaacggcagccgctaccgtgtcatcgccggacaccgccgcctcgccgcatgcaagcaggccggcaccggagccgtcccatgcttcgtgctccaactcgacccattgcagcagttggaggccatggtcaccgagaactgccagcgcgaacagctcaccgtgttggaggaggccgacgccatccagggcatgctcgacctcggagccaccaccgccaacgtcgcccaccggctcggccgaagcgccgactacgtgcgtgaccgcgccaaggccgccagcatcgacaacgagatcagagcatcccgcgacgatttcagccagctcaccatcggccagctcgtggccatagcgcgatacgacggccgtccggatctgcagaagcgcctcgcgcaggcggccggcacctcgaacttcgactacaccctcagccgcatcgaacgcgacgaccgcgaccggcaatggatcgaatcggtcgccgcgctcctcgtggagtccgacaacggcatcaacctcatccccgaccccgaaaagccctgcagcgacccggaatggcgatactccggctgcatgttcccatccaccggcacccccgaagaaaccatcgagaagatccgcgaacagaaccccgcagccgtatccatccacatggagcaggtctacctctggacccgccgcgacaagaccgccgacgccgaaaaggaagcccgacgcgccgccgaacaagccgaacgcgacgcccgccggcacgcgctcgaggaatacgccgccgcatccgcagacaagcgcatggcatggctccacgccaacctccacggcatcaaacgcgacaagctcatcgaaaccacggcccggctcggactcctgcagatcatcgacccggacccgcagggctacacgctggcgctgagcacatggaacgacgccgcatgcggtggcgaacaattcaccaccatcagcggcatcgaaccggaacgggcgctcgccgaactccgctaccacctcgacgaacccgactgggcggtctgggcggtgcaaatcctcgccgcacgcatcgaatggttcatcgacccgaccgactggaccaccgtcaacgacaccagcagacgcatccccggctactaccagatcctccaagacctcggctacacgcccaccgacgacgaaaccagccacctcgaccagctcatcgcagccatcaccgaagccgactccgacgaaaacgaagaagacgaggagaacaaccaatgaccatgaaacaactcgaaagactcgcccaactcctcaccgacaccgcccagaccgccagcacaatcgaactgcgagcgctcgccggtggcaaggcggatgacggcatcgtggcgatggcggcggggctgagggccgactgcacttcctgtttggtgctggttgacggtctgatgcaggagggggtgcgttgtgagtgagttcgatgattcgaagcgtgctgctttggaacggcagggttggcattgtctgcgttgtgggacgaacatccatgatccgtcatgctggcctggacgctccggccatcaccgtcagttgcggcgggcggcggatccggatgtgaggcacagtccggccaacatcgtcgagttgtgcggttcgggcacgaccggctgccatgggtgggtccaccagcacgtgaaggaggccgaacgcctcgggctgatagtcccgctcggcggggatccgcgcaccactccggtgcgcgactggcaggggatatggctccgcctcaaccaggacggcaccgcgacccgtctgacagccatggaggtcgccacactcgacatcgacaggagggaagcggaatgaccattgacaagcccgacatgctgctctggatggacgtggagaccacggggctcgacccggaccatgacaggatcctcgaggtggaaatgcgttgcaccgacatgagaggcgtgcggtgcgtcggaggtttccgccgcgtcgtcggactgaaaggccgcaaggcatccgttacggacgggaacctcaaggcgtggcgcatgcactgcgccaacggactgctcgaagacgctctcgacggcggatatacggaagaggcgacggcgaacgcgctcgaggaatacgtcgacagcctcgcgcaatcgttcaccctccatccggcaggcagcaacccgcagttcgacctcgacttcatcggccgactctgcccgaacctcccgctgcaccaccaccgcatcgacatggccaccctccgcgacagtctcgaagccgccggctgggatgtgaaaccggaagaggagacgcctgcagccagcgcccaccgcaccggcacatgcctcgaccgcgacatccgtcaatacgcgcgcatcatccgccacctctccgaacatccggtccgatacgtcgccacgaaagcagcaaggtgatggacatcgcagcagtgatcctcctatgcgccgccatcctgatcggctggatggccaacagaccatgaacgtacaaacaacgaaaggaacctcggaatgaaacagaccatcaaccgcatctccaaccgcatcggcgactggttcgcctcgctgttcaccaccaccgcgctgctgctcgtgccgcacgccatcatccggccgatcatcggcatcggcctccaccactggacccccatccaatggctcgccctgcatgtcctgctcatcatcctcaccctatgcgtcgcggtcgccgcctacatcattgcggaccgcaccgccgtggaaccgccggaaacatactgaaaggagccatcatggcagaccaggagaacataccgatcggtctggagacgcagaacaaggtggccgaggccatctacctgcgctggtatagcaacgcccgccgccatccacgcccatggaacgaaatgcccatggagggcaaagagccatggaggcgcgtggccaataacgccatcagaacgttcttcgcatctcccgagttccagacgctgctcgacgacgtgtacgacgaaggctacgacgcggccggaaaggacgcccaaggcgaaaacgaaggcgaggagccgcggtgagcgtcaacgtcccgctgcataaatggcggtcggccgacccggccatcctgatcggccgccgctgcatcgcccaaaccgaccaggacgtcatcatcgacggacgactcgaactcatccgacatccggacggcaccgccagcctccgcttccagggcatcggaaacgacatcatcgaccacgatccgaacacatgttccaacagcatgagcgacggcatccgaagcctcgccatctacggaaaggaatgaaatgcaccacacagacaccgtcagaatcgccaccaacccacgcaaatggcgcagacctgcaccctgcccggcatgccgcaagtcccggccgctcatcctgaccctcggcaccatctacaacctccgaacccgcaaaccggtcaacaccatctacggctgcatctgccccaactgccggcacaaatgcatcctccacgtcgacggcaaaaacctcaaaaaagccatccgcctctggaaccaccacgccagccaccatcaaaggaacgaacaatgagaaacaccatctgcgccacacttaccgccatcaccctcaccctctgcaccgcgctcgcaggatgcggaagcgcgtcggggccttccacgccagcgcatgcggtcaggtccgtcgactcgcagtgctccgccggggccgacgtattcacggaatgcgtcatcaccctgaccgacacgaggcaagtggactgcgtcgtctactcggcgaacagcaaacaggccggcctgtcatgcgactggagccatgtgagtggcgcggacaaggagccggcaagatgagctacaacgtcgtcacccaggaaggcgtcagaacgttcgaggacatcgacgatgctggcgactacgcgcaggccgtgtccttgaggactggcgagccggtcgaggtgttccatgccgagaccggactcgtcgcattcaccgtccgcccaaccacgaaggacacgaaatgagaatcaatttcaacagcaaggatggcgttttcgccatcaaagccgaaaacgaagaggaaaaaacccggctcaaaacgtcggcggtcgccatctgcaatctcatcatcgattttttcgacggtgaagtccaagaaatgaaggcggcgaaggaatgaaacgcatcccactcaaggacacaaaatgagcaatcgaagttatttggtgccaaggccgccagcgttcgaccatgagcatcccagaccgaaggaggaaggcgaggtgctgtactgcggaaattgccaaaaatggtacgtatcatggtttcccctcaccgaagtcaaaaccatatggggccgccgccccgaatggtggatacgcatcttccaccgcaaaccatacgagacgatcatccggcaaatacgaagggaaacgaaatgaaagtgaagaaaacccttatggacatgatcatcaaatggcaccaagccggatacagcctcgatgagatctcgccactggttcctcaagtccccaaagaggaaatcaaggcaatcatccaacaacaccacgaataacaagaaacccgaccttccggccgggctcctgacaccaccagaagactaccacgccggagggaatcgaacaaatgaacgaacaaaacaacgaatcccaaccaaccaccaccaacaccacaacaaacaccagccaaacaacaccagcgctcgccggcgtgtgcctcgtctgcggcggaggatgcgctgtcggcgacaccatgtgcgcgaaatgcgatgggctgatgcgcggctggctgcgggaatatccatcatggttggattcgctgcatgagttcctggactcgaccgcgcactacggagggcgccagcctggacgcgtcaaccttccagccgcaccgacgccaatccgattgccggtgctcgaccacatgcaggtcatcgaggatgccgcaattgcactctggcgccggttgtacgctccgcctgccatgccgtgggcgacctatgacgcgcatccgccgctggtggacatgctgcgtgtctgcgccggcagtcctcgactgcgccgcatgcctgacatcgccgacttctaccatgcgtgggagtcgatggttcgaaagacgctggacatcatcgacgtgccaccttccaagcacggcatcggcagatgcccgaacccattgtgcggtgtcgaactgtcggcgcccatcgacgcggtcgaggtcacctgtcccgtatgcggcggcacttaccgcgtggcggacgtgcggctcggcttcctgagggaatgcgttcggtcgggacgcgcgttcacggcgggggagtgcgcggaactgctgcgcgaatgcggattccagtgcagtgtgaacacaatctactcgtggcgcaagcgcggcaggctccaaccggtcggcaaaaacgcgaaggggcagccgttgtatcggctctccgacgtgcatggacaggtcgtgcggcgtggcgtgatttgacatttttcgaagtgcaaggcacgattgtcagtggattagagggttcaaaccgaagacatgcggtttgaacccttttcatatccaccttggattctcctaactccttgggttgcgtaacaccgtcctgtccgaacggcataaaggcggcattttcgacgagcgttaagatgccgaaggaggaggcgataccggtgcgtacgaccgacctcaagcatctgaaaagggatatcagacgaattccggatggcaatggtaaattagacaacgctttttggtgcgcaatcggtatcggaatcccgatgataatccaattcgtggtggattctagttcttccggaggtcacggcaactggttgattttggctatcggcgtggtgtcatgcatattggctggcatgtttaagatatttggtaaaggtgagaaagaagaccgcgaacgatatatcgacggcatcatcgagaacattgatgatttctccgtcggcgtgagatgaagttgaatttctccggagtcacccgtgaaaaggaatggcccggaatcgcttccggaccattcgtttatttgtcgttttgtttgcgtggtctgccgccgccgacgcctctgccgggacgttgcgcgttccaccggtcgatggtttcggggagccagccgcgtgtgcggccgatgcgcacgtccggctccggcaggtcgtagactgctgcgttcgcgacgccgagtctttcggcgacctgtttgacgccgaggtattcagtcgtcatcgccgccccgtctgtccatgatgagcgtggcgatgcaccagatgcccgccgcgagtccgaacaatccggcttgccatggttttcccgcgaagccgagcatggcggacagcaggccgcatgtgatgctgcagacggcgaatatggtgcttgttttcatgatggccatgaaataggatggaaccggggttccgggcactaggtctgctcggaaccctttcgtcatctcttatggcgtggtctgcgccgtatcgagatgatgagcgccgccagcgcgatgatgttgctcgccaccgagctgatggcggtcacgatgtccgtccatttcatgctcacctcctttcctgttgacataaactattgtatcaaaaatacataagttatgcaagcgagatagatattacacgccgaaaggagcagaaatgaaagaagccctcgaagagatcgcacatcaactcacacgcatagccgaccaaggagaacaggcgggcatgcaaatcagcaggggtgatgccctggaagcgtggggcctgcgaatctacgaggaggacttcctctcagcgctccgatgtctcggaatcgaagtcacagactgatatcgaatcgatgacgaatgacatcacataagccaaacgttcgcagacaaaacggatcgcgacggaatcagctcgtttccagacacaaagcagcggtcaaaagcggaagaacctgcggaatctgcggaaagccaatcgacctgcgactcaaatatccagatccttggagcttcgtcgtggatgagatcatcccaatcgcaagaggtggaaatccatattcctggacaaacaccgaaccgacacatcgatggtgcaacaccgtcaaaggcacgcatacactcgagtgggcacaacgtgaagtgcgacggctcatggccggtcagctggggcagcaatcaaaaccacccaccggcgtgccgtttcggaaaatcgacatctaggggcgatatcccctcccggtccggaaaacacgtcccccgccgcatagggccgatatctccccggaagcttaaaacgtgacggtttgtaaaacgtgacgggaggtgaagcgtcgtgaaatgc

SEQ ID NO: 299 - DNA, 3101 bp, Unknown
  R101_18m  MAG No. k141_87109
aagattaatccacacgaacagatgtccctcgtacacgatgaacgctggcttatgcggaaaacaattcatcaaacgcagcatctcagccgaacaccggccattaatcaacggagcaaaaggcacccactccgtctcaccgatgctgcacgcagcatacgcaatcaaaccctcatccaacgtcaccggaaacggtgccttcaacatattcgcacaaaagtatgaccccaggggcttcaccggctgatatcctgcagaataatctctactgtcccagctaaaagtggtattcggtgccccagcaataagccaatcatcccgttctgtaagtgtcatgacccgaacaggtccatgcttggtcgttcctcgccaattgcgccatggctcatcgcgcccggacacacacatatacagcaaccataaaggcatgctgaaactcggtttcatggacaacggccgatcatagtcggctagacttttccaaccacgctcactgtcatcaaacgggtcttctacatagcgcctagtgaaatgtctgctcgtataaactctagccatagcaacactctattctggccccgcacataacaaagtcaacgccacaccgcgcacggtccaaggaacagacaccattacaagtcacggatgcattctgggagagtacgctgccatacgtgtgttcgccgcaagttaagcgcccaaatacagctgcatcccgtaatgcgtacatgcgaattacgggatgcggatgctcacacactgcaaacgcccagactggcagctggaggttccctgtttcagggtaaggaacctgccagctgctaaccgtgccgatcgttactcgttcggacgcttcctgcggcccgccatggcggcgagaggcttcgcttcgaactgttcatcatcctcaagtgttggggcgatgtatcccagcccacggcgcttctgcttcttgccgttgccggcaccgccctggccacccatcatgcctggagcaccagtgcgcgctccggcacccgaagcagcggacgatgctgcagaggatgaggacaatccagccgccatgcccgttgcacccttgatggatgaggacgcgggaaccgcgtgcaccggcgtgttcgcgtaatacgagcccacgccaccggcaccgctgactgcggccaagccgcccgcgccaccgaccgccgtcagaccggcaccgccagccgcaccaccagcaagcttgccagctgcaaacgcgccaccagcaccaacgccagcgcctaggccggcgacaccggccgtaccagcgaccttgccgaacgtggagctgccgtttagaccaccggagccactgtccacggaaacgtagtcgttatccttgtgaacccactgcttcttgactggatcatagtagtagtccccgtattcatcccggccgccgttggttgaggagccgtggtttccggagttgattgtaccgttgccaccattaccggaaccgcttccattgccaccggaacccgcaggtacacgctggtattgcggcgaggaactaccaccttgggaagacgaaccactcccatgggaggagcccgactgccccgaagaggacagtatggaagagccaccagagccactgcctgcagatgctccggcacgagacaacgcataggcacccgcaccaccggcaccggccaatgccgccgccgaagttacgctcgccggcagattgccgagagagctcagcgtcccgtctcctgtgccgctgcccgagccaccaccggaaatgtaattatcatcgtcgtcaggggcgggcggatctacgacggggataatattctcagggaaaggatccttttttattccgtcttttattttttttagtttttccgctgcgacttcatccctattagttgccaacaagcgattgattgcattgactcccgcgattccagcgatgccggtcagcgttcccaaacccggaaccacccagttcatcggctcggtagttttcataatggcacgctgagacgattcatccaaggcgtcacccggtagagacaccgattgagcagctcgaatcgcctcgttatagtcatcgatacgatcctgaatcattccgatttggtgatttacgttgctttctttaattttccctacaatatcccgacaatattgtgatgcttgtccgcgcgccctgcactcatagacagtgggttcttccagacgatcgactattttctgcaatccgcgtacggtttcatcaagcgcatccctgtactgcgtcaccgctcgtggcatctcccactgatcagagcgagcgatttcctccaattgctgttcagcgcttttaccagcgccatcctgcattcccatattctcagctcctgtctctagttcaacggttgttgttggtatgcgggttttgtgtattgtctggtattacggtcggttgagccgcctgctgcggaggcattgccaccggtgccgccgagtacggtgcccgctgcgtggacgcttgcggagtctgactcgggacccgatactgcggcactggctgaccttgtccatactgctgtgggaacgccgtaggatatggcacctgctgttgcggtgcgtattggcctgcggccggaggcgggaccatgccattattagcaccgggcacctgaggcggatacgggttcaccgggggcaacggtcctctgcccgcagcatggccgccatgccgcgaacggcgtctgccgcgcttcgacaacaccaccgccaacacgatgccgccgaccaccacggcaatgcccacgccaccggttgccagccacacccacagtggcacgccgagcagcttcgaaccgcccgtatcgggcagcacggtcctgccactatccttgccgtcagccttatcagccgtgttcgtggcggaatacttcatgcaatccgaaccaccgtcagccttgcaccgctcgactttcttccacgcggcctgctggcgctcatactcccgccccaccagatcggtgtttttggtcgcgttgattctctccccgtcaggcgagaatgggtcggttgccccgtagtcatgtttccaatcggagtggtcggtgtacatgccgcgggtctcc

SEQ ID NO: 300 - DNA, 20455 bp, Unknown
  R101_18m  MAG No. k141_87567
gatgcgattctgatcattatcgtggcggctgtggtgactgcgctggtcggcggcattggcgtcgacggcttcctgaccacgttgggtacgtcgttcgtctcgaaccgcagcatggcgattttcatcatcgtgttgctggtcaccggtacattggagcgcaacggtctgaaaaccgcagccgcgcagctgatcggcaaagtgaagaatgcgacgcccggtatggtgatcgccctgtatggtgtgatgcgtctcgtgttcgccgcgttcaacgtgagttttggtggcgtggccgggttcgtgcgtccggtcatcatgccgatggcggtaggtgcgattgaagcgtccggtcacgagccgaacgacgagtatgtggaagagctcaagggcatggcttccggcatggagaacgtcgcatggttctttggccaggtgctgttcgtgggtacggccggtgcgctgctcgtgcagtccacgttgaagccgctgggttatgacgtcgaactgttgcgcatggccattatcgagattcctgtcgcggtgattgccgtggcggtcacagccgtctattacatcatcaaggacacacgactgcgcaagaagtactacggtgccgaagccgccgctcaggccgccaccgctaccaccaccggcaaggaggcctgatatgtcgttcttcatggaccccagcgtgaccgtcggcacgaaaatcctcgagttcttctatattttcatgggtttcatgtccgtgtatgcgggcgtacgcaacctactcgataaaaccaacaaggcccgctacggcactttcgtgttctggacggcgctcggtatcgtcatcgcgttcggccgttggattccggccattgcggacggcgtgctcattatcatcatggtcattcccgccatcttccgccaagtgcgtaagggctcggcatccgattcgagcgctcccagcaccgccgaagtggccgcgaacttccagcgcatcggcatgcgcatcttcattcccgccctgtgtctgggcgtgttcgccattatcggcgccctgattcccagcgtcagcgccctgaccggctgctgcatcggtgtgatgattgccgccgtgattctgttcgcgttctcgcatgacaacaagccggtcgtattcctcaacgattcggaacgcctgttgtctgccatgggtgcgctctgcatgctgccgatgctgctggccagtctcggcgcgattttcacagccgcaggtgtcggcgacgtgatcgccacgctggtcggcggcattattccgaagggcaacgtcacgctgggcatcatcgtattcggtgtgggcatgatgctgttcacgatgatcatgggcaatgccttcgccgcgattaccgtaatgaccgtgggcattggcgcgccattcgtgctcgcctacggtgcggacccggcggtgattggcattctggcgctgacctgtggctactgcggcacgctgtgcacgccgatggccgccaacttcaacatcgtgcccgtcgcgatgctcgatatgaaggaccgcatgggcgtgattaagaagcaggtgctgcccgcattggtgatgattgtggtgcagatcgtctatatgctgatcgcgcaataacctcgttgtccaaataccacaacaatccgtgaaataaggagctaatgatgagcaagattctggtgaccggattcgatccgttcggcggcgagccggttaaccccgcattcgaggcagtcaagctgttgccggatgaaatcgccggtgcgacagtggtgaaactggagattccgacggtgttcacgcgcagtgcgaccgtggttgaggaagccatggtgcgcgagcagcctgactatgtgctgtgcattggtcaggctggtggccgttcggctctgaccgtggagaaagtggccattaatttggccgaggcgcgtattcccgataatgatggcgagcagccgttcgatacgccgttgcgtgaggacggcgacaccgcgtatttcgccacgttgccggtcaaggccatggtcaggaacatcaatgaccacgggattcccgcattcatgtcgtatacggcaggcacgtatgtgtgcaacagcatcatgtataacgtgttgtatctgattgaccgcaaattccccggcgtcaagggcggcttcattcatgtgccgtatgcgaccgcgcagggcgtgggcaagccgaacggcacgccgaccatggaaatcgcgaccatggcgcgcggcatcgaagccgccatcgaggccgctgtgagcaccggaaccgacgccaccgacatcatgggcgaaacccactgatacgcatagcgatgcccctgctgacagcagttgtcagcaggggcatcgctatgcgttgaacgttacagttcgcgcagctgggcggcgatctggatggattcgacgctggcctcggccttgttgcgcgtctcctgccattcggtagcgggcacggagtcgagcacaatgccggcaccggcctgcacgctcgcctcatggtcgcgcaggaacgcggtgcggatggcgatggccatgtccatgttgccagagagatcgaagtagccgacggtgccgccgtagatgccgcggtcggccggttccaactcgtcgatgatttcgactgcgcgcggctttggcgcgccggaaagcgtgccggccgggaacgcggacttgaacacatcgaatgcggtcagcgaggggtcgaccttgccggtgaccgtcgagcagatgtgcatgatgtggctgaaacgcttgatgtccatgagctgcacgacttccacggactgcggcacgcacaccttgctcaggtcgttgcgggacaggtcgacgagcatgatgtgctcgctgcgttccttcggatcggcaagcaattccttggcgaatttttcgtcttcctcaggggtggcgccgcgagggcgggatccggcaatcgggaaggtcatcgcgtggccgttgtccaccttgatgagggtttccgggctggagccgatcacgttgaagtcgcggccctgagcatcggtcaacgccatgaaatacatgtacgggctcgggttcagcgtgcgcaacacacggtacacgtcgaacgggtcggcaggcgaatcgatgtcgagacgctgggagatgaccacctggaacacgtcgccgtcaacgatgtgctgcttggcgcgttcgacggcctgctcgtagtggcttttctcggtgcggaagcgcagctcaggctgggcgaccgtttcgtccaagatgttgacgcgggactcgcccggagccggggtggcggcatcgtgctgcatctggtcgagtcgagcgacggcctcgttgtaggcgacgtcggcgcgggtggatttatcatccacgttcaccgcgttggcgatgagccacaccgaaccggatacgtggtcgaccacggcgatatcggtggccagggcgagcacggtctcaggctggccggtctcgtccggagcttcggcgcgcagggtcggttcccagtggcggatggcatcccagccgaccgtgccgaccagaccgctggtcaggttcggcaggccttccacatgcggggccttcagagtcttcaacgtggcgtgagcgacttcgaccacgtcaccggtgactggcacaccaaccgggaccttgcccagccagtcggcctgaccgttgttggagcgcagctgggccatcgagttgacgccgatgaagctgtaacggctccacgtgccgccgtattccgccgattcgaggatgaaggtgccggatcggccgccggcgagacgctcgtagaagccgaccggggtgagcgagtcggcgagcagacggcgcacgatcggaatcacacggtagccggcgtcggcccgttggtggaactggccgcgactgggccaggtggcgccccacttcaggtgtttgacgctgcattcgctcatattcgctcctttacttacaactcgatgtcttgtttcgtagtacgcggtcgttcggcttcccccagtcagggaagcccgttctactgctcggccgggcgatggccttcgaccacggacagggggccgccttcgaggaagcagctgcgcttgccggtgtggcaggcggcaccgacttggtctacttcgacgagcagtgcgtctccgtcgcaatccagggacacgcccttgacgtattgcacatggccggaggtatcacccttgcgccagtattcctgacgggaccgggaccagaaggtcacgcggccggtggtcagcgtgcggcgtaatgcctcgtcgttcatgtagccgaccatcagcacctcgtgtgtgtcgtactgctggatgacggcagcgaccaggcccttggcgtcacgcttcaggcgtgcggcaatacagggatcgagttcagtggaattgtcgtatgtagtgtctgtcatacctatcttccttatgtggaccaccctcagtcagcttcgctgacagctcccggattatgtgcgacatgtgcatagcgcactgctacgaacaatccactggattgttcgtccagcgggagcaaggtgtattcgtttagcgaacggtgtagccgtgcttcttgagttccgccttgacatcggcgatggtcaggatgccgtaatggaatacggatgcggccagcaccgcgtcggcacctgcttcgatggcgggcgggaagtcctcgaccttgccggcaccgccggaggcgatgatcggaatcttgacttccttgcgcacggcgcaaatcatctcgaggtcaaagccttccttggtgccgtcggcgtccatcgagttaagcagaatctcgccggcgccaagctgctcggcgcgcttgacccaccagatggcatcaatgccggtggatttgcggccgcccatcgtggtgacctcgaagccggattgcgtgtgttgctcgcccttttcgcggcgggcgtccacggagagcaccagcacctggttgccgaaacggtcggccacgcggctgataagcgacgggtcattgatggccgccgtgttgacaccgaccttgtctgcaccgcagcgcagcagcgagtcgacgtcctcgggcgtgcgtacgccgccgcccacagtcatcggaatgaacacctgttcggcggtgcgggagaccacgtcaatcatcgtgttgcggtgggagctggatgcggtcacatccaggaaggtgatctcgtcggcgccctgacgatagtattcggccgccagctccaccgggtcgcccgcatccttgaggttttcgaaatgcacacccttcaccacgcgaccggcgtcaacgtccaggcacgggatgactcgtaccgccaacgacatgcttcactcccctgttcggctttgcattacagtccttcagactacctaccgcccgttacatgcgccgcacccgtttctggaatatgagaatccgagctgacgcgcccgctgcgcgatctcaagaccgccgcgccctgccgttatatcgccgccgatatcgagaacgcgggcggccattacgtcgacgagcagctgcacgtggacgacgccaacggcttcaagctcatcacgtcccgcaagcccgctgatttggactacttcgtggacgcaatcaaggatgcgctgaagtaactaccgctccttagcggccaactgcccgcaggcaccgtcaatgtcctggccgcgggtgtcacgcagtgtggcggtgatgcccgcgcggtgcaggatctccaggaaccgctgttcgtctcccggcttggaggcggtccacttcgagccctcgatggggttgagcggaatcgggttgacgtgggcccagttgtcgccgtaatggttaagcctcttggccagcaactgcgcatgctcggcctggtcgttgatgccgcgcatcagcgcgtattcgatactgacgcggcgcttggaggccagccaataatcgtgcgcggcatccaacacctgcgtggtgttgaaacgcttgttcatcggcaccagctcgtcacgcagttcgtcgctgggggcatgcagggaaacggccagacgcacgggaatgccttcggcagtgagcttcttgatgccggggaccacgcccaccgtggatacggtgatgttgcgcgcggaaatgccgaagccttcgggaggcatggcggaaatctgtcgtacggcggacagcacggagttgtagttgcccatcggctcgcccatgcccatgaacacgatgttgctcaggcggccctctcccccggccacttcgccgtcacgcatcattttggcggccacacgcacctgttcgattatttcaccggtggacatgttacgggtcaggccaagcttgccggtggcgcagaacgggcagcccatgccgcagccgacctgcgaggaaatgcacagcgtggtgcgggtcgggtatcgcataagcaccgattcgatgagggagccgtcgaacagcttccacaaggtcttgatggtggtgccttcgtccgccacttggcgggtcacctcggtgatgagctgcgggaagaacgcggcggcggcctcgctgcgcttggctgccggaaaatcagtgaattcggcggcattcacatcgaaatggccaaagtaatggttggcgagctgcttgactcggaacttcggcaatccgagttcggccgctttctcgatgcgctgctcgggcgtcatatccacaaagtgcagcggcggcttgccacggcgggcatggtccttggatagcacgtcacggaaggcacctgatgtgccgccgggagtaatgccggtttccggagtgtcaggatgctgtgtggtcatgatgggttcgcttcgctctcaatatcagaaaatagtcaaacatgcaatagaaatatcagaatccaccatacggcgtgccgcatacgaatcagatggcccatgtcttagcccatggcgaacacatattgaacgatgatttcccccatatatgacatgtggcaccgtgcgatatacacacgatgccacattgttcatgcacgaggcatgcgaatcacagtccggtgacccacagcaaggcgcaggtgaacggtgcactcatcaaaatggaatccacacgatccatcacaccgccgtgtcccttgagcagatggcccatgtctttgatgccgatatcgcgcttgagcatggaagcacacaaatcaccgaacgtgcccacggcgccgatgagaatacccgccacgatcggcacccaccaacgagtggcccatttcgaggcatcatacgtgcatgcgaatacggcgaatgcgccagccatggcgaagagcatcgagccgatcaggccctcaacggacttcttcggcgagatacgcgggctgagcttgtgcttgccgagccaggcaccggcaaacaaaccacccgtatcggagagggcgggcaggaacaccagcatgatggcgtgtgcaatcggatgcccattgaaagtcagcgagatgatgatgcagctggccagcaacggaatgtacaacacggtaagcacggacacagccacatggctgagccgggaatgatgctgttccccgccctcatgattgaacgaggattcgaggcgcgcgctggcatccgtgttggacagtttgccggcaaccgccagagataggcggttgccgacgctgatttttgcgctggccgcgatggcgaccagaataatcgacacgatgatactcagcgacatcgtgatgagatggtacggggaataataggtggcgatgagggtgaaggacgcgcacagccacagcatgaacaccgggatgtgcaggcctacggtggcgaagtccaccctgagctcccacagcgccagaatcatgaacacgactaccagcagcacgaagaggtcgacgctgagcagcaggcacgcgacaataaggatgaccagtgccgcgcctgtggcgatggcctgcggcatgttgcggccggtcttcttgttgatccggtcgagcgtctcctcggcctcttcatggagttgttcgttgcgttccataattctccggacctggtctgaatcagacctccatgatctccttctgcttggtctccagcagagtatcgatctcgtcggtaacggacttggtgaccttgtcaagatccttcagcaggcgatcgccttcgtcctcacccatctcgccgtccttgacggccttgtcgatggtttccttggtcttacggcgaatgttgcgcacggcgaccttgccgtcctcggccttgcccttggcgagcttgacgtactccttacgacggtcctcggtgagttccggcatggtcaggcggatgacgttgccatcacggttcgggctgatgccgaggtcggagttgcgcagggccttttcgacggcaccggcctgggaagcgtcaaacggggtgacggacagggtgcgcggttcgggaacgccgatggaggcgacggccttaatcggggtgggggcaccatagtagtccacggtgatgccgttgagcagggccgggtttgcgcgaccggtgcggatgccggagaagttttccttggtgttttccacggtcctggccatctgttccttggcctggtcgataagagacatattcactccttgtgtgttggtgttcgtctgtgttgttcgtctatgaacgtttgattcgattgtaggcgtttgcggcttactcggccacgcgcgattcggcggtggagaccagcgtaccgatttcatcgccgacgagggcgcgggtcacgttgcccggctcttcgaggccgaagacgcggatgcgcttcttgttgtcgcgggccatggacagtgcggaggcgtccatgactgccagattgtccacgagggcgcgattgtagctcaggatttcaaaacgcttggcgttctcgtccctgcgcgggtcggcggtgtagacgccgtcgacgccgttcttacccataagtacctcgtcgcagtggatttcgagggaacgctggatggaaaccgtgtcggtggagaagtacggcatgccggcaccggcgccgaaaatcaccacgcgacccttttcaaggtgacggatggccttgagcggaatatacggctcggcgacctgtcccatggtgatggcggtctgcacgcgggtggcctgaccctcctgctccaggaagtcctgcagggcgaggcagttcatcaccgtgccgagcatacccatgtagtcgccgcgggaacgatcgataccggcctgctgcagttcggcaccgcggaagaagttgccgccgccgaccacgatggccacctgcacaccctgttgtacggccggaacgatttcctcggcaatacgacgaatcacatgggtatcgatgccgaccttgccaccaccgaatgcttcgccggacaacttgagcagaactctgcgcggcttgtcgctatcagtcatatcatgcctttctcaaaaccgaaagtgcgaaattatccgtagacaagcgtatcggtttacgacgacaccccctagcaacgacacccttggaatagcgaaacgccatccgattattgaataaccggatggcgtttcgttgaaattacgctaagcgcgtggagtaagccttaggctcactcctcttcgcccttgccgacctcgacacgggcgaatgcggtggcgttgccaccgacttccttgaacaggtcgccgacggtcttggacgggtccttgacgaacggctgctcgagcagcacgacttccttgaagaaagcgttgagacggccttcgacgatcttcggaacgatcttctccggcttgccctcggccagggacttctcggtggccacgcgacgctcggactcgaccacatcggccggaacgtcctcgcgggtcagccacttggcgcccatggcggagatctgcagagcagcttcgtgagccacggcggcgccggccttgtcggtggcgatcatggcgacgatgctcggcggcatctcggcggacttcttgtgagcgtagacttcgacgtgctcgccggagatcttggcgaactggccgaccttgacgtgctcaccgaacagggcggcggcctcctcgacagccagcttgacggtggtgtcgccagccttggcctcgagcagctcgtcagcggagttggcgtcggcgtccacggcgtagccgagaacttcctcggtgaactcgacgaacttcggggtcttggccacgaagtcggtctcggagttcagctcgacggcgtagccggtctcgccattggcggtctcgacgaccttggaggcgatggtgccttcctgagccttgcggccttcacgcttgccggctgcggcgatacccttggctcggatgatttccttggcgcgggcgacgtcgccttcggcttcggtcagagccttcttgacgtcgagcatgccggcgccggtgtcttcacgaacctgcttgatcagtgcggcggtaattgctgccattgattattctccttgagaaattttgcttacccatgaacgatgggaagcgcttattcaggcacttcccatcgtagagcatcactcggccttgggggcctcggcggtttcgccctcggcggcagccggagcggcggcttcagcggaagcctcggcaggagcctcgttggtcaggagttccttctcccaagcggccatcggctgctcggcggcttcgccctcggccttgttggcgccggagcgctccagcagaccttcggcgacggcgtcagccatcaggctggtcagcagttcgatgccgcggatggcgtcatcgttggccgggatcgggtactcaacggtgtccgggtcggcgttggtgtcgacgatggcgacaaccgggatacccagcttgtgagcttcctcaacagccagggcttccttggtgatgtcgacgacgaacatcgcggacggggtgcggttcatgttgcggataccgcccagctgcctgttgagcttgtccttctcgcgctcgagcaggaggagctccttcttggtcaggccggagccgtgcacgtcggtgaagtccatttcctcaagttccttgaggcggttgacgcgcttggagacggtctggaagttggtcagcatgccgccgagccaacgctcggagacgtagggcatgttcacgcgggtggcctggttggcgatagcttcctgagcctgcttcttggtgccgacgaagagcacggtgccgttgtgggccacggtggtcttgatgaagtcgtacgccttgtcgatcatgtcgagcgacttgaacaggttgatgatgtggatgccgttgcgctgggtgaggatgaactgcttcatcttcgggttccaacgacgggtctggtggccgaagtgcaggccagccttcagcatatcgctcatagtgatctgagccatggtattactacctttcattgtcggttcttgcctggccatgcgcacctgcgtgcagctgctcccccggtttcacgagttgtgcagccgaccgacacaggccgtcgcgagcatgacgcgaatttgttgtgtgccggttgacaatattgggtggttccggacgccagcgactgcgtccgttgccgggtgacacacaagtttcaaggatagcacggagccggtactaagaaaaacaggctcccctctctgaggggagcctgtcaccgtaggcgactgaggggagttacgggcggtaccggcagaaccaccctcagtctcactacgttcggcggctcccgccagcgggagccgggtatggactacttcgcctgacgattgcgcatgtagcgcagggcttcgcggcgttcttccttttccaggcgatccaaatacacgtggccgtcgagatggtcgcattcgtgctgaagcatacggcccatcagcccggagccctcgagcacgacctcgttgccgtccaggtcgatgccacgcacgcgagcgtagtcggcccgacgggtcttgtaccacaagccgggcacggacagacaaccttcatcgccatactgctcgccggacttctcctcgagtacggggttcagaacgtagccgaccttgccgtcgatgttgtaggagaaggccctcaggctcacgccgatctggttggcggacaggcccgctcggcccggatcgtccacggtttccagcaggtcgtcaaccaggcggcgcacggccggggtgatttccttgatctcatcgcagggggtgcgcaggactgggtcgggcacgaccctgatctcacggatggccacttctcgttactcctcgttcttctcgtcagccggccggtccggcttgctgccggtgtcagcggcattgtcggcattgtcggcggaatcgccggtctcgccctcttcgggttcggccttcgacttcttgatcttctccgacacgctagcaatcgaatcagacacgctggttttcatctgttccgaggcctgtttgacctgttcggacgcctgcttgaccgattcggaggatttcttgacggtctccagcgtgctgtcgatgatcttggctgtggcaggcagcggtttgttggatggcttgggcgcatacagatcctcttcgatgacggtggcgtagcgctgcaataccttgggacgcaccactttcatgctcggggtgagcgtgccgtgctcctgactgaattcctcatccagcaccgcgaatttgcgcacggactcagcgcgggagacattggcgttggcctggtcgatgtactgctggataaaggcacgcaccgcgtcgttgtcgctggcctcggcgagtgtcatgtcggcattgaggccctgaccttccagccaggaatgcagcatttcggggtcgagctcgataagtgcggacacgaacggcttgccgtcgccgactactactgcatgagccacgatcgggcaggtgtcgatgacatcctccatcggggcggggctgatgttcttgccgccggcggtgatgatgatgtccttcttgcgtccggtaatgaaggtgaagccgcggtcgtcgatacgacccagatcgccggttttgatccagccgtcggcagtcatcgtctgtgcggtgagttcgggctgcttgtagtagccaaggaacacgttcgggccggtcagctcaatttcatcgtcttcgccaagacgcacgcccatgccaggcccaggcttgccgaccgaaccgacctcgttgtcgtcctcccaattgacgagcatcggagcggcggtttcggtcatgccataaccctggatgaaggtgatgtcatccatgccgttgaagaagtgggccaaatccacgttgagcggcgcaccaccgcaggccagccatttgaggttcggtccgagagcggaacgaatggatttgcccaccgtggccatgtagaacgaatggcgcatgcgctcgatgaacgaatggccgcggccggcctgctcatccttgctccacttgacgaagtgcttgaccgactgggcgaagatatgcccctggatgccggcaccagccttctgcgaggccgcgttatacaccttctcgaacacacgtggcacgcccagcaggtaggtgggcttgaagctgcggatatcggcgagcagtcgcttggcgtcgggaatgtatccgaccacgccgcagccaccgatgcacacgtactggatgtagcgggcgaagcagtgcgccagtggcaggaacagcagcagacggttgtcgtcgtacagcatgccacgcagaatctcgtagccgttaagcacgatgtgcgtgtaattgcggttggagagcatcgcgcccttgggcttgccggtggaaccggaggtgtagaccacggtaagcagatcatcggctttgatacgagcgatagccgcatccaacgtctcatcggatacgccatgcccgaagtcagcgacagcgtcaaggccatcggccttgaaattgaacacgtatttcatgcccggatgattgacacggatctgctcaagcgtctgtgcgcgctggaagtcgccggcaaaggcgatggcgggatcgacttcctcgacgatgcccgcggtctgacgggcggaatcggtctcatagacgggcacaaccacagcgccgattgccgcgcaagcgaaatcagccacaccccactcatagcaggtaggcgagtaaatcagcaccatggtgccggctttgacgccaagtcccaacaggcccttggccacctcgcgtacgcgggacagcatttcagtagctgtggcgccgcgccattggtgggtgttgtcatcctgccattccgcgatgatgtcatccggcgtgcgagctgctcgtttggccagcagcgagtagacggtgtcgtcatcggtggtgacatatctgggttcttctacatgttcacgcatggtcactactataggcgaaccagcctatgacacggcagaaccgtcttccgctgccagcgtaggaatcggtgtgcgggcggggccgtctggtcagcccagatcggcatagatgcacatccatcgagaaccgatgaacttcagtttgaggttgactcgcagattttcctggccgatggtcatgaataccgccatttccagcgtgtccttgccggtgatcatgccgtcgatcaatgtggggacagtgggcagatagcagaatttcgctttgagctccggatgagtgaccatgtgggtgccgagcaggtattgcatggtttgcagccgttccaggcatggttttgtcatggctctgttgagatgtgcgacgctgagtctgccacgtatcgcgtccgccgatgtgcaggcgatgcggcatgcagccatggccatggaatgacattccttcgcattcagcccgcctatgaatgtgggttggatatgataccgcaccgggcgatccgacagctccacaacgatgaatccgtcataactcggcaacggcccgtactgatatgtgccgtggaaaaatcccgaatactccatgatgaccccttcaagcccccttgcaactcaccatcatcggcgagcgtttgtactacaacatcacgaaaggcgcgccaagtcaaacgacttgagcgcgccttagggcaagctaagcctcctgcatggagggcaaacccccattttcaggggggtaaccgggattatcgtgcggaatacgggttgaccaccatgccgcaacgctggaagttcttcacgtcgacgtagccggtggaggccatcgcgcgcttgagggcgccgatgaagttggtcttgccgtccgcctggtggctcggtccgaacagcacctgttcgagcgggccgaccgtgccgaccgtggtgcggtagccacgcggcagcgtctggtggcgggcttcagaaccccagtgggtgcccttgccgggggcctcggtggcgcgggccagcggcgcgccgagcatgaccgcgtcggcgccgagggccagggccttgacgaagctgccggagtcgcccatgccgccgtcggcgatgacctgcacgtagcggccgccggattcgtccatgtagtcgcggcgggcctcggccacgtcggcgatggcggtggccatcggggcctgcacgccgatggtctggcgggtggcggagaccgcgccgccgccgaagccgacgagcacgccggccgcgccggtgcgcatcaggtgcagggcagcggtgtagttggatgcgccgccgacgatgacgggcacgtcaaggtcgtagatgaacttcttgaggttcagcggttcctgaccggaggagacgtgctcggcggagaccacagtgccgcggatcacgaacaggtccacgcccgcgtccaccacggtggagtagaactgctgggtgcgctgcggggagagcgcgccggccacggtgacaccggcggcgcgaatctcgtgcagacgttgcgtgatgagctccggcttgaccggctcggcatagatctgctggatacgctcggtggcctgatcggccggcagcccggcgatttcgtccagcagcggggtcgggtcctcgtaacgggtccacagaccttccaaatcgagcacgccgagcgcgcccatcttacccatggcgatggcggtggccgggctggtcaccgaatccataggggcgccgatcaccggcacatcgaactcataggcgtcgatctgccaagaggtggagacgtcctcggggtcgcgggtgcgacgggaggggacgatcgccacatcgtcgagtgcgtagccgagacggccctttttgcccaaaccgatttcaatttcctgagacatggttgtaagcctattgcccgggtgggacgccaacaaggtcgtttcccacggaccggacgattgcttcaagtcgttacaaacatgcgctatgactaaatcatcttcacaccatctatcaggaggaagcatggccaaaatcaaggtcgaaggcactgtcgtcgaactcgacggcgacgagatgacccgcgtgatctggaaggacatcaaggatcgcctgatcctgccgtacctcgacgtgaacctcgactactacgatctgggcatcgagcaccgcgacgagaccgatgaccaggtgaccatcgacgccgcccacgccatccagaagcaccatgtcggcgtcaagtgcgccaccatcacccccgatgaggcccgagtcaaggaattcggtctcaagaagatgtggaagtcccccaacggcaccattcgcaacatcctgggcggcacgatcttccgcgagcctatcgtgatgagcaacgtgcctcgtctggtgcccggctggaccaagccgatcgtcgtggcccgtcacgcattcggcgaccagtacaaggccaccgatttcaaggttccgggcgccggccagctgaccgtcaccttcactccggacgatggctccgagccgattcagcacgtggtctacaactacggcgaagacggaggcgtggcccaggtgcagtacaacgtcaacgattcgatccgcggtttcgctcgtgcctgcttcaactacggcctgatgcgtcattacccggtgtacctgtccaccaagaacacgattttgaaggcctacgacggccaattcaaggacatcttcgctgaggtgttcgagaccgaatacaaggacaagtacgccgaggccggcctgacttacgagcaccgcctgatcgacgacatggtggccagctccctgaagtggcacggcggttacatctgggcctgcaagaactacgatggcgatgtgcagtccgactccgtggcccagggcttcggttcgctgggcctcatgacctccgtgctcatgaccccggacggccagaccgtcgaggccgaagcggcgcacggcaccgtgacccgtcactaccgccgctggaagaagggcgagaagacctccaccaacccgatcgcctccatcttcgcgtggaccggcggcctcaagcaccgcgccgatctggacggcacgcccgaagtccgtcacttcgccgagacgctggaaaaggtcatcgtcgacaccgttgaaggtggtcagatgaccaaggatctggccatgctcatcggcccggacgaaccgtggctcgacaccgacggcttcatgaacgcgctggacgagaacctggccaaggctctggccgagtaaatcatcgaacacatcgtgcggacctacatgggtcatgtcatgtcgccaactgtcatgattgtcgtgcttcatctggaatgttcctcagcacgacaatcatgacagttgttcgatacacgcgcgaaatacccctaattgttcccggatatgtggcgatttgtccactggtccgggactttttcgtatacggcctactagaatcgtgattcagtttgttttcacgcccgcttgaggaggtttcgccgcttatggtgttcgcacgccgctcaaccaccctgctcgccgccattgtcgcatcctgcgcgatggtgctgtcactgaccgcgtgcacctcagacaataagaccgttgtagatggtcaaaccacggtgacgtccaattctgccggcggcgtggccgtgttcacgccttcggacggcattacgctgaatcagcagacgccactgaacaaatgggcgaagctggtgcccgacctaaccaaggccctggtcgacgccggtttcaagaaaggcgatatcgatcatacgacgtccgactcgttggacaagcaaagccgcgccatccaagactttgtggtcgatcatctttcgaataacaccacggacgattccggcattgccatcgcgcccgacaacatgacattgctcgtggctccagtagtcgaggccgacgcttccactcgccaatacggcgattacgtcagccagaacctgagcaccaacgatgccacggatgagggagctacttctgacggtgattcttccgaagacagctcttccaaagatgactcgtccaacactgagagcgacggcactgcatcggacgagcaggcgcaggccgtggaccggctggtctcatcgctcaagctggccaaggaatccggcatgcatgtggtattgctcggcaacagcatcgaggggtataggccggacgccttcgtcaagttctcggacgcccagaccatcggcaagctacaggcggaaaagatggtgtccaaactcaagttggataaggccagtaaagacaaccccaaatacattgaggtgctgctgccatacaccgccgtggacgaaaaaggcaacgccaacgattccacgttcgcccaagaggcgttccgtggtatctggcaggtactgggctcctactatcagaagggcgttgtggaaagcccttcaggcaccttggacggcaaatccacggaaaacgattggcaagccgtggcctacgatgccgccaaggaaggctccactgcgaaagtgcttgacaagcgtctggcaaaaaccgacgggcagtccacactcacccgtattgatggcatcatcacgatgaacgactatatcgcctccgaggtcgtcaaggaattggacgatctgggatacaccggctctgccgccgatatcaatccgcagatcaccatctcgggcattgtcggcaatatcaccggcaagaaggatctcagccgcgacgcagtgccggacccgatcaaatcccctgaaaacgacaacgcaaacgactcatccagttccgatgacgatgcggataaggacacctccgcttccgacaaggaccgtgactcgcaatggcctctggtgaccggatacggcgcgtacgtctcgaacatcccatccatcgtcaatggcaagcaatggatgaccggcatggaagacagacagaccatcgccacggatatcgctcaggcctgcgccaggctcaacaagaacgaagcgctgaattccatgccttcaatcaggaactccgaggtaggcggcgtgaagaagatcccgaccatcaacgaaccgttgctggctgtcagcgccagcaatctcaagtccgcgctgatcgcccccggatatatctccttggccgatgccggtctgtgattcatactcgtcacgccgctagccgcctgcgatgcctcttccgtacggccctgttccggccgacaaacattgctgaatcatgacggcttcagtacgatttttcgactccccgcatattgctgtgggtcaagatagtcggccgttcctcgcttgaggccccaatgcaggcaacggtcttcgcaatggtccgagttgccctcaacgatgcctacgggctgtctgcgggagatcgtatcccccaccgagagctcggtaacagccggttcgaatgtcgacgtgacacctccacgatgccgtacactcaccgcatctttgccagctactttgccagcaaaactcacggtccctgcctgtggtgacagaatcacggtaccttgctccgcagcaagatccacgccacgatgacctggtgcccacgggttgatcggccgctcgaactgttgctcgacccgtggatcgtcgaccggccagtcgaaccgggattcgcactgattgccattgcgccacgccagatcagacatatcggtgaaatcctccaccgtgtatgccgcatctccggtcaccgcagtatccgcatgcgcaacatgctgaggcgtggatgccagtcccactcccaaggcaagcagcaggccgataacggcggccaacgcgattatggcatccatacgccgttgccgttcctgagcccgctgacgcgcctgctgacgccgcctgctggcacgtcgggcttcgtcgcgacgccaatcaaacaacagtggtgcattcatgagattcctccccatagtgtgagtgtgatgcgattccggcttctttgccggtgatacccaccttgaggggtccgaaacaggatgtccagccagaacgacctatgtggttccagcttccgaagttatccacaatgaaatttcgcgtgacagtatcgccgcatcgtcatcatgttgtatgagtgggtattcgatgagtccgattctgcggaattcggcgcgacatgccctacacgcatgtaatttgctttttcgtggcaagcatgtaagatatgtgacttgtgcgcgagagaaatctcaaacacagcagtattcctgcgtagctcagttggcaga

SEQ ID NO: 301 - DNA, 3433 bp, Unknown
  R101_18m  MAG No. k141_88046
cagatgctggtgggcatgaccgtgttcaccggccagtactgggccgaccggcccaaggtgagcaaggagcagctggccgcgtacatcgtggacctggcatggcatggcctgagccggctcgattccaagccgcagctgttgtttgaaggcgtcaaggcccggaaggaggccgagcgccgggccaagcgcgggatcgatgccgaaacaccggccccggacggcaaggcatcatcgcccttagagcagacggacctcgaccacacgctcagggaagattcagggttgcagaatgtgagttcaggggcacaggttgcgcaacactctgccgagtcgggagacgaagtgctacggtttgaacaggaaactgaacagaacgactaaatatgtgaggacgtaagactttcatggccagcacggcaaagacgctcacctttgtgatccccgcatacaatatggagtcctatctcgaccgttgcgtgaactcgctgctttcggcaagcgacaccagcgacctcgaggtactgattgtggacgacggttcgaaagacggcacgctggagtacgcgcgcaaactggaacgcaccaatccaggtgtcgtgcgcgcgattcaccaggagaacaaaggccacggcggcgcggtgaacaccggtatcacggcggcgaccggcatgtatgtcaaggtggtggatgcggatgattgggtcgacccgcaggccatcgacacggttctggccacgttgcgcgcgcaacgtgaggccagcgagccgatcgacatgctggtgaccaactatgtgtatgacaaagtgaccaagcgccacaagatcgtggtgaacttccgtcatgtgatggaggccggccgcgtgctcggctgggatgacctgggcaagttcggtctggcgcagtacatcatcatgcatgcgctcaccttccgcacgcaggtggtgcgcgattccgggctgaagctgccggagcatacgttctacgtcgatttctattactcgtaccagccgttcccgtgggtgaagcgcatccaatatctcgacgtgccgttctaccactacttcatcgggcgcgagggtcagagcgtgcagaccgacgtgatgattaagcgtgtggatcagctgcggctcgtcaatcggctgatgaccgaggccacgcccgaacgtggtacggtgccggaggggctgtaccggtacatgattcacttcctgacgatcgaatcatgcgttacctcggcgttcctgattctctcgcgcgatccggccaactacgttaagaaaaccgagctgtgggatgcgattgacgcctattctccggccatcggcaaggatgtgcgctcgaagctgatgtcccgcgcgctcaatctgcctggtaaaaccggccgctggatcgtgcgcaacggctatctcatcgccgaacgcatcgtcggcttcaactgattcggattacggctttgccctgctgacgcgttatcagcagggcatccctattacctccccagccgaggttttgctactcggcccaacggtcggacattgcgaagctgttgtgcatcaggttgctggaggtgtatagcacgtcgttcagcagcttggttgtatgctcgcgcaggtagtcggccatctcgtcgttggccgcttcgagcacatccgccacgccctgcacatccttctcatcgccgtggccgccatcgagcggccatgcattcgtacccgtcgattcggcatcgcttcgagcaagcaactgctcatccgtgcgctcgatgagccggtgcccgaacgcgcgcacgccttccgcatagccctcgatgaaccggttcgtctcataccaatgcgcgtcggccacgacggcgatcaggcggttcgtccaatacaggttgccggtggagacttcgggcgtggtgtcgcgcaggtaggcaggcgtgtcgttgacgttcgcgtagaacggcgcggcggcggtgaacggaccggagccgaacgatacccacatcaccgtgcgattggccgccggcacatacgggcggacctgaatcgccaccatatggccggtgcggttcacgccgatcggacggtaacggtggcgcgattccgccgtgccggtcgtgccgtacgggtcgtacggcgtgccttcgaagtgcgaggacagcaggaaatcaacgtcttcgaggctcaccttgtcttccggcacgcggcaccacgggatgtcgtcggattcgggcgtgtagcgggcggccggcgaatcccagtcctcgctggggttgaggcggcgttgcatgtaccaggcacgcggcgtgttgtagatatggtccttcggcgtcgcggtgccgaaggccttgcgcgggttgaagcgggtgggaagggcaacggttattccgaatccggcgctatgcacgtgacggccgttggaagagaccgacgttcccattgtgcggtcaaggtgatgcgtggccatgaactcgcgcaggtcggcgctgcataggtattcgcgctgctcgccgaacgcatcggcgaggtcgaagtcgtcgatgccgagctggttggggatcgtggcatagcagtcgtcgggcactcggcgggcgatccaatgatggccgccgatggtctcgacgtaccagatctcgtccgcatccgaaataatcacgccgttcgattcgtaggtgccgtaggtttcgagcagttcgcccaaccgcgcgacgccctcgcgcgcggtggtgacgtacggcagcacaagggtgatgatgtcttcctcaccgataccgccgggctgctcggcctgataatcggtgctgtccggcccgccgacagccggccgcaactcgaccatcgggtccgcaccgagcacgcgctcgttgacagcgatggtttcggtggcgctcatcgccacgttgtgttcgttggcaccggcttcggccagaatgccacgattattcagcacgttcggtgcgatggtgtaccggcaaggattgtccggtagttcgatttcgacatggctcagcacgctgcggtagtggcgcggctggtcgtcgggggcgacggcgacgaagcgcttgggatcgtaacggcccgagcccgaatcgtcatcgcgggcgatgatggtggaaccgtcgtaactggcatttttgccgacaagaatcgtggtgcatgacatggggcaccactctaggagccaggctggtcgaaacaaaaaatccttggaaccattgcgattccaaggatttgttgtgccccctgtgggattcgaacccacaacccacgacttaaaaggacgctgctctaaccgttgagctaaaggggcaactcttctaaaatacacaccgttttgggatatttcaactacggcgttgcgtacacgtttgcgtacgcgattggcccaacgcacggcacagcacacgcaatgtggcccaaatcgcagcccaaatcgcatatcgcctcta

SEQ ID NO: 302 - DNA, 13240 bp, Unknown
  R101_18m  MAG No. k141_88334
cacgaccaagcccaaggtcttgccattgtgccgaaccggcgcgtacacgttgcagacggtcgccttgcccacggttctcaataccgtggagcggaacaccacgctggagagcatggcggcgtccaattcgccgaccatgtcatccggcatgacgtttcccaccacgtcttccgcccgtagcgtcatcacggtggatgggcggcattgttcggccaccacgtatttgccgtcaccgttctgtaccagcagcagcaggtcggcaaagctcagatcggcgatcacctgccaatcggcaacgagatgatgcagccactcgcggtcctcgtcgtcgaagtcggggcgcgttgcaaggatgtgtgaaaaatcagccatgcccctatcatacgcagacacgtcgccgccattgcggcaagccacacgggcaagtatgacgactattacgacatcgcatcttcaataccgcaccaatcgcgttgcacggctgcccgccgttcaggcggtcatcgcctcatacacctgagaggacaatgcggcgatctgctgctgcgcggttcccgagaccactcccgaggtcataaccaccatcacataatcccgttctgttccgtccgcggccttgccccacaccacggcggcatcattttccacgccggccagttcaccggttttattggccacctgaatgccagacggtactccggcgggtatcttggcgcgtcgcgtctgcccgagcaatacgtcaagcatggagcggctggcttcggcggaaaccagtttgcctcggtacaatgcagcgaggaatctgccgcaatcggaagccgacgtccagttctcggtgccggtcccgtctgtgccggcatcggacaacacccgcaactgcttggatgagctgaagccgtatcgggcggccgtaccagtcacccgttgcatgcctgtggccatgtcaccatcgccgaccatcaataccagctgattggtggcagcgttcgagctgacggtgatcatctggttgatcagcgaggtggtatcttgcccgcccgcggccaaggtgccggcatgttgcttatcgtacacggcaagcatcacgtacagtttgatatccgaagccgccaccatgggctggccgccgacgctcacggttttgcccgtggccagatcctcgacatacaccgaccaggtgcctccattgccggccacagctgccgtgaccgccgaggacgcatctgacatccgcttctcttccgccaccgtggtcaggtcgggagcaggtgccgccttgcgctccaaggtgtcatgcacagggcgttgttcgtgtttcgatgacgccgttgacgacgatgccgacgctgttgccggtgagtccgatgccgaggcgacgggcgatgttttggcgtgcgatgcgccgagaccgttatgcgcgtacatccatccaccgacgccgattaccaaagcggcgatcagggcggcgatcaggatcaatcccacgacgctgtctgttgcacgcgtgtcgctactatgcttggtatgccgagccaccgtcactgccccaatgtcttgtcaacactggccagcacccggctcatcaggtccgcggccaccgactgcccctgatattgggtgacaacggccacggcggccttatgaccattggcttcgacgatggcgaagtaattccaggtgtcctggatgccttggcctcggtgggcatgcacgatcatgtcggacggaatggttacgccttcggaagcaatgtccacgttcatcaatgacgcacctcccttggcgtccactgcggcgagcatgcgggccgcatcgcgggaggaaccgtaattctcataaccggcattgctggccgccacatcgccgaaatcgcggttgaacgaggtgcccttatacccatgcgaagatgcccacgaattgacgccgctccaaccacctaccgccgcggccgccatattgccggcattgttgtccatggaacccatcatcgcgtttgcctgcgctttggcgttgtcatcgccattgtcctgggccgcaagatagaccggcagatagagaccggcagccacgaattgcttgccggactgcgacgtggtcgcgatggtggcatcctctgaggaatcggcgtatgttccatcgatgaccatggcggagacggccacatcggaggacgagtatgaatccgcgatgtcagacaactggctggatgtgatcaccggagtggaaggcttcgacttctccgtcgagcttttcttggacgaatcgtcgctgttcttgtctttggcgctatcagacgtgttcttcttggccttggacttggcgtcagaggaatccgtcgtgccatcatcggcggaatccgacgcatcggacccggtcgactgtaccgatgtttgcacctgcggctgagctccccacaatcccatgctatgggtgacgaacaagccgatgaccaacgccacgacgcaaatcagcgcgatgagcacaatcaccaccgctttggtgtgatcgccgccaggacgcccggcgggaggttcaggagaagcaggtgccgcagggccagcggtcatgggtcccggtgccataggccccggcaccgcggaacccggcgccgttggcggcgcgacggcgggcaacggcgccgccggctgcttcaccagcgtcagcgcgttatcgtcataggcaggggccgccggattggcctcgggctgctccaatgggcttccgcactgcgaacagaaggcatttccttgctcgttggcaaacccacactccgtgcaatacaccatcaccgaacccctttttgctgtgacgttctcatcttcggattccatagtatcgccaccattgggtgatagtgttcgtgtgagtcggtattgacaagcataaaagttacgctaacgtaggttacggcagcgtaagaagcgtatcgtcaactcgtgaaacgggggcatcaccatggcatcaacaaccgacgacgcggaaaagacgatgcatcacgacgctcataacagcgcgacgattgcagaggatgccaccatcgcatccaagcgtcaggcggctatcgaggcgcgcgaacaggcgttgcaggccaaggctgatgccgtacgggccaaggcccagttcaaggccgaggccattcgagccaaagccgaggagaaggcccggcacaagctcgccaaagcggagcaccgtgcgctgaaaatcgagggcattgcccctgcggaagtggaacgcaagattcgtctcgacgtgcacggacgaccaaagccgttgatgcgcggctggattcacgcgattgccgctcccctgtcattggcggcaggcatcgtgcttatatgcctggcacatggcgcgagtctgaagtgggcgtgtgccgtgttcatgacagcgtcgctgattctgttcaccaattcggcctgctaccatctgggcgattggagcccgcgcgtcaccgatgtgctgcggcgtatcgatcatgtcaacatcttcctgctcattgccggcacgtataccccggtctcgtttgcgctggaaccgttctggcgcaatgtgatcatcatatcgatgtgggcgtgcacggccatcgccatcgtgattcatgtgatctggatcaatgcaccacgctggctgtatacggtggtgtacatcatcttcggcatctacggcctggcttatatggtgatgttctggaattcgccgtatgcggggccagccgtggtggcgctgctgtgcgccggcggtgcctgctacatcctcggcgccatcgtctacgccttgcgcaagcccgacccttggcctcgcgtcttcggcttccatgagattttccactgcggaacggtggccggatatgcctgccatatggtggccatctacatggtgatcgtctcgctgtggcaataaacgctacgacatataagtatgcccccgcctacgggggcatactagtcacttataactcaggccagcggcttggcggccttgaccgtcacggacagctcgcggccgttcggtgcggtgtaggaaacgacgtcgcccaccttggcaccctcgatggccttgccgatcggggaatccggggtcatgatctcgtagtcggtgccggccacgatgtcacggctgccgagcacgtaggtcatctcgttgccgttgagctcgatggtcaccacagagccctcgcccacggtgccttccggggcattctcgatgatcttggaatcgcgcagcttgacggtgagctcggtgatgcggccctcgttcttgctctgcgcctcacgggcggcctggtagccgccgttctcggacaagtcgccctcggcacgcgccacggcgatcttgtgcgcgatttcctcacgcagctcgccttcacgatgggcgagctcttccttcatcttgttgtatgcttcctgcgtcagcaggtagaccttgtcctcagccatatcgtcctcctgaaccgttgtcgatgctgaaacaattttcgttatttatgacaaaacgccggctatgaccccggcgttcgtcatgtgctgacctatggtcagcgggtggaaatgatgtcgatgacgaacaccagcgtgtcctcgccgccgatgccggcctgcgggatgccgcgggaaccgtagccgtattccggcggaatggaaaccaccagacgcgagcccacgttatggcccggcacggtctggtcccagcccttgatgacctgtcccacgccgatgccgaagctggcgggctgatgacggtcgaagctggagtcgaatggggtgtccttaccccacaccacgccgtggtagttcacggtgacggtgtcgccgcgacgcacgatcgggccgtcgccctcggtcagctccacaaccttgaggcccttcggggcttcgggcgccgggaactcgataacgggcgtggtgccgaattcggcgttcacctgaggcatctgatctgccattagtcctccttcaaagacacaatgcgccctaccttagcaccatcggcgaatcggcggtagtccttcatccctgtgcgatacgacacgctggccgtatacgtcaattccggtcatcatgctggtgaataccagacatgtcaatcagcattcgacgacattgacggcaagcccgcccttggaggtctccttgtatttggccatcatgtcttcaccggtctgcttcatggtttcgatggcctgatcgagggtcacgatgtgtgagccgtcgccgagcatggccatacgcacggcgttgatggcggtgttggcggccatggcgttgcgttcgatgcatggaatctgcaccagtccgcccaccggatcgcaagtcaggcccaagttgtgttcgatgccgatctcagcagcattctccacctgttccggcgtgccgcccatgactgcggcaagtccggccgccgccatcgaacaggccgagccgacttcgccctggcaaccgacttccgcaccggaaattgaggcgttgcgtttgaacaggtatccgatggcaccggcggtcagcagaaacgtgaccacgccctgttcattggcgttgtccacgaaatgccagtaatagtgaagcacggcgggaatgatgccggcggaaccgttggtcggagcggttacgatgcgcccgcctccggcattctcctcagagacggccaaggcgaagagatccacccatgcggcgtcggaagactcgagcacggcgtctttgcgccggctgtcgcggcgcagcacatcggaattcgaagcgagacgccgatacatcttcggcgcgcggcggggtacgtcaaggccaccgggcaatgtgggctccgccgaggtgcatccgtggtccacgcaggcgcgcataacacgccagatggcatcaatatcggatcggacctggatgcctgagcgtgaagcggtttcgttggcccatacaagttcggcgatgctgagatgatgttcccggcacaacgacaccagttcggcgcatgatgagaacgggtagggtgcctcgacgccgaaatcagtggatgatgattcgtccgcgtcggcaaaggaggtgccttccggaggacgttcatgaatgccgatcatcgggtcttcgggagcgcctttgcgcacgaatccgccgccgatggaataccagacctgttcgtcgaccaagcttgcggcggcgtcgaaagcctggaatcgcacgccattggggtgcgcggccatgcgcttccattgttcgaacaccacgtcgcggtcgtagtcgaaatggatgcgtttgaggccggcgaggttcagagtatcgtccaacgcgcaggtctcgcggatgcgcatcatgtggtcggtatccacggtggccggcagattgccttcgagcccggccatcgcagcacgatcggtgccgtggccgagaccggtcagcgccagagaaccgtaaagcgtgattttgacacgtgcggtgcgatcgaccaaatggtcggccagcaacgaggaggcaaaggcatgtgccgcgaccatcgggcctacggtgtgcgaggatgaaggtccgacgccgatggtgaacatgtcaagcacactgaacatttggctccttctcccctgctggttcggcatgccggtgtcaccaggcgtcatgccatcacgatatcgtattccagcctagcgcccggaatctttcgctttgcgcgatgatggccgcgcgcgtcgtgccggcgagcgataagtcagtcagtgagatagtgcggagaacatcataaccagtacgatgataccgatgatggccaatacgatctgcaccaccatcagcccgatggtcagtcccttcttggtggcgattttgggcgcgtacgcctgtgccaacaggaaggcgatgaagccgaacaccgcgtagttgacggtcagggccatcacatcgctgttcgacaacaccacgccgttcagcggctggttcagcgtgttcatcatcgtgctcatcacgaacatgccccacacgccgtagccgattaatccgacgacgccgtacagccatggcttgagtttgtcgttggcacgcagggtcagggcttcggcacaccacaacagggcgaagccgacgatgtaggtgaacgccacggcgatcagtatcacgatagtcgcccacggcaggagtgcggccacattgccgatcatggacagatagaatcccgagcaggcgatggcaccaacggtgagtgcagtgcccgcaatgacggcttgggcaagcatggtgggcagggcgccttgttcgactcgttcgacatcggtccagcgtgaagccatgtggattcctcgtttcatcaggtacatcgtcacaacgccacatagcctaacggccttttgtttcggccttataagctctccacatagtaagctgcgagcccctctgacgaggggagctgtcggcgaagccgactgggggagagaccgcggcacagccgcaaaaaacggcatcggccacaggccgatttcaaagtgcctccggtgggactcgaacccacaagccgaagcgatcgattttaagtcgactgcgtataccatttcgccacggaggccaacttttctattataagctatctcctgccctgagcattgcttgcgggttgctgcgcttcgtgcagccgtcgcggcatagccgctcccttcgcctacaaacagcccagtgggctgtttgtagcagccggtagcgatagcgtcgccggcgtcgcatataacgcaaacagcccaccgggctgtttgcttaacggctcagcccgctggaggcacttaccacttacgctattgagccagcaaccggcgaccataatcgagcacaatgccgtccagcagcccgtgttcgctggcgacgaacgaatcgatggcttcaccatgatcggccttggcggcttcgctgacacgcgccagcacacggctccagaccacagcgccgccgccgaccacatcgatacggccggggtggatggtcttgtattcgcggcgctcggcgcgcgtcatcctaaggaacttgtcgtccacggcataggcgtcttcaaggctcaaccgatgcccgtcgaccacggtgtgatcgtattctttcaatcccatagccaaggcggtcatcgtggtcaccgtgccggacacaccgatgatggtacgggccttgcctgcgtccacggtgcggaaggcctcatcgatatgctcgtcgatgtccgcaacggcctcatcgatctgcgcctgggtcggcggatcgttggtcagatgacgttcggtcatgcgcacggaaccgatgttcatggagaatgcgccctgaacctgggtggtgggcgcactgacgccgtcgccaccgatgaccagctcggtggacccgccgccgaggtcaaccaccagatagggggcgggcagatcgtcgcgattgaccacggaagtggcgccgaggaagctcaggtcggcttcttcagtgccgggaatgacttcggggcgcacgccgaggatacgttcgatctcatcctcgaactcctcgcggttttccgcgtcacgagtggcggaggtggcaacgaaacgcaggccgtcgatgggatgctcggcaatcacaccggcgaattcccgagcagccgcataggcgcgttccaacgcttcgtcggcaaaacgatgggtcttgtccacatcctgaccaaggcggatcacacgcaggatgcgcggcaccacctcatgcatgccatcggcatcgacacgtgcgatcttcagtcgaatggagttcgtgccgcaatcaatgccggcgacggttacggattccttgctcattgccttctcctcgtatcccttagtgcgtatgaatgggctgttcgcggtggctcatctgttgatcaatcatccagcgtgcagcggcagacggtcggatcgaattcgtctttgacgcgttccagcaccaaatcgccaatggggttgacgcccggccccataaccaaggactgggccagcagggcatgcaggcacttgacgcgcaccggcatgccgccggccgaagtgccttcaatatgctcctcgctgtcgccaagacggcctgccagttcgtgacggaatgccagatacagattatgggcctgctcatatgcggccttgagctcctcatcagcggccagcatatcgttgtattgctgcatcacgccggcggcctcgacgtgggaggcggccttgacggcttccggaccggtcagatagcacgtggtggggaaagggattccgccgggcaacaccggacgggtgattacggcaagtggcctaccgcagacgcatcgcgcccccacggcgaccatgccgcgcgggtatcggccgagctgacgctgcaccaggtcgatgtcatggtcgttggcgggctcggcaagcatggtgtcgacaagggccttggccttggcggcgatatcgatggtcactgttgggttccctcccctgtgttttgctgggtgttctgatcggattgagtgttctggtctgacttatcggactgcttggatgagtcgttggatgacgagtcagaggaaccggaagtatcggatttgccggactcgctatcggtcacaggctcatcggcctttttgagcgagtaagacagttcgctgtaccatggcaggacttttttgttgctggtattggaatcttccgttttctgggattcgcgatcggagccggtcacggcttcgggatgcagcacacgcacggcctgttcgccggggaatacgaagccgaggcgttcacgggcctgggcggtgatgtaggccttgtcatcccaacgcttgatatcgttctccaactcctgcttttgggcgatcagcgaggcttcctcacgcttgaggccattgagctcggccaggttcagggcataagtgtggaaggtggagaccagctggatggcgccgagtgcgatgatgaacagggagacgaagaacgctatgggccccgccgacccttttttcctgacttgtgctttgccggttttgccaggtttgccggtacgggacgacttgctcatgtcacatgaaaatacccgccgcattcgacttgacgaacacgacgggtatcgagcttcagtggaaactcacgcctttacgggcgtttcagctcacttggccaagtacttcttgcaggccttgaaggcgctgtagccggcgtactgagcggtggagccgagctcctcctcgatctcgagcaggcggttgtacttggcaacgcgctcgccacgggccggggcaccggtcttgatctggcgggtgttcttagcaacagccaggtcggagatggtggtgtccggggtctcgccggagcggtgggaaaccatggaggtgtagccgttggcggtggccagctcgatggcgtcgagggtctcggtgacggaaccgatctggttcagcttgaccagcagggagttggcggcgccgaggtcgatggccttctgcagacgagccgggttggtgaccagcaggtcgtcgccgacgaactgcagacgatcgccgaggcgagcggtgatggcagcccagtcttcccagccttcctcattgaacgggtcctcgatggagacgatcgggtactcgttgatgaggttctcgtagtagtcgagcatgtaggcggagtcgcgctcttcaccgtcgaagcggtacttgccggtctccttgttgtagaactcggaggaggcgacatccaggcagatgccgatctgcttgccaggctcgtagccggcggcggagatggcgtccatgatgtacttgagggagtcctcgttggacttcatcttcggggcgaagccaccctcgtcgccgaggccggtgttcaggccttccttcttcagaacgttcttcagggtgtggtaaacctcaacgccagcgcgcagagcctcggagtaggtgtcgaagccgtacggggagatcatgtactcctgaatgtcggtggcgaagtcagcgtgagcgccaccgttcatgatgttcatgttcgggaccggcaggatgtggccgttggtgccgccgatgtagcggtacagcggcaggccggcggactcggcggaagcgtacagagcagccagggagacacccaggatggcgttggcgcccagcttgcccttgttcggggtgccgtcgagctcgatcatcaggtcgtccagagcgcgctggtcagcagcgtccatgccgatgaccttcggagcgatgacctcgttcacggccttgaccgcgttaagaacgcccttgccgccgtagacggacttgtcgccatcgcgacgctcccaagcctcagcttcaccggtggaggcgccggacggaaccagacccttgccctgagcgccgtcttcggtctccaggtagacctcaacggtcgggttgccacgggaatccagaatctgacgcgcgtacacgctttcaattactgccacaactactccttaaaacggttgtgtatcttgaatgacattcttaagagtagtgcgatttgtggacgttgtgaacaacacgcccaaaatttagtgttagcgctcacaatgccgatgcgccgcctgattgcaaggcagtacggaagaaatcgctcagtcgacgtccttgccattgaggtagtcgatttcactgtcggacaatttcagttcgctggctttgaacgagtcctgaatctcctgcgggtttctggccgagggaatcgtgaacagatattggtattgcgcaagttcccacgcgagcgtgacgcgctggtaggagcagtcgtgggacttcgcgacttcgcggaaccggtcgaacagatgctcgttgaacgggtcaaggaatccaccgagcggcgaccagcagacgaaagccaaaccgagtttttcgcaggtctccaacgtgtgttcggggtcgcggtgaaccggggagaactggttctggacggccacgagacgatcgcccaaaatgttgtgggcggcttcgatgtccgcgttgtcgattctggagataccgaccgctttggccacaccttcgtccacgagctgcttgagtgcgcccatctggtcttcgtacggcacctgcggatcattgcagtgcgagtagagcagatcgagcgtatcgacaccgaggcggcgggctgattccttggcattggcgatcatggtttcgggtcgggcgtcggcctgccagccgtagttgccgttgccgtcaagcgtgcgcagccagccggttttggtggctacgagcacctgatctttggggccatgccacgagtgcagagcatcgcggaccagatattcgccatagcccatatcctccggttcgccggtgccgggtgcgctgggcagataataggaccaagccgtgtccaaataacggactccggcatcgagcgcggcatggatggtctcgatcgcctgatcacggttggaggggcgcccctcgatggcgagcgccattgtgcccatgccgaggcggggaatctcatagccggcaagtgttgccgcgtgttggtttttcatcgttgtggcctccatgccaagtcatcgaggagttggttagtccagaggactacctggtcggagctcatggggccttggcccagggaaccggtgaacggggtgggtacgatgagctggtgggtgaccgggcggtattgggcgcctttgtaaatacggcccatacgcatctggatggattcgggcgggtcgatacggccgatgcgcacgcggttggattgcgcgagaatctccgaaatgccgagcttgcgggccttgaacttcagacgggccacgtcgaacagggtctcgaattcgaccggcggcttgccgtaacggtcggtaagctcctcttccagatccttcaaatcggcctcgttgcgagcggaggcgagcttgcggtacgcttccagacgcagcttgtccgaatcgatgtactcgatcggaatcgacgcttcgatgggcaggtcgatggacacggccaccggctcgacgttctcttcgggctccttgtacttctccacggcttcggacaccatgcgtacgtacaggtcgaagcccacgccctcgatatggccggactgctcgtcgcccagaaggttaccggtgccgcgcaattccaagtccttcatggccacatcgaaaccggagccgagcgccgtgttctgcgcgatggtggcgagccggtcatgggactgctcggtcatcggcttggacgggtcgtacaggaagtaagcgtacgcgcgctcgcggccgcgaccgacgcggccacgcagctgatggagctggctcaagccgaaacggtcggcatggtcgacgatcagcgtgttcgc

SEQ ID NO: 303 - DNA, 14232 bp, Unknown
  R101_18m  MAG No. k141_88405
atccgtcacgtcaccgcgaacgaatggtcgacccgccgctatctcgacatgtcccggctcggtgacaacctcgtggaagcgaactgactatcgcgccatggacggccacgatccaaagtgcgcaacttttcgggcactaccccgagcttgcgcaatgcaggcgcaatacagtgcaaacagtacaaagcaacaataatggccggtctgagccagctgctccatgcgagggcagctggctcagaccggccattgtgtctgcaagtacatgcaattagagcatgaacatgtggaagccgttgagcgttactggttgttttgctttgttgttgcgctcagcagtgcgacggacgtccgtccgcagtgtagtgcagcgctccgtgaaccagcgccgatgtgaaatgcatgttgcacatgcccgcttcttctgcttcgtgcgtgcagccggcgatgctgcataggttcataccccgaatcatggtcataccccctctttgggatggcatccgtgccgccatctgccttcagagcatagcggacaattgttgcattgcctaggcggtacaacgctttctgtggcctgtatcacatccttgccggcgttctgcggcgtggttgggcgtgtacatgtgctcttgtgtggttttgttgtgtgtgatttgggtatacggatagagtttcttctctgcagtggcaagggcctctcggccggcgagccggctgatttctcccatgcgttgctcaatgatttccgttttgcgagtctgaacggcaaaatagctctggagaagtgccacttcttctttctttggatcaccgttttgagcaatgagatagcaggcgtatcgggtgagcttgacgtccgcgatggagcgggtggcaccgctgccgagagtcacgtctcgcgtagtgtcacggaaatgggattcaacggatacgccggaattgtcgcaagcttgcttggctcgtgtaatagctttgctgaagttttcccatctgtcgtaccccatataggtcattagctcgcgtgcataccaatactcaactttggagtcctcggtggtgtgtgcgatagtgctgagttcgctggttttgcgtgtgatttcgtcgcggttcatgggtgtgtccttatgtttttcatgaccattttcgtgactccacgaaaatggtcaaagccaataattgcaatggttttgaggtatgggcgcgctccgcccaactggtctgtcttcgtccgccttttcgaccagatacctcatggagcacaatgccaacgtcgctaccgttggcccagcaaatattcttagacgacgccccgaagtgaatatctatgcggctttcagaatatcaaagagcgtggagtgtgtgcattatgcgttccaaaaatagtttctagtaatgaattgtttacggtgtgagatattcttgggggtgtttgcggcgctctgccgtgtggcgaatgggaatggatggtgctcttatgggatttgagcaggaagcagttagtgaactgtatgccagcgtgtggggcaatcgttcgacgatgcagagggaattcactcgtggagcccatggtgagcagttcgtgctccgggagctgtccatgaaggggacgcaaacgccgtcgcaattggcatcggcgctgcaggccagttccggccgcatctccactgtgctgtcgtctctggagaaaaaaggctgggtcacgcgtgacattgattccaaggatcggcgcattattcgcgtgaatctcactgattccgggcgcgagcagtctcatcggatgatagaggaaatgcgttccgcaatttgctggattttctcgcaaatgggggagcggcgcacgcgcgaattcgttgacctggtgtctgagttcaccacatatatgtcgatttgccatccggggcggcctcggccgacggctgaacaagtgcgtgaggcattcgtggagcgggacaagcgcgtggctgaacacatggcagctaagcgcgcggaggctgagcgagactagcttcctcccgctggcgggtctctccctccgtcactgctgcgcggtgacgcctccctcgtcagagggaggtaaaggtgattgaggacgctcacagcgaacatacagaagtgcgtataatatctcacagtgtaagtaatcaaacaatggaaactattaagacatcgtgaaccgataatcaccgataacccagccaacttaagaaccaatcgccaataaccaataaccaacccaaccaacacaaggggaaaccaatgtttcgcatcatgaaatacctctccaaagcggagatcggtcagatgctcatcgccctggtgaccatcgtcgggcaggtctacttcgacctgaaactgcccgactatatgtcagacatcaccacgctggtcgagacgccgggcagcgacatgaaggacatctggatcgcgggcggcaagatgctgctcatctcgctcggatccgtggcgtgtgccatcatcaccggctacatcgctgcgcgcgtggccgcctcgttcacccagcgtctgcgctcgctcgaattccgcaaggtcgagtccttcggcccggccgagatgagcaagttctccaccgccagcctcatcacccgttccaccaacgacgtcacgcaggtgcagatgttcatcaccatgggcctgcagctcatcgtcaagtcgccgatcatggccgtatgggccgtgtgcaagatcgccggcgaaggcttcgaatggacgctcgccaccggcatcgccgtggcggtcctgctggtgtccatcaccgtcatgatggccatggtcatgccgaagttcaaggtcatgcagaccctgaccgacaacatcaacctcgtggcccgcgagaacctcaccggcctgcgcgtggtgcgcgcctacaatgccgaggactaccaggaagccaaattcaccaaggccaacaaggacctcaccgagacccagctgttcaccaaccgcgtcatggcgttcatgatgccgttgatgaacaccgtcctgaacggcctgatgctcgccgtctactggatcggcgcttacctcatcgacgccgccgggctcaaggacaagctcaccgtgttctccaacatggtcgtgttctccaactactccgtgcaggtcatcatgagcttcctgctcatgagcatggtgttcgtgctctggccgcgcgccgacgtgtccgcgcagcgcatcatggaggtgctcgacactgagccaatcgtcgagaacggcaccaaaaccgccgccgacgtggccaaaaccggccagaggggcaccgtggaattccgcaacgtcagcttcacctacccggattcgcgcgaggcgatgctggaaggcatcaacttcaccgccgagcagggccagacggtggcgttcatcggctccaccggctccggcaagtcgtcccttatcaatctcgtgccgcgcttctatgacaccagccaaggccaggtgttggtcgacggcgtggacgtgcgcgactacgacctgaaggccctgcgcgacaagatcggctacgtgccgcagcagtccgtgctgttcaagggcaccgtggcctccaacgtgagctacggcgatcagccgggcgacccggcggaggtcgagatggccgatacctccaccccggccgggcgcaagcgcgaggccgcgttgatcgccgctggcgaggccgcggaaggtgccgatataccggccgagcagctgaatcgcgtcaaggccgccgccgacgtggcgcaggccagcgagttcgtggcgcgcatggacggcgggtattccgccgcgatcgcccaaggcggatcgaacgtgtccggcggccagaagcagcgcctgtcgattgcgcgcgcggtgtaccgtcacccggaaatcctgattttcgacgactcgttctccgcgctcgacttcaagaccgaccgcgaagtgcgcgacgcgctcgcccgcgaggccaaggattccaccaagctcatcgtggcccagcgcatcggcaccatcatgaacgccgaccgcatcgtcgtgctcgacgacggcaaggtcgtgggtcagggcacgcacaaggaactgctcgacaactgcgacgtataccgccagatcgccgaatcccagctcagccagtcggagcttacggcgtagggggggcggcagcggtagctccccatgtcaggggctgagccgtaaagggaacagcccagtgggctgttcccaggcgaagacgagctgataagcgagcgaataaaacagcacagctgactgaggggtagtcgcgtacggcttctctccctccggcgcttcgcgccacctccctcatcagagggaggtcaatacggacttttaaggagtaaaacaaatgccaagaggaccaatgggcggcaggcgtgccgtcgaaaagccccatgatttcggcaaagtcatgggcaaactcgtgaactactgccgcaactatcttcccgtcatcatcatcgcgctcatcctgggcgcggccggcaccgtctgccagatcgtcggcccggacaagctcaaggacatgaccaacgagatcgtcaaaggtctgcccgccatcgtcaacggcagaccggtgatgaactcggtagatttcggcacggtgggccacatcgcctggactttggtggccctgtacgtgggctacgccgtgctcggctacgtgcaaagctggatgatggccaacgtcacccagcgcaccgcccagcgactgcgcgagtccatctcggtcaaaatcaacaaactgccgctcaaatacttcgacaaggttagctacggcgacgtgctgtcgcgcatcaccaacgatgtggacgccatcggccagacgctgggccagtcgctcggctcgctgattacctcggtgacgctgttcgtgggcgcgctggtgatgatgttctacaacaacgtgatcatgaccctgtgcgccatcggtgccagcctcatcggcctgatcatcatgatggccatcatgaagtcctcccagaagtacttcgcccggcagcagatggcgctgggtgacgtcaacggccacgtggaggagatgtacgccggtcacctcatcgtcaaggcatacaacggcgaggccgattcgattcgtcgcttcgagaagtacaactcggacctctacgagtccggctggaagtcgcagttcctctccggcctgatgatgccgctcatgaatttcgtgggcaacttcggctacgtggtggtgtgcgtggtgggcgcggcgctcgcgctcgacgggcagatcgagttcggcgtgatcgtggcgttcatgatgtatgtccgcctgttcacccagccgttggcgcagttcgcccaggccttccagaacctgcagcgttgcgcggcggccgccgaacgcgtgttcggcttccttgaggagccggagatggaggacgaatccggcaagtccgctttgcttgggaccaacggccacgaagtgaagggcgacgtgggattcagccacgtacagttcggttacgaaccgggcaagccgatcatccacgacttctccgcctccgtcaaggccgggcagaaggtcgccatcgtcggcccgaccggtgccggcaagaccaccatggtcaacctgctcatgcgcttctatgagatttccggcggctcgattgcgattgacggcgtggacaccaagtccgtgccgcgctggaacgtgcacgaccagttctccatggtgctgcaggatacgtgggtgttccgcggcactgtgcgcgagaacatcgcctactccaagcccggcgtgaccaacaagcagatcgaggatgcgtgcaaggccgtgggcctcgaccacttcatccgctcgctgccggacggctatgacaccgtgctcgacgacaagtcgtcgctctcccagggccagaagcagctgctgaccatcgcccgtgcgatggtgcaggacgcgccgattctgattctcgacgaggccacctcctcggtcgatacccgcaccgaagagctgatccagaaggccatggacgcgctgaccgtggggcgtacgagctttgtgatcgcgcaccgcctctccacgattcgcgacgccgacatgattctcgtcatgaaccacggcgacgtgatcgagcgcggcacgcacgacgagctgctggcggcgggcggtttttacgccgacctctacaacagccagttcgcactcgctgactgacggattgtttcctgcgttagcggattagcggattagctatactcggctcccctctccgaggggagctgtcagcgtagctgactgaggggagcaacccatcggtccacccgagggatgtgatactgatgatttcgtacattagtgtgtgaaaaagccgccgggaaaattgggggattgggcggcggtgcggttggcgttgagaatggcgcattcgaaggggaagtgagcgcgcagctgggtggccggggtggtgaacagggcggtggcgaggccgtcggccagtgtgacagggacgtgtgccgcaacggtgttcgacgaatcgtcggtatcgcggtttgccgttgtcgaggcattgctgccatgcgtcgatgtcttcgtggttatggcgctcgatggcggcgtgacggccacccatgtggcggctacatcgtcaaccggtagtccgtcgatggcgttgagcagatggtgaagttggtgacctgcggcgtcagaccagtggcggcggctgggggagctcgcgcagaatgcgccgtggctgatttcgaccgtacctacggcgttggccggatcggcaggatcttcaagggcgatggtgattggttcgtccgtgtgcactagcaaatcacccccggcgtcgatgacgtattgaatgggttgagggtgacccgcgccatcacccaacatccccgcaagcaaatccaccaaataccccttaccgcacgcgccgaaatcgagcgcgaccggtccgcgcgtcaccagtgttgtgccatgccgctcaacgtcggctgaccaaatggctcgtccgtggatcgcgcctgcatgttcagcggcatctggcgtaggcgtaaacgaatacgactcgtcatagccaagccgaatcaaatcctcgcccacgcatgggtcgatggtcccattagtcgacgcaaacagctggtcgtacaggccaaataaacccaatgcccagtcaggaaaatcgaacgtgccgccatgcgtggccgtgcgcatccggccgaccgtcgaatcatccttgaaccgggacaatgcggcttcataggtgctgatgaacatatcgatgcagttactgagcccgtcatccagcgcgacatcggtatgcagcagcaacccggtgcccagcgcttcggggaaagcggcgacgtgcggtagtcgttcggccagaccagtcatggctctcatcgtagagcctgcggatggctgaggggaaggcggctcggggtgtggattgtggtgtgcggttttgccctgcagggaattgagtgtaaaaccgttgtagatgactttgttttagcttgtcgctagagcgaagtcatctgcatggcctcgttgccgaggccagctccaagactcacacggcttacgccgtcgcttggttcgcgtttcacaggatgccgcgttgcccgacgcgatgcgtcggtccgtcttccgcttcctccgcgcgcgtttaacgtctccggggcactcccggcgacgttgatgttgacggccgcgttcacatcacggtcgatgacaagcccgcactcctcgcaatggtagacacgttcggacagggacagtttggctttcaccgtcccgcagttcgaacatgtcttgctgcttggatgccagcggtcgatgacgtggagcctcgcgccggtgcgtgcggtcttgtattcgagctgtcggcggaactccgcgaacgcggcgtcctctaccgagcgggcgagcctatggtttctcaccatgcccgccacgttcaaatcctcgatgctgatgtccgcgtaggcgcgggcgagcatggtggtggtcttgtccagtaggtcgcggcgtaggtccgccacgcgggcgtgcagacgcgtgaccctcgttctcgccttgcgtcggcggttggagcctttccgtttgcggctcagattccgttgggctttcttcaatcgtccgaggttcgatttgagtgcgtgcgggttgtgtattatggtgccgtccgataatgtggcgagttccttcacgcccaagtcgatgccgacgctcccgcctttcggcggcgatggaatcggcaggtcggcgcgttcgacggtcaggctggcctgccagcgtcccgcatgccgggatacgctcatgcgcagcaccttcgcgccgttcactcgcttggacacgttctccatgcagtgcacgcggcctatcttcgggagccgcagcgcatgagggtcacagtcaatgagaccaaacgagcccgtcgtgtacgcgaatccgggaaccgccctgtccttggatttgaagcgcgggaagcccatcctgcggcctttccgctgccccttgcgggacttggagaagttcttcagggcgtcggccaatgattcgaggccgctgttgtacgcctccttgctgttctccggccaccacggcttgccggtctccatgctgacggcgagggcgtccttgttggcgttccaccacctgcgcagcgcgtagtacgaccattccggcttctcctgccgttcaagcatggccttgacgtgcgcgagtcccgcgttgtacgcgaaccgcgccgcaccggcatgggactccaagagtcgttcctgccgtggcgtcgggtcgagcgccaccttgaccgcctcaagcatcacgcgccgccctcaacgccgcgtccgtcttatgcttggcggcacgacgcccgtacagtcgtgcgcagaacgaggtcagcacctcggtcatgtcgcgcaccaagtcgtcgtccagctccgtgtcgtccaccacgatgatccggcgtccctgcgccttcaacgcgctctccaccagtcccatgttcatgcgggcgagcctgtccctgcgctccacgatcagcgtgcccacggtcgggtcggacaacagccggttgagcttgcgccgcttgtcgttcatgcccgagccggtctccgtgaccacctcggggctcttgacgcccatgttgatggcgaacgccttcaaccggtcggcctgacgttgcaaatcgtccttttggtcggacgagctgacacgcgcgtaacacaccgtcctgccgttcgccgtgggggcggcgggctggttctcgtatttcgggtcgtggatgataatcgtgcccgtgttcatgcgctcgaacgggacgggcatacggttctcgcgacaccactgccacaccgtctgctcgttgaagccctcacgcctcgcccattccctgacacgcatgacttaattatatcacacgaaaacaaactaaagcaaataatcaatctagcaggttataaccccggtgtatactggtttttgacactgtgtcaatgttgattcggaggttatggggaatgggcaatacgactacagcaagtgtaacgggcgcgcaagttgcaccggcgaaatcagccatcaaagatctccccatcgccaaagtgtgggcgtttgcggtcggccagttcgggtgggcgctgctttccggcatcatctccaactggctcgtgtatttctaccaacctgaccaggagaccatctcccaaggtcagaccgtattcgtgccgcagggcctggtcgttctcggcatcgtgaccgtggtgggcggcatcaccgccttcgcccgattcttcgacgcgttcgtggacccggccgtggcgtccctctccgaccgttgcgacgccaaatccggccgccgtatgccgttcctgaaattcgccgccctgccgctcgcggtggtcaccgtactcgtgttctggagtccgatcaacggcaccggctgggtgaacgcggcgttcctgttcgtcaccgtgatcggctactacatcgtcctcacgttctactgcacgccgtacaacgcgctcatcgccgaactcggccacgactccaagcagcaactcaccatctccaccgccatctccttcacttgggtggccggcacggccatcgcgtacgtggcgccggtgatttggggcgcgttcgtgccgatgatggggcgtatcaccgccatccgcgtgaccttcaccatcatggccgccgtggcgttcgtgtgcatgctggtgccgccgctggccatccgcgagaaggactacgtcaactcccagcccacctccgaatcggccatcgaatccctgaagcagacgttcggcgacggcgaattccgcaagttcgtgtgttccgacgtggtctactgggtggccatcaccaccttccagaccggtctgccgttcttcgtgaccagcctgctcaagctgccggaaaccaccacgaccatctacttcgtgctcatgaccggcgtctccgtgctgttctatctgccggtcaatatcttggccaataaggtcggcaagaagcgcctgctgctggttgccttcgtgatcttcacctgtgcgttcgcatttgccggcgcccttggttcggccgcgctcggcttcattccggcgatggcccagggtttggcgctctcggtggtcggcgcgattccgatggccgcgttcggcattctgccgcaagccatcgtggcgaatatcgccgacgccagctccaagaccaccggccaggaccgtcagggcatgttctacgcggcccgcacctttgcgatgaagatggggcagtccgtggccatgctgctgttcaccggcgtctccaccatcggcatggcgtccggcgcgggctatcgcatcgccgccgtgtgcgcggccgtgctgtgcggcttgggcggcatcgtattcgcgttctacaacgaaaagaaagtgctgcatgtgctggaagcatgatgacgttgccgggtgccaccgcggtatccatgcggagcggtgtgggtgatttaccccgtctgcgacacttcggcgtcaaattgcgtttgaccgcactccgtactatattgttgcgagttgctttgcggagcaaagtaacatccaaggggctgtagctcagttggtagagcgcttcgttcgcatcgaagaggtcgcggtttcgactaccgtcagctccacgagaccctctgcattcattccaccgcagagggtcttttcatttgtcttcgttggtattgtgccatctcgcgtttcaaggggctgatttggggtttaccggaggtctacttgcgtttcgaggggctgatggtcaagtagatatgccgccaaaatggcggaatagcgttgcgtcaaagccgtttgtactggtgcttcaccggatgaggagccccttgaaacggaagtagacttccggaacatgtgaaatcagcccctgcaaagggaaaatgcctcgattccgccatggattgtcgtggattgctctgtggtatgggcaatactgggagtatgacaagcgcagatgagttgaatgagcagtatgacgctgacggtagcgtgacgcaagtgcctgaacgcaatgatgaagttcatgccggcgaatccgccgccacccaatcccgcgaatcggccgtgaccgtccccgccggcaccgtggtgctcgccgcaaccccgatcggcaacgttggcgacgcctccgcccgtctggtggccctcttggagcgggccgatatcgtggccgccgaagacacgcgccgcctctacgatctcgcccgtcgcctcggcgtctatgtgaacggtcgcgtcatcgcctatcacgaccacaacgagcgcgacaaggccgacggcctgctcgaccaggtcgaaaccggcgccaccgtgctcgtcgtgtccgatgccggcatgcccaccatcaacgaccccggcttggccatcgtgcgccgtgccatcgaacgcggcctgcccgtcacctgcgcgcccggcccctccgctgtgctcgacgcgctcgccctctccggcctgcccaccgaccgcttctgctacgagggcttcctaccgcgaaagcattccgagcgcgtgcagtatctgcgcacgctgttgcccgaacgccgcaccatcgtgttctacgagacgcctcatcgcattgccgattcgatggacgatctgctggacgcgttcggcccgaatcgcccgatggccctgtgccgcgaactcaccaaggattatgagcagattcgtcgcggcccgattggcgagattcgccaaagtgtgattgatgatccgccccgtggcgagatggtgctggtcgtcggcggcgcgtccaacgaggaggccgaagcggccgcgcccagtacgttgagcgtggatgacatggccgtgctggccatcgaccgtgctttggaggacggcctgcgtatcaaggacgccatcgcgcaagtggtgcaggagcatccactggctgacggatcgttggccaatcgcaagcaggtgtatgcggctgtgctgaaaatcaagggatagcgcagcagccggcgattatctccccgttacgcttccatcgactcgaacaatatttccaacgcctgccggaccccgggcccaccacgctgcgagaccaattccagcaaaggcgcgtcggctttgggattggcaaccagccatttacgcagttcgggcacgtgatatgcgatgtgccagagcacggcaacatccgtatcgggcgaacatgccaccgcgggcgtaagtctgatgggtggttcaggcggcgcggtcatatccgagattgcgcgcgatgcggattcggatgagtgtgccgccgccgcgtggcgaggcaaccgttgcgcctgccgcaaatgccgtaaacggtgagcggcatggcggcctctgcgatggcctctggcaatgaatcccctcgtcatgcgcattgctccaaagccggttcgtcaatctccttctgcaccgattcaaaaaacatgcgtgcacgtccggcatacttgtgatgccgatgctccttgacgatttgcagacagtcgtttggccgaaactggtacgcggacatcagctgacacaccagtgcgttgacggtggaaggatcggggatgtcttcaggactcatcaccaggtcgcaagccgtacgggctggcgtggtgacaggcagcccgccgagcttgatgatttgctccggcaacgtcaatcttttgaatacgcggatacggcggctgacggatgccgagcggaagtgcgatgtggagatcacgtctatggtgctcggaaagtcggggcctcccagccatacccaagcggcggtcatcgaacacaccacagtgccaaacggggcgacctccgcgacgatttttgcgcgaccatacagtgtgcccgaatgctcgatccagtagccggcggaatcgtcgagcttacgtaacgcgccgaaggcggccagacggttaaggctgagcggtcccggcagatccttggtaaacagtatcggcggcaccgcgggctgcgcggttgccggcgaggtgactgttgtgatgtccgtcatcggacctgctgtgatatccatgaccgaacaatatgcagaagtacggcttgcgcgccaccggataagcgaaaacggtggataagtgcataacttcactaggtgcgcgaatgatgtggataactcggtggatatcgacaggcggaagtgtgtgcggatgtgcgtggacgtgcgtacggatgggtgcgtggacatgtgtacggatgcacgtacggatacgtgtgcgaatgcgtatgcggataagcgcgcaagcggtgtacggataagtatgtgggggaagttacgggcggataggtgagtgggatgaggatggcggcgcggcagctatccgggcgtgtccccgccgcgccggataatcaagccttatgagtcatgttttggtgaatgttgcttggccgtatgcaaacggcccccgtcatatcggtcacgttgcaggatttggtgtgccctccgacgtctacgcgcgctacgagcgcatgaagggcaatgacgtgctcatggtgtccggcaccgacgagcacggcaccccgattctcgtcgaggcggagaaggaaggcctcaccgcccaggaactggccaaccgttacaaccgcgtgatcgccaaggatctgtgcgacctcggcctgagctacgacctgttcacccgcaccaccaccggtaaccacgagcacgtggtgcaggagatgttcaagcagtgcttggagaacggctacatctacaagggcacccagcaggtggcgattagcccg

SEQ ID NO: 304 - DNA, 3503 bp, Unknown
  R101_18m  MAG No. k141_88626
aaaatgtcagccggcattccactcaccgatgaggaccgctggccatggctgaacgtcatcaactcctggatggtggcacgcgaggcgctcggcgaaaacaccgtggtgtccagctccgcgttaaagcgcagctaccgcgaggtactcgccaaagacgtgcccacattcttcattcacctcaacggcagccacgaactcattcaacagaggctcagcgaacgcaagggccatttcatgccgcctgcgctactaccaagccagttcgccattcttgagccgcttgcccccgaagagaacggcgtggaaatctccatcgaaggcagcgtcgatgaaatggtcgaccgtgctatcgaagcgctgaacgcctatgcgacaaccgtagccacgaccgtggcagtccaggccgcaacccaggccgcctaacccaccattccccggtccaaatgtgtccgattcaccagaaacggacagccacacgcccaaaaccggtacacgaatgtccgattctgcagacacggacatgtacgcacccaaaatgggcttacatatgtccgaatctccagaatcggacagatctagcacgccaaacccatgaatcgaggaggattcatgaacctcattgcagcggcgatcatcggcatcgccatcatcgttctacttatcgcggtatgcaaagtgcatccgttcctctccttgcttgccggctcgttcacgatggccgtatgtgcaggcgtggaatacgacgaagcgttcggcagcttcacctccggcgtcggctccaccatcgccaacgtcggcctactcatcgcgtttggctcgatcattggcacgatcctgttcaagtcgggcggcgccgacaccattgtcgacaccatcatggccaaaacgccgttgcaacgcttgccgtgggcaatggcactgatcgcgttcatcgtcggcattcccatgttcttcgaagtcggcgtagtcattctcattccggtggtgctcttcgcagcccgccgcgccaaggcaccggttgtgctgctgggcattccggccctcgcaggcctttccaccctgcacgcgttcgtgccgccgcaccccggcccgctcaccgcaatcggcgcattgaacgccaaccttggcatcaccctggcactcggcctgctcgtagccatcccaaccgtaatcatctccggcccgatcttcagcaaactcgccgccaagtgggtgccgatcgccgcccccgaaaacaaggctgaggccgaagcgccaaaatccgcggaaaaccgcccgtccttcgcatccgcaatcgccgtcatcctgctgccggtcgtgcttatgctcgccgcttccatcgtggatctgaccggtcaaagcgaaaccacgtggggtcgtgcgctcgctttcatcggcactccgttgaccgcgctgctcgtcaccacgattttcgcgatggtcgtgctcggctacatgcagaagttcacccgcgacgcggtcaatggcatggtcggccaatccttcagctcggtcgccggcattattttgatcgtcgctgccggtggtggcttcaaacagacgctcgtcgattccggcattggtgacgtgatcgccaattcgatcaccgaatccgccatgaatccgctgatcgcaggctggctggtcgccgtgctcatccgcctcgccaccggttccgcaaccgtcgccaccgtcaccgcttccggcattatggtgccactcgccaccggcatgagcccgacgcatttggcactgctggtgcttgccatcggcgcaggatccgtgttcttctcacacctgaatgatgctggattctggctggtcaaggagtatttcggcatgactgtcggccagacgttgaagacctggtcgttaatggaaacgattctgtcggtcaccggcttgggttgcgtcatgctgctttcgctagtgctttgacgcatgatattccacacatgaattgagatatacgattcgcacgtctcatatctgaacaacatatctgagatacagaaattacagacctgccgtccatctgttgcttgtcgccttctcttctgcattgcggaaggcgacagcgatggacgggcggcaccaatcccaatcaaatccacaattccacatcaaacacaaccgtagaaagaagaacatcatgcagttggcaatgatcggtctgggccgaatgggtggcaatatggcgaagcgcatcacggcagccgggcacgaggtggtcggatacgaccgctcccccgaatcggatcgcaccgtagcaagcctcgaagagatggtgaccgcgctcaccgcgccgcgcatcgtgtgggtgatggtgcccgcaggcgaggcgaccgacagcaccatcaacgaattggcggaactacttgagcccagcgacatgatcatcgatggcggcaattcccgttacaccgatgacgcgcgtcacgcggccgaactcgagccgaagggcattcacttcatggattgcggtgtttccggcggcgtgtggggcatcgaccgcgggtatgcgctcatggtgggtggcagcgaagaggattttgaacgcgcccgaccgattttcgaagcgctcaagcctgagggcgattccggactcgtgctcgcaggaccggttggcggcggccatttcgccaaaatggtgcacaacggcatcgaatatggcatgatgcaggcgttcggcgaaggttttgccactatggtgaaatccgacctcatcaaggatccggccgccgtaatgagctcgtggcgagacggctccgtagtgcagtcctggctgctcgatctgctggccatcgcgttcaaatcggatccgacactccagtccatgccgccggtggccaacgaatccggcgaggcgaagtggatgatcgaggcggcgctcgaactgggcgtaccaacccccgccactgcggccgcactgtacgcacgtcagacttcccgcggcggtgcggatgacattctgcgcgtagtttccaccatgcgcgcccagttcggcggtcacgtcaccaagattgacgaaattgccacgcactgattgcgtcatggtcggcgagcgccacgtaccacgcgccgaccatgcatctcgtttcgtagatttcgcccggtctcccgcccccaccggatttcgggcgaacccatatccgcacacatcaaaaaacgatattcgttatatgtggcagattccccctctcaggaaagatgatattcgctatatgtggcagacctactaggccaaacgtcacttagggggcaagttttatcccctctaaccgtcgttttccgcataaacctgccacatatagcgcaaacgactttttcagaggccgtagacttcgtgcacgaacttttcaagcgcggcgatggaacgctccaccttctccgtgttgatgcagtacgccatgcggaagtagccgggcacaccgaaactgtcggacggcacgagaatcaggtcgtaatccttggctttcatgcagaacgcgttcgcatcctcc

SEQ ID NO: 305 - DNA, 8069 bp, Unknown
  R101_18m  MAG No. k141_89318
atgcctcggacggggtgcggctgtccgtgtggatgtcctgcaggacctcgcgcatccggcaggcgcggccggtcttcaaccgttgcctcgtcaggttgcgcttggtctccacctgcagttcggtcaggctttcctcgttgcacagccacaggtacttggtccgtttgagcagcgggttggagcggccttccgtcttcctgaccttgtcgacggcctcgttggcgtgcctggccacgtggaacttgtcgacgatccgccgcgcatggggcagatgctcacggatgcccttccggaagcccaagctcatgtcgcaggcgaccagacgcacatattccgggaccccgttgtggtccatgaaatcacgcgagaaccgttcgaccgtggtcgagtccttgcccggcgtcacgttgatgacatcgtgctccacgagatcggcgaccacggtgatgtaattgtggcccctgcggctggtctcgtcgatgccgattggcccgtacccgcacctcgtcacagcttgtataatcacgattatactaatcgtgatacaataaatcgtgatgcgatagaaatacgccggcgtatggcataaaggaggcgggcagcatggcattcatcggacgagacgatgacctcaagcaactgcaggaatgtttcactgagcgtagggcacagcttgtgttcgtctacggccgcaggcgcgtgggaaaaacagagacgcttattcaactcgcaaaagacaaggaaaccttattcttcgcggcgcagaatgccactaaagatgaacagctggcatcgttctcccgtctcatgttcgaggcgggtgccccgggcaaggattatctgagtcaatatccttcttgggaaagggcgttaaccgagttaacccggctgccagagccgagcgatggcggccgcaggcttgtgatattcgatgagtttccttatctggtcaaatctgatccgtcattgccgtcagtgctacagaatctttgggaccacacgttgcgtcatgcaaatctgatgattgtgatttgcggcagtgccatgagcttcatcgaaaaggagctgttgggagaaaaatcgccgctatatggtcgtgcgaccggcatcctgaagatgctgccgatgccatattgggatgcagcgcaattcttccccaactatagtagcgaggataaggcgctggcctacgcaatactgggcggtatcccgcgttacctagaggaatttgacccagatgagaccatagacgcaaatgtcaagcggcatattctgagacgcattgctccgctatacagcgaggttgaatttttgttgcacgaagaactgcgggaaactgcgaaatataacagcgtgatacgggcgatcgcgctcggcgcaacttcgctgaatgagatcgcgacacacacgatgatggcaaacgcaacagtatcgtcgtatctcgccaatcttatggaactggggattgtggaacgtgagttcccagtcacggcgaagcctaaggagcgggcgaaaggttcgcgtgggctgtatcagctgagcgacaatttcttccgattctggtattcgtttgtctttccgtatcgttcggaattggagcggggcgatgtggaaggcgtatacgagcgtcatatcaagccggtattacatgattttgccggcaaaccgttcgagggtctgtgccgtgaatggatgtggcgtgagagtgctgctggacggttgcccttccgtgcgcgtgcggttggccgttggtgggatcgtcaggatgagatagacgtgatggccgttgacaatgcgtctgatgctgccattgtgggcgagtgcaaattccgcaatgcgccggtggaccgttccgtgctgaatctactgcgagaccgtgctgcgcgaaccggtatcggccagcgaacatacctgctgttttcgctcggcggtttcgatcaatcactggtcgacgatgctgcggcgtctcaatccgacgttcagctcgtcggcatcgatgagctgtttcatgaataaatcccatttgcgaatagctctcactgagtgctcatcagtgagagctattcgcaaatggagccttacttcttcgcctgagtgagctggtaggcggcgaagaggatggccagccagatcacgccggcgatgacggcgatgcggtagctggtggagaagcacatcagcaccacgaccagcgccaggaacgccagcaccacccacggggtcaccttggcaaacggcagtttgaagtgaatcgcgtccagtgcctcctggccgctcagaccggccagctcggaatcctcgggagcgccgcccgcggcgaccaccttacggaacttcatttcggtgagcatgatcatcgtccagttgatgatgccggcaatggtggcaatcgacatcaggtagttgaacgcgaactcaggccacacgaacaccacgaccacggcgatggcggtgatcgcggcggacgtcagcacgccggccactggcacgccgcgcgagttgagcttgcccaagtaagcgggcgcattgccctgcttggccagcgagtacaacatgcgggagttggcgtacaggccggagttgtagacgctcatcacagcggtcaggcacacgaagttcaaaataccggcagccgcgtgaatgcccacggaatcgaagatctgcacgaacgggctggacttgccatcgatggtgttccacggcactacggccatgatcacacccagagcgccgatgtagaacacgaggattcgccaaataatatcattggtggcgcgcggaatcgtggtcttcggatcctcggtttcgccggcggtgatgccgatgagctcggtgccgccgaagctgaacatcaccacaaccagtgccatcagcaggccggtccaggaaccgtcggaattctgccccatcaggccgttcgggaagaagccgttacccacggtgaaccagttcgcgaagcttgcgcgcacgccggatgcggtgggcaggacaaagatgatgacggccaggccgccgataatcatggcgatcacggccacaatcttgatgatggcgaaccagaactcgaactcaccgaatttagagacgcccagcaggttggcggcgcagatgatcaccaagaacacggccgccgacacccatgtcggaatcgccgggaaccagtagttcacaaacgaacccaccactgatagctccaccatcgagacgaggatgtagttgaaccagtagttccagccggaaataaagccggcgcgcttggaccagtagcgggtggcatagtagctgaacgcgcccgccttcggatcctcaacggacatttcagacagtgcacgcacaatcgcgaaaatcgcgaggccgccaaccaagtaggcgagcagaatcgagggtccggccagcgcgatggattcactggaaccatagaacaggccggttccgatggcgccgcccagcgcaatcagctggatgtggcggtttttcaatgacttgcgcagcgtggccggcaccggcacgtcgtcggtttcgcgcggcttcttaggcgcatcagtagtactcattgtgctcttctctcacatttcttgggtttggcgcacgcggggcttgccgtgatgcgcaacgttcgttattctatgccgccgtatcgtctcagaaatggtcaatcgtctatttgtgcgctattgcaagcgcgggcgtgggcgcggccggtgagcaggcgaagctatagcgagcgatgcttatgaaaccgcacgcttcactgagttcactgagttcactgaattcactgtgctcactgcgtggcaggcatacacatggtgaagatggtgtgggacaccgattcgggagaggccgcgagatcggtggcgagccaatattgcaaaagcccaatgctgccggacacggcgaatcgcatacgcatctgcgcctcggctgggtaacccgccgaagattgcaactgttcgcctacaccgcgctggctgtaaatcaatcccagcagctgctgctggaaaccgatatccgctttcgggctcatcagcacttggagatgattgcgattgtcggcaatgtactggcagatgcgctcaataacatgctcgatgccggcaggatctggctgggcgagtagctgttcgagtgcggtggtgacccaggccatggtttcgtcttcaatgtcgtgcagcagttcctcgatgctcgcataatgcgcgtaaaacgtggaacgattcacatcggcccgctcgcacaacgctttaacggtgatggagccgagcggctgatcgcgcagcaactcgataagcgcgtcctgcatggcacgtctcgtgtagcgggtgcggcggctttccgtcaattctttggccatggccttctccccaagttccgacaacccacaatccaactgttggttgcagaaccgacacagtgttgttttacttgagtatagcaggaagttctggcggggcctatggggctaggtggctgccacgagcgcgttggaggtgtgcgatggcgtatatcgaattcgaccatgtggtcaaggaatatccttctggcagcagtgtgattcgcgcgctcgacgaggccagcttcaccgccgaacaaggcgaattaagcgtgattctggggcagtccggtgccggcaaaaccacggcattgaacattctgggcggcatggataccgccacaaccggccgcgtagtggtcggcggacgcgatattacgggtctgcggaaaaaggaactggtgacctaccggcgcaacgatatcggcttcgtcttccagttctacaatctggtgcctaaccttaccgcgctcgaaaacgtggagctcgcctcgcaaatctgccctgaccatttcgatccagaggaaacgctgcgcaaagtcggactgggggagaggatggacaacttccccgcgcaactgtccggcggcgaacaacagcgtgtatccatcgcccgcgcgattgccaaaaagccgaagctgttgttgtgcgatgagccgaccggtgcgctcgattacgagaccggcaaggaagtgctgcagttgctgcaggatatttgccaaacacaaggcatgaccgtaatgatcatcacgcataattccgcgcttgcaccgatggctcacaaagtgattcgcttccgctccggcaaggtgaccagcgaggaggtcaacgcaacgccgcggcccatcgccgatatcgaatggtaggtgattggcgatgctcactgcaagacactctgtgaaacgccccgtgaaacaagcgaggcgattcgtgaaacaacctgtgaaacattctgtgaagcggcggaacctcgacgatagcggcggtcgaggagcgggcgtttctgcggtatttgccaaagatacgttgcgttgctggctgcgcagctggaagaggttcgtctcgatcgccgtcatcacgctgcttggcgtggccgtgctgaccggcatctacgccggatgccgcgatgcttttctggcggccggtcgtttttacgatcagcagggactgcatgacctgcaggtgctatccacatacggcctgaccgatgatgatgcaacggcactgcgccgaatcgacggtgtgcaaaccgtgcagcccgaacgttctcagacggtgaccacgttggtggacggcaccaagaaaaccgtgaccatgcaggaaatcggtaccgaagggcttgatcagccgtacatacggcagggcaaactgccgaacaaggccggcgaagtggcggttacgcagcaattcctgaacgatagcggactcaagattggcggcaccattactgtgacgccacaagacacctcttcatccgtcatatcggtagcggccacggagactgacgattccaataatgccgatacggtaggtgtcgccgccaatgcctcgacatccgatgcgaagtccgacgccaatacggacgccgacgccgagcaatccccgcagttccccacgaaactcaccatcaccggcgtcgtactcgacccgcgcgacctcaacaatccagacggctattcgggcatgacctccttccggtccacctcatccgaggactatacgttctttgcacccagcgacggcgtgaccggcaatatatacactgcgatatcggttgccgtcactggtgcgtccgattttgacacgttttccgatgcctacgatgaagccatcaaaaccgtggccgaccgtatcgaacatcagatacaggccacacgccagaaagcccgtcgtcaacagatcgtctccagcgcgcagcgcaaactggatgatgccaaagacgaggccaacgagcagctggacgaagcccagaagcagatcgacgacaactgggccgagctggaagccaacaaaacgacattgcaagatagccgtaccgaattggagaacaacaggacaaccattaccgatggcgaacggcagctcgccgatggacgtgcgcagattgcatcggcccgtcaacagatcgcgcaaggtcgccagcagatagccgaagcgcgcacccagctcgaatcaggcaaaacgcagctcacctcggctcgcaaacagctcgatgcggcgcaaacggaactgactgccaatcgcacgaaaatcgaacagggcattacccaaatcgaccaaggcgtggcacaaattgatcagatgctgtccatgattcaacaggccgacaatctactggcgcaacttgacccgaatatcgacttcaactcacccacatggcaggccatcaagcaactgctcgcgcgccttggcattaccctgcctgaagtgccgtcaatcagtgagctgcggcaacagctggccgccaagcaaacggaactgcaaacgcagcgggacagtctgacccagcagaaagccgatttgcagcgcacattaaacgaaaccattgcccccgcacaatccaccttggaccagcagaacgcgcaactgaccgccaaggaacaggaagcggctgcaggagaggcacagctcaataccaaatccgcggaactcgaagcgaatgccgcaaccctcgaaacccagtcggcgcaacttgaagcgcaggccgcccaactggccagcggcaagcagcagctcgaagaaggcgagcggcagctggaagaaggcggacaacagctcgcggacggcaaggcgaaactggatgatgcgcagtctgaactcgatgcgaagcgaagcgaagcggaaagcgaattcgccaagcagcaacggcgcatcgacgatgtggccaacgcacgttggtatgtgcagacgcgcgcttcgatcgacggattcagctcgctcaaatcagacgtcagttccatcgaatccatcggccgcgcattcccgattgtgttcctgctggtcgccgtgctcatgagcctgaccaccatgacccgcatggtcgaggaagaccgcggacttatcggcacctaccttggactcggctatggcggactcgccgtgtccagccggtatctgctgttcgcgttgctcgcctgcttggtcggcggcggcatcggtctgctggtcggattccttggcatcccggcattcctgctggtggtgattgagggactgtatatattgcccggtgtgcgactcgaatacgactggctgtacggttcggccggcatcgtgctgttcgtggtcggcgtgggcgtggccaccgcgctcgcctgtcgcgaggagatacggcacacgcccgccgcgctgatgcggccgaaggcgccgaaagcgggcgctcgcatattgctggagcggattcgcccggtatggagccggctgaacttcctcggcaaagtcaccgcgcgcaatatcttccgattcaagtcgcgcttgattatgaccgtgggcggcgtggccggttgcacagcgttgattatctgcggatttgcgattaatgacaccgtcgacacgattggcgccaaacaatacgagcagatctaccagtacgacctgatggtcgtggccaatgacgatgacgccgccgcgatgcgcaagcaggtggcacaagatggccaaaccaccgaaacgctgaatctgcgcgtggatagtggcgagatgagcaatgcggcgcaggaaagcgaaaccgtgcagc

SEQ ID NO: 306 - DNA, 6824 bp, Unknown
  R101_18m  MAG No. k141_90464
agggcgaaggccacgacgtagcccatgaagccgatgaccggaatgccgaagataatcggcttcatgccggcgtagtagacaatcgacgagccaacgaacaaaccgaccacaatcagggccatcgtcagacgattcgccatatccgaaagcagctggaacggctcttcggagccgaccagttccatgttgacgcgcaactgaccacgggtcagcatacgggccacggtcttgagttcggtcatggtgccgagcgtggcatgcaaagcctgatgcccctcaacgcccagcgacttgatctcgtctttggtggcgttcttcagcgatttcgacgtggcgatatggtcggaaatgatttcgatcatattcacatcaggaatgaactcgtccagcaagccttcgagcgtaaccaacgcgcggccgacggtggtcaccgtactgggcacctcgatgttgtggcggccggccatctgcgtcagcgcggtcaggaaggcggcgatgtccagttcggccagatccacggtgccgaattccttgacgatcacgtccagatcggccaatagcgcgggatagtcctccggatcggcctcggtgccggcaaatcgcagcagcccctcggccagagcgggcgaatcctgtttggcgacggcgaaaatcatttctttgaggactgtacgggtgcgctggtcgagccgaccggtcataccgaggtcgataagtacaatccggccgccccggatgaggatattgccgggatgtgggtcggcgtggaagaagccgtcgtcgagaatctgtgtggcgtaattgtcgacgagcttggtgccgatctccttcaagtcataaccggcgtcgatgagctggcccgggtgggagacggagatgccgtcgatgtactccatgaccaccacatgctcggtgcacagttcggcgtacaccgtcgggcagtccatgtatttgaatcgggcggcgaaacgcttgaattcggcgagattgcgggcctcgatcagaaagtcagtctccgattcgaaggtgtcccacagctcctcgaccacgcccttcaggtccacgatctgtgaggtgcgaatcaccttagtggcggccttggctatggagcgcatgatggagacgtcctgggccatgatttcgcgcacacccgggcgctgcactttaatggccacatcttcgccggttttcagcgtggcgcgatgcacttgcgccagtgaagcagagcccaacggcttggggtcgatatgcgcgaacacctcgtcggcgggacgcccgtattcggcggcaagcacatccaacaccgtggaatacggcatcgggtcggcgtcggcgcgcagtttggcgagttcgtcgcagaagctttgcggcagaatctcggagcgcatcgacagaatctggcccactttgacgaacgtggggccgagcgcctcgaacatgaggcgcatcttgaccggagtcaggccgtgcagcacgtcgaattgctcgacgattctggtgatctgccccagtcgtttgatcttgccacggcgcgtcagatggtagcgcgtggcgaaatcgttcctgcgtccgaacaatgccagcgtttcgtcggatacgctcggagtcgccttggtaacggtctgcttgagcgtgtccgacgtgtcgacggaccggttcgctgccgcctcacgttcggctttcacaggcgtcagaatagggtcgaccctgctggaaagcggggtcgaccctgattccggcgtagtgcgtgtgggcttggtcactcggccttgccctcgtcggcgggcttgtcggcggcgctggtgtcggctgcggcagcagctttgtcgccggcttcggcggcggccttcttggcgtcatccaccgtctcgctcaccttgcgcttgagctcggtgttcagcgccttgccctgctcgaccgtaatctcacccttcttgacgagttcgtcgacgagctcgctgctcttctcatatccggtggcaagggctccgatgcccgccagcaggaccttgcgcaggccatcacccagaagatcaaaatcagccatgatacccctccttcgaggtccgacatggcctggtgccatgtctcgtaccaccaagcctagcgcaaacaacagggcaatgtactagaccctcagactgatttcgactgatttttcgctgattggtacttaccgaggactcaccgagaattcaccgaggacgttcggcggcagccttgcgcgcgttggtggctacttgatcgatccgggcgagctccttggcttgttcgggggtctgatcggacgtatcgaacgtaccgtaacgacgagtcacggcggtttcgataaggaaatcgctgatggcggggtttttaggcagcaacgagccgtgcatgtaggtgccgatcacgttgtgcacgcgcgcgccctcggtatggtcttcgccattgttgcctcggctgtcctgatcgacggtgccgagtggctgaacgccttcgcgcaggaaggtctggccggagtggttctcgtagccaatcacatcgccgaactggtcggaatgctcaacaagattgccgatcatacgcacgttctggcccacggtataagcaccgataacgccgatgccgtccagacgggtgccgtccacggtttcaaagtactcgccgaacagctggtacaggccgcagatcatcagcatcggcgtaccgtctgcggcaagcgagcgcagcaggtcggcgcgatggtagaagtcgtcgatgattttcttctggccggtgtcttggccgccgcctcccagaataaggtccacctggtcgggccagtcgtcgccttgattgtactggtggacgaccggttcgtaaccgtacagttccagccggcggcggatagtcagcacgttgccggaatcgccgtagatgttcatgtctttgggatacagggacaccacatcgattgttctggccatgtcacgttctccttgtcgatgtcttcccgctaaggggaagtcttattcctcaccatgtcctcctgcaggcgggaggtggcgcgcgggcgctagagggtggttacttgcccacgccagcgtcccgtacttcggtgatgcggcccagtacggcgcgggttttgagcatggcggtgtaggtgcagtagatgtgcttgcgtgtgccgggattggcgttgacgaatgcggtgaccgcctgttcgaggtcggtgttcgtatcggcgactggcacttggtcataccccaagcgcaatgccatgtcccaggcgcgcacgccggagaccatggcgacaccggacgcgcgcaaagaggtgaagtccacgtcccatagccagctcatgtcgcggccgtcggcatattcgtcgttgatggcgatcatggtgtccgcgttggccgggtcgaagctggcgagcgagaggcggaagcccatcgggttcttgaccagcagcagttcgaccggggaaccgttgacgtcgatgacctcgccacggccgaaagccggcgtgacgcgggaaacggcggcgatgagctcgtcggcggacacggcgcaggcgttggctgcggcggtggccttggatgcggcggcattgtcttgcatcaccgcacgtaccacggcgagcgcggcggccgcgttgtacaggttgtagacgccttcaagtttgacgtcggtggcgtagtcctggctgtccatctggaaggtggccttgtggtcgcccacggcggtaagtgtcacgtcggcggggagttctgccgtgcctgcggaagctcccctctccgaggggagctgtccgcgaagcggactgaggggagtactgactgaagggagcggcccggccataccttccaccgacacggtcgtggccatgtcgtcatcggacgggaaatagtggcgcaaatcgtcggcgaggccgaagtatcgcactgtggtgccagccggggccttcgcggcgagcgcggcgatacgcgggtcctcgcggttcagtaccacagtgccggtagtcgccgcagccacatggctgagcagtttggccgtggtgtcgatttcaccgaatcggtcaagctgatcgcgcatcacgttcagcagcaacgcataacggggcttgacctgcttgacgaagtggacggcgtacgcctcatcgagctcgagtacggcgatgtccgcgtccaatttgccgccgaaagtgacttcggtgagcagtgcggagaccacgccgcgcacgaagttcgagccggtcggattggtgaacaccttcaatcccagatcggagagcatcgaggcgaccatgcgggtggtggtggtcttgccgttcgtgccggacaccaataccacgccaagcggcaactgcccgagcgtacgggtcaggaagccggggtcaatcttttctacgactttgccgggcaaagccgaaccgccatgtttggtgacgcgggatgcaaaccgcacgaagcggcctgcggccacggtggcgaacgcataccacggtttgcgggtctgcaccacggacgattggtcttgcgaaacatcgcgtgaaacgttgcttgccatcatcacaccccctgattgctgttgtagtcctgcggcatgtccttgaatttggacgtggcaccgaggaaggcgaggtggaaggtttcggtcgggccgttacggtgcttggccatgatgatatcggcctcgccggggcggtcttccttgtcgtagaagtcagggcggtggactaggaacaccacgtcggcgtcctgttcgattgagccggattcacgcaggtcggagagctgcggcttcttgtcgttacgcatttccgggccacggttcagctgggaaagggccacgaccggcacttcgagttccttggccaagagcttcagggcacgggagaattcggacacctcttgctgacgggattccacggccttgcccgaggtcatcagctgcaggtagtcgatgactacgagtttcagatcgttggtctgcttcagacgacggcatttcgcacggatctccatgaggctcatgttcgggctgtcgtcaatgaacagtggcgcattctgcatcttggtccagaactggttcagggtgttccagcgttcgggggtgatgtcgtcggcgcggcgcagggcggccatcggaatattggtttcggcggagataatacgctgagcgagctccaccttgctcatctccaagctgaagaccacggaagtcatgttgtggtgcaacgcggcggcgcgggcgaagtcgatgccgagggtggacttacccatggccggacgccctgcgacgacgaccatctgtccgggctgcaggccctgggtcacgtcgtcgatgtcgtggaatccggtcggcacgcccttgttgacgagaccctgctgcagtttgtccagctggtcgagcgcgtcgtggaccaccgggccgatggcggcatagtcctgacgcaccttgcccatcgacatctcgtagatctcggactgggcgaggttaaccacatcctcagcctgcgatccctcggcggaataaccgagctgggcgattttggtgccggcggcgatcacattgcgcaaaatggcccgctgatggacgatctccgcgtagtacatggcattggcggcggtcggtacggatgcgacgaggctgtgcagatagtccgcgccgccgaccttgtcgaggttgccatccgccaacagctggttggccacgagcaccacgtccaccggctgactggcggaaaacagatcgatgatcgcgttatagatcgtctgatgcttgggctggtagaaatcggtgacgtcaatggtctgcgagacctcgccgatggcatccttactcatcagcatgccgccgagcacggccatttccgcgtcgtcatcgtgcgggggcactcggtcgaaaatcgggtcgccgaccgccgccgacgtctgcgcgccgccccggcccgcgcggtcgccacgatcgccacgatccgagccactgccgaacccattctgatacgagtgttcacttccttctgccatagccttcaagtataggaggtggcgtggcgagcggaagatatcgcacgactacgttcattaggtcgattcctcactcattaggtcactgtgcttggtaacaccacaaaccatgcgcttggaatggcggcattctgaggcgctcgatcaatatctctcaaagtccaccgacctaatgaatgcacaatcgacctaatgaacgcatgaaagtgcaagtcgtgccgaatcatcgcgcaccaatttcatcgttggttcaccttgcggtcaacgcggcgacacgctgaagcgtcaaatgtggatagaaaaaatagttatccacattttggggataagtctggggataatccactcatttatccacatattggggataacttggtggatagtctggggataacattccgcgtccacaacaggtgcttgcgcaatgtagccaggcgtgatatgcgtgtgagcgtgcacatagactcttccgacgccaaagccaccagttccggcgataccacacgccgcgatggcttcggaaccccgcatgccggcgcaaacacaaacaccagcaacggcccgaccgacgcccgctccaccaaccgtcggatcatggcgctggccctgccgaccttcggccagctcatcgccgaaccgaccttcatccttatcgacacagccatcgtcggccatatcggggatgcggcgttggccggcctgtcaatcggctccaccatcatcctcacggcagtcggactatgcatattcctggcctactcgaccactgcgcaggtggcgcatctgctgggagcgggtcgtcgtcgcgagggactgcaggcaggcattgac

SEQ ID NO: 307 - DNA, 3486 bp, Unknown
  R101_18m  MAG No. k141_90514
accccgaattctaaggagattcaatgtcgcgcaagaaaaagaccgacggcgtacaggacgcgctgatacccgacgagatcacgccgctcatgctgctcgccctgaccgccaaggcgtcacgcatgaaggacgccgcggccgcgttccgcatcgcggccagcaagatgctcgacctggccacaaaggacgaatacatcgaaaaatacaagaacatcgaccccatcaccgacgccctgtacgacgcctgcgatctctcgcagcacatcttcgacgccgccaacgcggtcaacgacctcatcaactatccggtcgaggcccgcgagcgcgtggtgaaggcggatatcgagcgcagtttgttggatccgtggcgtgatctgcccacgtctggtgtggatccggataccggcgaaatcaaggaggactgaatcatgagcaaacgcaagcacggacgccagcaactggagcatgagcgccaacgccggcgcaggaagcgcatgccgcacctgcccgcacaccagaatctatcgatcaaggagcagtgacccgattcagtggctatcaacatcatcgatatcaacgtaaagaacctcatcccgaacccgaacaacccccgcaaagacgtgggcgacgtcaccgagttggccgacagcatcaaggaacaggggttgcagcaggcgctcgtggtcacacccgaccacgaggagcacggcgagcgcctgtttcgtgtggtgattggtcatcgtcgtttggcggcctgcaagctggctggcattgagcgggtgccgtgcattgtgcgcgaaatggacgtgaaaaccgagcgtgagctgatgctggtggagaactgccagcgttccgatttgacgccgttggaagaggcggacgggtatcagggtttgcttgacctgggtgccggtgtgggtgagctggcctcgaagacgggccgttctgagtcgttcgtgcgtggccgtttgaggatcgcgcgcattcccgccgaggtgcgttccgggtcggaggcgttcgctcagttgtcgctttcccagttggatgatcttgcggagttcgaggcttatcccgacatgatggctgagttggcttcgatggcgggcaccaagaactgggattggaagcgtggccagctgcggtcgcgggttcgcgtcgaggcgtggcagcagagcatgagaacagcgcttgaagctctgggcctgactgtggatgtctcggcttcgacgtggacgacgccggagggctaccggttctacgacgtgtggagcggcgagcccgaccagttcgagaaatggtggaagaaatggcatgaagcccacccgtacggacagccgataatccgattctccgagcgcaccgtattgtgcttcccgcaattgtcgcctgaggagatcgccgaacgtgacgccaagagcgagcggagggaacgggagcaggcggcattccaggaggcgctggccgcccgcaaggaattcgacaggctggcgtacacgctgcgcacggactggatcaggaagcacgccaccggattcaacggcggccagttgcgcaaggccaacacccgtctgagcctgctcgcgctgaccggcaccaacctatgcgacggcctgatcgcaggggccgaatggaacaacatcgacaacgtgctcgccgcatacaacctgctcgccgccacgccgctgccatacgacgacacgagcgatagggggctgtggcacgaacagaacctcacggaactgcatcgccgccagcacgtcgagggagccgcgaacagggaactcctgctcatcctgtgcgcccagatcgaagcactcatcaaacccggcacatgggccgacaaggacgacatcgatctcgcgcaaacctactaccacacgctctcagacctcggataccccaccagcgacgaggaaaacaaggcactcaacggagaatatctgcccgttgaagacgaagaggcggagtgaaccatgacatggacccagatagacgacgggttgaacttcagcccgcagaccatgcccggcacggtatccaacgccgcgttgggcctgtgggtcagactctgcgtgcacaccgcataccaactccgattccccgcattcgacggcgcattcgacctcacggtcgtgcgctcgctgaaaggcaacgcacggcaggtggcggagctggaggccgcgggaatgctcgaaccggcgctcgccgccggccggtggatggtggtcgaggccgacaccctgatgaaattcggcggcacttccggcagcgaactcaaggagaaaagagccaaggccgggcatgccggcggcgtcgcttcgggcgagtctcggcgaagcaaacgcgaagcaaatgcttcgaagcaaaacgaagcaagtgcttcaagcaaaccgcgaagcaaaaccgaagcaaaccatgaagcaaaagacgaagcaaacggtgaagcaaaacgaagcacttgcttcgaagcaaacgaagcaaccggtcctaacctaaccatacctaacccctcctcccctgtagccccctccgcgccgaagccggaccatgccgagcccggccataccggtccggtgtcgagcctcgccgaggccgaggcccgcgccgaggccgacccgttcgccattgcctgggactcgtacccgagccacaccggcaatcgggaacaggcccgaaacctgtggcgggccatcaccggcggcgacccgaccgtgccacacgtcgaggccagccaactgctcggagccgtcatccgctacgcccaaaccgtgcgccaggacggcgaccggttcacgccatcgatgcgcaaatggctcgaaaaccggcaatacgtcaaatggctgtcaaacacaccggcacacaccgaatggggcggcatcacccgccaatggctcaaccagcacgccatcagccaagtcccctcaggcacgtggacggacagcgtcgaacaaacgttctgggcccacgtcaaaaccggcgaagagccggagaccgtggccgcaaggctcgtcaaggaaatcaacgaaaggagccaggcatgagcgaccagcccacatccgagaccctgcgcctcgtggaaggccgcgagtccaaccggtgcatcgtgtgcgaccgatacctgcgtgcgggaaactggcccggcatgagccaccaccacaggaaacgccgcagccagacatacggcgaccccgaacggcacagcccctcgaacgtcatcgacgtgtgcggcacggacaacagcaccggatgccacggatggatccaccaacaccccgaacaagcccgagcattgggctacctgctcaaaagctacgaccccgagccaagccaagtgcccgtgtacagctgccggcgcggctggatactgctcgacaccgacggccaatggcattcatgcccgccacccgaagacctccccacccacatcaacatcaagaaaggcaacgaatgaacgacaccacgacaaccctcgccatcggccaccgg

SEQ ID NO: 308 - DNA, 3064 bp, Unknown
  R101_18m  MAG No. k141_94877
accttcgaccagatcgccaacgccaacaccgtttccatggatgccggcctcagccagttcgccttcgccaaggcctcctccaccttgtttaagaaggttttcagcaagtaagattccataagagtctttatcaaacgcctcggctgctgtgatgaaccggttcagcagccgaggcgttccatatatgctcctgtaacgggcagagacctccccgcccgcattacagaccgtccggcggccagtcgaaacaaatcgcggttacgcgccgaccaattcgagcatctgcggaatgctcttcttgccgaactcgacccgctgcgtgccgtcggcccgtgtgatgacgatgcagggcacgctcatcgcaccataatggtccctaagctcggggaagtgcgcaacatcgtaggcctcggcgcgcacggccgggttcagcgaggcgatgcgctgggaagcaagcacggtctccgggcacatcgtgcaggtgagcgagacgagaatcatgatattcagcgggcttgcaatggactttgcccgttcgatcagatcatcgcccaacggctgaccgggaccggccgcgttgtacaggcccagcacgaacgaattgaattcatggccggagggcacgccatggaaggcgaggccggtcggcttgccatccaccaccatgcgcacgcatggacgtgctgccggcaacacgtgttccacgtcgaataccgcacgccccgtatcatccttctcgtactcaccatcgaccactaccgatttcagcttgccatcggataacgcgaccatcgcatcaatgaatccccgcagttccgtggacagcggcgtatcatccagttccaaagcaagcgtgaccgggcgagacatacggttaaagaccacgttgagctgctgtttggtggtgtcggagaacaattcgccgggcttcctgacggcgtttgctgcgtcagcggcatcggtgctgcgtttgacgggtgccggtgcgggcgtggtgtcagccaacgaggcgacatctgtcttcgccgtggactgctcgtagacgcaagaggtcgggcgctgtggtatcaaaccggttttctcgctcatccgcttggcataccgttccaactccaccgcggcaatagcaccatcggcggtggcagtaacaacttgccgcaggtttttggcccgcagatcaccggccgcatacacgcccggcaccgatgtttcgagatagccgtgcgtgaccacgtaaccataatcgtccagttccaccacgccgcgcaccagattcgtggcgggcacatatcctgcgaacacgaacacgccgaacgtgccaccgtcagcaggtttccacgtttcggtctggccggtggcccggttcaggatcgtagcttcacgcaaaccgccttgaccggcagtgacgccttgcagctcgacttggtaacgcacgtcgatttttggattgtttttggctgcggcggccaccgtggcgtcgcaagtaaaatcctgttcccgcacgagaacggtgactttggaggcgtatgtggtcaggaacacggattcctcggctgctgcgaaccctcctccgaccaccagtacttccttgccggtgaagaattcgccatcgcaggtagcacagtaggccacaccgcggccagcgtattcggattccccttcgaaccctagtttgcgtgggctggcgccggtggcgatgagaataccgaaagcctttaagtcgccgcgtgaagtatgcacggttttaacgtcgccatgcacgtcgaggccgatggcttcggcggaaaggaattcagcgccgaagtcctgcgcctgctgacgcatggtctgggtaagctcacggccagtggtgcggccgacacccggatagttgaccacctcattggtgatggtgatctgtccgccgaaatcgtctttctcgagaatcagcacgcgatatcgggcgcgggccagatacaatcccgccgtcagaccagcgggaccgccgccgacaactatgacatcatacaaatcatttcgagacataatgaatcccttcgcgccttaatctgtctgttcaaggggttgcccggaggttctccggacaacccgtcggattagattgacaatccgtccgtcaaataacgatcacagttggccaacaagatcgaggctaggttcgatggtgtcctcgcccggagtccagttggcagggcagacctgatcgccatgttcgtggacgaactgagaggcttgcacacggcgtagtagttcttcggcattgcggccaacgttggaggagatgacttcataggccacgaccttgccttcggggctcacgatgaaatcaccgcgttcagccatgccatcgacctcgttgtaggtatcaagatctttggccaatagagcggtcgggtcagcaagcattggatattgaatcttggcgatcttttcattggcatcatgccatgccttgtgcacgaaatgggtatcgcaggagacggagtagatttcgcatccgatttccttgaacttggcgtagttgcgagccagatcctcaagctcagtggggcacacgaaagtgaaatcagccgggtagaagaaaaacagggaccagtggccgagcacatcagccttggtcacctcatggaactcgtcgttctggaacgcgttcaccttaaaatcggtcagttcatgctgcagaagagtcatcatcggtcctttcgctgattgtcaatcatctggcttctgccgttttctatcgtaacgtgattctctggaacccgcgcgggtataacgcgtgagactcatcacatcattaataacagtcacgctgacggaccatgcgatacaaaggtgccgcgaaataaaaaactcctgcatgccacggggagcaaggaccgggagacggatgaaaaggggacgcgagcggataaaaaaaaatgggggttcccggagcgtgacgctcgacgggaaccccctcaagtagaatgcggcggcgcgctactctcccacaccctctcgagtgcagtaccatcgccgcagccaggccttagcttccgggttcggaaagggaccgggcgtc

SEQ ID NO: 309 - DNA, 42183 bp, Unknown
  R101_18m  MAG No. k141_97892
gaccgccagattttggaccgtcgccgacacaaaacgccgatttgccgtcggcaatggtccaaaaactggccctataacgacgccaacgcggctcagcatcggcacatcgccatttcgtggcccactgccgacgctggcctcatgccacggcactcagcatcggtagagagacaaccattggcacagcgacgacaccacgaacctgcgacacggaaaaaaacaacataccgtcgacctactgccgtcttgtgcaaaatgtcttaagccgctcggccaagtcgccgactgagcctcttccatagggaccccaatccgttacccagtgtagatgcggtgcaacgccgaactcaactacgctgcgcgcatgcacctttatgcatagcaggcatggctgggcgtttggcgggagcggttttcggctcccctctctgaggggagcccctctccgcctgacaagagaaaaccccgactgttcgtgggaacagtcggggttgttgaagttcgctaggcgactaatcagccgaggatggcgagaatgtcgcgcgcgccgacgatgaggtagtcctcaccctcgtagtggacttcggtgccgccgtacttggagtacaacaccttgtcgccgaccttgacatccatcgggatgcgctcgcccttgtcgtcacgacggcccgggccaacggccaggacttcaccctgctgcggcttctccttggcgttgtccggaatatacagaccggaagcggtctgggtctgggcctcggcctgcttgacgatgatcttgtcttccaacggtgtgagcttaatcgacactgtgggtcacctcgtatctacttgtagttcgataatgccgcgccagaacgcctcaagaggctgacgatcacttgcgttgtccctttgcgctaggacacatcgtagcgcgattattagcactctgccaactcgagtgctaacgctgtgagagaaaatcggcgaatcgcaacgctcagttgccgcggcgggcaagaatggagtccaggcctgcgcccaacgaatcggtggtcgccgctggcgcttcgacgtcggcacgctcctcggattcgtggaatgcggctcgctgggcggcgtttgcagcctcgtcatcggcgtccgtagcggcgttcgtatcggcatcatcgcgctgctccgactcagtgtctacagcgtttccggcactgacagccttgcccgcatcggcggccttggcatcgtccgcggccttgacggctcgggcctcgtcaatcaacttttccgccactgcgggttcgacaggttccgccttggacacctgacgggtcgacttgatctccaagctttccggagcgttgtcggcgttatgttccccacccaaagtgaaggagatgagatcctgcgaggtggccatatcgaagacatccagtgctcgggcagggcgtacgctggccagttccgacgtagcgtcggcagcggcatcgtcgcgctcatcacgctcgtcacgcaccgtaagcgatggttcaactcgaggggcgacggacttatccgacttagtcgacttatccgtgcgagcggaggcatcgggcgcggcggaagattcactggtttcggcagcggacttacggtcagcggattcatcgaccatagcagacggttcggcggcaggcttattggcggcggactgtgcagtatcagacttctcagactgtttggcgtgctccgccgcggcctgatatgcggcggcggactgacgcaacgccttggccttggcctgctcaatctcggcatcgcgtaacgcgcggcgaatctgccgctgttccatgacctcggtggcagcatcctcaacatgctcggaaagctccttggcaggcgcagttacggccgcaaccggttcggccttgttcacacgcttgctgtccttggactcggcagacggtttcttggaccagcccgtaccgctatgagtccgctcgtagcggaccaccttgcgctcccattgccgggcctggcgtgaggcattggctcccagcaccagcaccagcagtaacagcacgaacggaataagagcaagcagcgggctgaaatgcagggggaacgatacggcaaacaccaacacggttatggcaagcaggcatacggcgagaatctgccggcggcggatggccgcgcggcgcagttcccgcacatgggcgatgtgctcaggtgtcagcctcgctgacggtgttgatgctggcattgctgcccctttcgccttatgcggcttgatgtctccgaatcgtctgccgttctctgcatcaacgatatgcagggaaggcgaataacgatcctgccggtgctcgtccacacgtttcatgccgttggccgtacgtacgggcagccatacaacgataataatcgccacaatcaccagcacgacgacagtgctcagtgactcataacccatagagtcaaggataggagacgtaccgacgaactggggctttccatccgggcgtgtcggagcggaattcttccggtcgacgcttatctggaaccggtggcggcgagtctggcagagaacccttgccccatatcttcagccaacagcgcaaatgttacgtggtcgcgccactggccattgacatacatataccgctcgcgcagtccctcatgatgggctccgaccttacgcactacagccaaagagcgcgcgttatccggaagaatggcgatttccagccgatgcaacgcgggcccgaatgggtctccgagtgcccaatcggcaagcatggccagtgccatcggcgcaaatccgtggccggcgtaccgttggtcaacccaatatccgaccacaccggtgcgcatggcaccatacgcgatggctcccaacgaaatctggccgacgatacgcatctggtattcgatggcgaaaatcacgccgacgccatgctgctcattacggcgctgtcgctgcacccattgattgaaggtgatggagccgccatgcatcgggtcgccggattcccaaggcgccagccagtcgttgttgcgccagcgcacttcgttccagccgtcctcatcgtccatggtcagggggcgcaggattatcgggaaaccgggatgggtgaggcgcggcggacggatctggtggtccagcttgaacgcctctttaatcgactggaaaactgacacggcctttattgtagccatatgaagggcttgcgccttcgcctcggccactttcgttttacggtggaaacactagattgtgcggtatgagcgaagcggacaatggcatgaatatcggcagcgaccacagcggcacggagaaaacagaaaagatggataaagcgacgctgcgccaccatatactgtctcggcgcaagcgcattccagcggaagaatgtggagcggccggtgaattgctggtgcgacggttcccggcacacatgattcaggatggttccacagtggcggcatatgtgtcgatgggttcggaaatcgaaacccggccactgttgcgatggctgttggctcatggctgccacgtgttggtgccacgattgggatctgggttggaaattggctggagtgtgctggattcattggaatccttgcgctcgatggatgcagtgggtggcgcgaacaatgccggtagctgcagctctcccagcaccgtccatcacagacccgatgagccaactggcgcagttctaccgcccgaagcgttggagaaggccgatctggtcatcgccccggctttggcagtggacccgcaaggcaatcgtctggggcgtggagccggctggtatgaccgggccttggctcgacgcaagcccgcgtgccccctgattgcggtgtgctggccgtgggaggtgttggacaccgatttgccggccgaaccacatgatgtgccggccgacggagtgctgacgccggggggataccggcggcttggcgaatcgggccggctgagttgaccggccggccaagatactcggcgcaagccagactgaccaaccagccacgcacactggccgatggaaccagagtggcaaaagcaggctggctagtaagaccgtaacgccaatgtgtcagggcggcgactaggatatgaacggttgcacggcatggtgttgcacgccatgcgcgagaaatatgactttgttggaggaatccgttgcctacctatcattaccgttgcaagaactgcggctatgacttcaccgaacagcagtcgttcaatgacgacccgattaccgtgtgccccaagtgctcgcaggagcaggtgcgcaaggtgtattccgccgtgccgattgagttcaagggtcacggattctaccgcaccgacaaatccggcaagtaaggtcggctccccgtttttcctctgtaaacgacggtgtcgacggcggtatgccgcggatattggcactacgggcactgtctgttgcacgggtttgaagcgttgtggataacttggcaagctagaaccacataggtcgattcagcttgcgcttacgaaaaacttcaggtcaccatggttgcatggtgaccttttcgtttattaagccgcctgcgcgcggttcattgcggcgacggcgcatggcggatgccttgcgccgactcactgctgcgttgtgcgtgggactcgcagtgttgtttgggcttgaagccgtattggccgtggtggagaccgagccgatggtggtggccgctcgctcgattcgacggggtgacattattctggccgccgacgttcagttggctgatatgccggtatctgcgataggcccatcttgggcgtgcaatattgaggatgtggtgggcaaggtggcgcaaatcgatatcgaagcagccgatcccatttccacgcatatggccagagatgcgcccgtagcaccgaccggcactacggtgattgaagtccgcttggccagtagcgtcgacgatgtattggccggcgatcaggtgagactggtttccgccgtcggttgcgaaggtgccgattgcacgctggccgagaacgccacggtgatgaatgtcgacaaaccggatacgactggcgcattgggaagcaacgaccggctggtgtcgttcgcaatgccgccggaggccgcggccaaggttatggagctgcaacaggccggagcgattatggccgttgtgcggtaggaagcggaatcggccttcggccgatgttgtgttttccgcagccggacggcggcggtaaacacaacatcagagcgcacagagtgcgccccaactcctactcgcgctcgttgaaaacagcccagtgtggaggcagttcgccgaggatgcgtttgtcgtcgtcggattgccgttgttggtcggtctgcatgtctccgggctcgagtttgacgccgtcagcgtcaaactgctcagtgcctttcatcaccacgcgcttgtgcttgcgcggtgtgcgccgtgtagccgagtattccgccatgattattcaacctcgcggtagatctcgccgatacggctgacgatacggtcgacttccttatcggggttcacgaaggcggcgacactccagacggtcatcacattccagcccaaggaaatgagatcctgtgccgacaaacgatgacgcctgcgcgtggattgcacggacataaagttcgcgtcatcggtctgcacggccaaggcaaacggcttgtccttcaatcccaccacgagcggaatcttcacgcccttgtcgaatccataatcaacagcagcgttcagtcctcgcgcgcgcaacctgtcggcgatatcgtcgaacagcacgttgccgcctgccgcaccacgcaacggaagcaccggacggtcgtcaagctgttcggcccacgtcaacatggtcttcaggaaccgaggaccggattggtgcagacgttcttcatccaaatcttcggaaccaaaggccgacacaatatccaaactgtggtccgccaatgccagggcatccagcaacagtccgcgaccgcctgtgctttcgagcgggccgaactgctgaagcagacgtccatgcgtggttttcgcatagcacatcgtcagaatcacgtcagtggcacgacctccggccacgtcacgcaaggaaaccagccgcacatggcgcaggaatcggcccatcgccttggatttgcctgccaacgacttcaattcggcacccaagcgtgtgcggaatgcgtcggtcaacatcacgaccacaagtcgatagctggaaggaaccacagcaaaaccggcggcacgttgcgtaatcagacgcaccacttcatcaatctccgactggctggattccaccagaccagaagacataaccggcacaccgctcgcttccacacggtggaatcgcacctcaccggcagccggctcggtggccacatcatagcgaacaggaccatatccctcggattcaaggaatgcggacaggcgcggcgcacggcgagacggggcagcatccacctcgatatgaggcaacgtgtcgatcagctgcttgacgctttcgctggttaccgtcgcgcagtgggcgatcaccaccacctgctgcacgcggccgatgatggacagcaactcgatagcgggaatgtgcgcgcacgcatcgagaatcgccacatcagccagcacacccggctcggtgagtgcggcgagcgtacccggcgaggccaccagaatcggcttggccgcggccagaatctccggatgatcacggcgaatcctgctcagcgacacactggcgcgccctgccagcacggtgtgcatctggttggcttcctgagtgcgggagaacagcatgtcgcacaggcggcgcatggattcctgcgacaccatcggtccgatggagcgcacgtgctccacatcgacctgtgcgaagcggtcggatgcggtctgcagcgcggcaccatcctggttggagatgatggcggaagaacgcacaatgtcctcaaacacggtggtccaccatgccagctgcacttcgccacgcacctgctccacgcccacccggcgagcgttgagatcggcgaccaactcgttcagaccggcagaagcgaattcctgctccagcaggcaacgctccggcaaggtgtccagtgccttgcgatcatccagcagtgctttcaggcgtgcttccaccttctcgaaatcggcggtttccagattgccgccagcgggtgtggtggaaagcacggtatccagcgcggtcatattgctgaccagcgcctcttgggtggagatgatctcgtcgagcttgctgggcagcaccggccaaccgccgtgaggcacgaactgatgccaccgctccccttgcttggcgactaccttcaacgcttcgtgcaagtcctcgacctgcgcgccgacgcgcagcagatccttggcttccttgacgtggcggcggcgctcccagaatcccatcgacgtgccctcggccttgcgctggctcttcggcttggtggcctcgatcatggagctgatgtctcgctcgaaaatctctggctggaacacgtcaagcactcgtcgcagattcttcaaaaccgtaacctgacgctcccactcgcgagtggtgggaggaaccgggaatccacaggtctgcacggtgcgtgccacctgctcacgggtggcgggcaggaagcgacgcagcaaatcgtccacgcgctggtaagcggttaccgcttgttcttcagtggtgatggacgccttgtaccatgcggtgtcttccgggccgatggtgtattcgccgagctcgccggcacgttccatcttgctgatccatgtgtcaatatcgttggcgatgctcagggcacttgactcgtcaagtcgaacgtgggtggcggggtgtgtcgggagcacggagatacgggccaggttctgaatggtctcgtatgcggacacattccacttatcgttgctcccgtgcaggtcgcccagatagcgggtcaagcgcgagcgcacgcccacgagttcgtcggccagctggtcgaatcgctgggtggcgactccgggctggaatccgactgcggcaatcagctgcttatcaagcgcggcgttggcgtgttcatcggatacatccagtacctgcgccttcatctcattggcggaggccgtctggatgaacagacgcttctgctcggccacgccgggcacgtacagcacggaacgaccattcatcaggcagcgcgatgcgatggccacagcctgctccgcggtgcccttcgggaaggtgccgtcgaccacgatgctatggccattggcagcaagtgacgcggcatatcgcaccgtattgtccacatcgccgacttcgtactcagcatgcgggtctacgtcgaaaggactgtattgcggaatattggcatctttgagcgcagtgcgggcggatttgtcgccggcaagcgcgtccaacagcacattgccggtggggccgttctccagctggtcgatgaactgtcggctttcgctgatcatctgcgacgaggggtccatgaagcatccgagcacaatctggcgctcgatggcgaagccggagatacgctccgatgcttcggacgaaatacgggcgaacatcgcggaagtttcgggagtgccactgtcatagctggcaccgtcaaacagggaatcctcatccaggaacaccccctgctcacgcaatgcattgacgaacgcggcgttcagggtcacgcgaccggtgaatcgaatggtggtcgacaagccatcatcctcgatcgtgacgctcaccgggtacaacagcaccggcagcgcgttgcccctccacgtggccacaccgaccacgagcgacaactccgccacgccggaaatcctgcgcttggcggcctggtcatccagtacgcgcccgatatggcgttcggcggccttaagcacacccgtgtcacggaacaacgaatccaaccgaacatggccggaagcgaacagctgggcgatgccggagggatgggcatgggtcatctccagcttcgcggccagttgattcacatcctcgagcggcgatggcggctgcatgctgcggtattggtcacgccagcgacggatgcgattcagaccttccgtgagattctggttctgagtctggctctgggtcatctctcgactcactttccaaccgcttcgcggtattcctgatagcccttgttgtgagacagggcttcgtcaatatcggcctcgccacgggcggcgagccaagaatacatgtcgtcgtacaggtacggattcatggcgaggaacgccagtaattcgggatgacgggcgacttcgaactgaacgttgaaatcttgcgtggtttttgcctcgtcagaggtcaggccatcgacttcgactgccggctcctgtgctttcagctcgcccttggccacacgctcgaacaccgagccgggctcgaagaccggagtgtgtacgcccgtggagtagatatcagacgcttcatacgcttcggagaccgactgctgggcggtttcggtttcggtcgccagctgctgatcctcgggtgcgtcggttgccggttgagcggtttcaggctgggcggcttcggactgagtgccttcagaatgctgtgcaacagcgtccaccggctgagaatcgtcggtattcggagcggactgaacgttttcggctgacttgcttgcgccagccaccacatcggattcaacaaccgccgccgacgccactgccggctcgcttgtgctgggagcgtgcttaacaacggcatgggcgatggcatctaccgggacaataccggagatcctgctgtgcttggatgcgggcgttacagtcgtcgactcaggttcggtctgctgcttcggcagtaccacggagtccatggcctgctggtttttgcgttcggtctcctgctcggcatgctgggccaacgcatccgcgaacaggtcacggggtatggccggctcatcgtttttcgtcactggctgcgtgatattcagcgagccaagttcaagctcgtcgaccttgcgtcgaacattatccgcgctgaagatggcggtcggctcgccggcccgcaaatcaagaatatcgtcgacagacatatccgccgcatccggctcctgcggtgcttcgtgaaccgcatagccaaacaaatcaggcaccttaaggtcgagtggctttgccactggatcgtcgatacgaatgaagtccgcaggcacatcaccgaactgcatgcgcatgggagacgtcggcaacaggaactcgacattggccggcaagcgcaacaaatcaccattttcccgcaccacatacgatccattggtcgatccaagatcgcggaccgaagccgtaccattgctttttaccgtgaacatggcgtgccgtttggacatcgatttggtctgatcggcgacgtcaaggcgggtgttgccatcatcggcaagggggcgtaacggcttacggccgatttccacgcactcccccggcttgacgctgatccggtcgacaccgttgatcttcaccgtccactcgctcaccgtgaccgccttcctggacacactatttgaccacactacgtgccattgtgtcatcttttaccggcttttggcggattactgggcacagaattgacaactttcgctcattgccagctttgtgattccacgccggatcgcgttctccgcctcgccctcgtcaactagtctactcagtatgcggaaaccccgcagcctgaaacacaggtgcggggttcctcgaaaagctgtgattgcggcttatgccgcacaaatcacttgagctcgacggaggcaccagcctcttccagctgagccttggccttctcggcatcttccttcttggccttctcgaggacggccttcggagcgccgtcgacgagagccttggcctcggccaggccgagggaggtgatggcgcggacagccttgatgacctggatcttcttgtcgccgacggcggagaggatgacgtcgaactcatccttctcttcctcagccggagcagcagcgccagcaacagcggcaacagcggcaaccggagcggcagcctcgacgtcgaacttctcctcgaaggccttcacgaactcggagagctcgaccagggtcatctcgccgaaggcttccagcagctcatcgttggtgtacttagccattatggcttcctttcaatcttggcggcggacgaagtggtagatccgctgcctaataaaccttattgtttaaattatcgaagcgactgattcatgccgtgagggcgtaaatcaggcagccttctcctgcttttcgcgcagggcgtcgatcgtacgcacagccttggtaggcagggcgttgaacaggtacgcggccttggccatcgatgccttgatgtcgccggcgaattcggcaagcagctgcgggcgggacttgaggtctgccagcttcttggcgccctcggcatcgtagacagtgccgtcagcggcggcacccttgatgacaagagccttgttgtccttggcgaagtcacggatgaccttcgcagcctcgatgaagtcgcccttcacgaaggtgatggcggtcgggccggagagaatctcgtcgagaccctcgatgcccgcttccttggcggcgatgcgtgccagcgtgttctttgccacggtgtaggaagtatcgcggcctagcttttcacgcagatcggaaatctgcggaacggtaagcccgcggtactcggtcaggtagacggcgtcagcgttacggaattcttccgtaagctgagcgactaccgcttccttttcgggcctcttcatggcgttccttcctaagtcggccgttgacttggagttcggaactttcggctgggcaacaaaaaagccctgcgcacaggcagagcaatataatctcgcgaagcgaccttcgccggcccttgacgggcttatatctctcaacctgcgctggcttggcgaaccaaacttcggaaatgcactcgcgcgcacttcaaccaacggtctgtggtttacggatgattagattacggatggtcagcgacattgcagaattcgggcgtgtcgcaaggcattacaacgtggcggcgtactgggctacggacgcggtgacttccttcagatagtcgagcgagcgacgccagtggccgggcacctcgatcgaatggttggcatccgggtattcgtgcacgtgcggggtgagcgcgttggcgcgggctcgatcgtagaacgggtcggcggtgccggcgcagatcagcggtgccgggccggagtatcgggagctggcggcgtgcgactggtcggccagttctgcgcggatgatcgcccttgcttcggccacgctcggagcctcggattcggcgacgatatcatcgccgacagccggcaccggaatcacccgggcggatggatcgaagtcggcgtgatgcagcaccggggtcagcagcacgaacggcagaccgtagtgtgaggccacatgtgggtaggtcatcgtcgtcagcgacttgccgatcagcaacaggcgagggccggacggggtgtcggaatcacggttcggcgagccagctgcgccatcggccagcacggtagcagaatcatcgacggcaacgccatccccggaatcaccggctttacccgcgccggactcgcgcgcggcggccatccagccgtcaatcgcctgattgaggaccggaatcaccgtggacaggtcgtcggaagcgttgcgtacgttcatgcggtcgattcgccagccggcctcgaccagagcctgggccgaccagtagagcagcggacggtcgcagttgtagccggtgccaggcatcagcagtacgcggccgtactcctgaccgggcttgacgacattcttcttccaagaggtgatgctgacttcgacggccggtttcatcgcgcgccttccttccacgggtgtgccctgcgtgtccctgagttgttccgaattattctggcagtcagtctactcccggacccgttcacgttacctccacaagctataatcggccacggttctgattgggtgcgcaacacctgacgcgcgttgggcaggccgatcagggcgagtcgcaattctcgccggggccagccgcagcattatgcgcgcggtgcgcagccccgcataaaaccaaggaagtagagagtaaatggagaagttcttccatttgaaggaaaacggcacgaccgtctcgactgagattctggccggcctgatcacgttcttcgcgatggcctacatcatcgtcgtcaacccgcagatcctgtcgcagacgggtatgccgtggggcggcgtgttcctggccaccatcatcgcggccatcatcggcaccctggtcatgggcctgttcgccaatgtgccgtacgcccaggccgccggcatgggcctcaacgcgttcttcacctacaccgtgtgcttcggcctcggcttcagctggcagcagaccatgtgcatggtgttcctgtgcggcctgatcaacatcctcatcaccgtcaccaagatccgcaagatgatcatcatggccatcccggagtccctgcaacacgccatcggcggcggcatcggcctgttcgtggcctatgtgggcatgctgaacgtcggactgatcaagttcacccccggcgacccgaaagccgcggccaagggaggcgccgtggcggcgaccccgagtctggccgacttcaacgacaaggtgctgtgggtcttcctgatcggcctcgtactggccattgtgttcaccgtgatgaaggttaagggcggcatgctgctggccatcgccatcaccaccgtgatcggcatcccgttcggcgttaccacctggtccaactcgcagtccatcagcgaaaccttctcccagttgccgcagaccttcggcgcgatcttctcagctgagggcttcccggcgctgttctccgacgtctccaagctgcctctggtcatcgtgaccatcttcgccttctccatgtccgatacgttcgacaccctgggcactttcatcggcaccggccgccgcaccggcatcttctccgccgaggatgagaaggctctggagaacggccacggcttctcctccaagatggacaaggccctgttcgccgactccatcgccacctccattggcgctatctgcggcacctcgaacaccaccacctacgtcgagtcttccgccggcatcgccgcaggcggccgcaccggcctgacctccgtggttgtggcgatctgcttcgccctgtccgcgttcctggccccggtcgtctccgccgtgccgtccgccgcaaccgccggcgtgctggtgatcgtcggctgcatgatggccgcttccctgaaggaagtcaagtgggacgacatcgccgaagccatcccggcgttcttcgcagccgtgttcatggccttctcctactccatctcctacggcatcgccggcggcttcatcatgtactgcatcgtgaagacctgcaagggcaaggccaaggaggtccatccgatactctggatcgtgtccgcgctgttcattctggacttcgtgtgcatggcgattctgtaacgctgattgacaacggattagcctttaaggattaatccgccgccatacggcataaaggccgggctctcacaagggcccggcctttgttgttgccacagtgatcaacgcccatgagtaccttcgatgatcatccgccattcaatcaacggctggccatgactcggacatggcgcggcacggcaagcggattttgctgttgggcataacaacagacgagagaatagatccggtcgtgagcaacaggataggtgccatgcggtgccgtgtacaaactgttgtcagttgtcaacgctttttagcgtggctccaatcatcttaatggctgttttccgccattcttgatgcatgagaatagttgtcaactgacaactgaatgtacatggcagcagcacgagtgccctattcaacatcgaaatatgtagcgcgaagaagccgaaaaaccaaaaggcttctataccgaatgaaacggtatagaagccttttggtttgcgattaagctcttctcacccgagagaagctagagaacgatcagtcctcgaatgccgaaccgttaagcgggaagccctgcgggcttcccgtaggtgggggggcggctatgccgcgaccgatccgtgagagggctttagtcctcgaacggatcaaagtcgcgacggacgcggcgacgcgggcgctcagtgcgctcttcgcggtcggcgcggtagtcgtcgtagttgtcgtcggtggcatagcgcgggttgcggtccgagccacggccacggccgccacggaaaccgccacggcggtcatcacgatcgccacggtcatcgcgatcggaagagcgacggcgacgcggacgatcatcatcacgggagtcgcgagcatcacggtcatcgcgatcgtcgaagtcacggtcggcagaacgacggcgacgcggacgatcatcatcgcgatcatcgcgatcgaagtcacggtcatcggagcgacggcgacgcggacggtcgtcgtaatcatcctcgaagtcatcggagcgacggcgacgcggacggtcgtcacgatcgtcgaagtcacggtcatcgcgatcggagcgacggccacggctgccacggcgatcgtcacggtcaccacggccacggccaccaccacggcggtcatcacggtcgccacggctcgggcgggcattgttctcctgatcctcgaaaccggggatggccagggagatcttgccgcgatcatcgacgccctgaacgatcacctcaacggtgtcgccttccttgagcacgtcttcgacggcgtcgatacgctcgccgttggccaggttgcggatctgggagatgtgcagcaggccgtcggtgccgggggtgaggttcacgaaagcgccgaacgacgtggtcttgacgaccttgccgttgtaggtttcgccggcctcgggcacgtgcgggttggcgatggaatcgatgatggacttggccttcttagcggcctcgccaccctcggaggagatgaagacggtaccgtcatcctcgatggcaatttcagcgccggtatcttcctgaatctggttgatcatcttgcccttcgggccgatgacctcgccgatcttctcgaccggaacggtggtggtgatgatgcgcggagcgaactcgctcatctcagccgggccgtcgatgcactcgttgatgacctcgagaatcgtggcgcgggcttccttggcctgctgcagagcggcggccaggatgtcggcggggatgccgtcgagcttggtgtcgagctgcagggcagtgatgaactcggaagtaccggccaccttgaagtccatgtcgccgaaggcatcctcggcacccaggatatcggtgagggtcttgaagatgtgcttgccatcaacgtcgccggacacgaggcccatggcgatgccggcaaccggggccttcagcggcacgccggcagccaaaaggctcagcgtggaggcgcacacggaacccatcgaagtggaaccgttggaaccgatggcctcggagacctggcggatggcgtaggggaactcttcacggctcggcagcaccggcacgagagccttctcagcgagggcgccgtggccgatttcgcggcgcttcggggagccgacgcggccggtctcaccagtggagtacggcggcatctcgtagttgtgcatgtagcgcttggactgcggaccggacagcgcgtcgatctgctgctccatcttgagcatgttcagggtggtgacgcccagaatctgggtctcgccacgctggaacagggcggaaccgtgcacgcgaggcacaatgtccacctcggcggacagggtgcggatgtcgcgcaggccacggccgtcgatgcggtagtcctcggtcaggatgcggcgacgcacgatctggcgctgcagctccttgaaggcgttgcccagctccttgtccttctcggcgtcgtccatgtcggtgaactcgtccgcgagcacctcgcgcacgtgctccttgatctcatggatgcgatcctgacgcggcagcttctcggcgatggagagtgcctcgttcagatcctgatgggcgatctcgtcgatacgggcatacagctcgtcggtgtactccgggaagagctggaattccttggtgtccttggcggcgatcttcttgagctcgtcctgagcctcgcagatcaccttgatgaacggcttggcggcttcaagaccaccggccacgacctcctcatcgggcttggtctgaccctcgtcatagatgaggtgccaggcgttcttgccggcacccgcctcgatcatggcgatggcgacgtcaccgttctcgaccacacggccggcgaccacgatctcgaacacggcgcgctcacgctcgctccaacgcgggaaggcgacccactggccgtcgatcaacgccagacgcacaccggacaccgggccttcgaacggcaggccggagatcatggtggaggcggaggcggcgttcagggcgatgacatcgtaagcgtcatcagggttcacggcgagcacggtctcgacgacctgcacttcgttgcgcagggtgtgcgggaacagcggacgcagcgggcggtcgatgatacggcaggcgaggatggcctcggagctcgggcggccttcacgacggaagaacgagcccgggatcttgccggcagcgtacatcttctcttcaacatcgacggtcagcgggaagaagtcgtagttctccttcgggctggaaccggcggtggtggtggacagaatcatggaatcgtcgtcgaggtaggcggccacggcgccatcggcctgctgggcgagacggccggtctcaaagcgcagcgtgcgcttgccgaacgatccattgtcgatcacggcctcaacggccttgatttcgggaccctccatagggttcctccttctttaattttctaattattcctacatactgtgctgcggtttggcgactcgcttgaaccgcaactgtcctcttcagcggacgtcacataccttgtttcgactggccccttggccgccgttcctcgtgtcaaccccttcattcgggttctcttgtcggccttacctgctggcctatcctctaaccctcttgccgttgttgccgttggctggcgatatgtaaaacgcccgagcaccatcctaggtactcgggcggaagtcttcaattatcgacgcagacccagacgctcgatgagggaacggtaacggttgatgtcaacgcgcttgaggtagtcaagcaggcgacgacggtcaccgatcatcagctgcataccacgacgggagtggtggtcgtgcttgtgctccttgaggtgctcggtcaggtcggcgatacgcttggacagcagagccacctggacctcgggggaaccggtgtcaccttcgtgcgtcgcgtactcgttgataatctgggtcttctcgtcagccgtcagtgccacggcgtcctccttattgtgtcgttgcgcggtgtttcgtgcaggttcgctcgaaacgctctctatccgcgggcgaaattacgccaaatgaaaactatacggcaggggccggactggggcacacgcgctcacacagtggtgagcaatccgccaaacaacaccacgagcagggcgatggtttcaatcacgaagtacagaatgaagctcgcccagcttttggtcagtacgttcagtggtgaggtcttccggataatcaccagcagacccacgaacatcagggcatatacggcgatgccgatcgccgcacccataatgcccagattcgcggcattcgccaggctggcctgcttaccgtagaccacgtacgtggaataccagaaattgagattgagcatgctgagtcccgcgatgaactgctcgccggccaacccgatcacgaacacgatcagccacggccaggacggcgagacgaccaccgccatcgccaatccgacgtacgcaatcaccacggtcacccaaccgaccagtgcgatgccttgcggagacactcccccgagcacggccacaatggagtcagtattatttaccgccaacgaacggccgaaccagtacggcgcaacgatggcgcacagtacggcaagaataatcagcgcccaacgcaacggatgcgaacgacggcgctcgatatccgccagagacaaatcggtctcgggtatggaagcctcggggtgcttggaaacctcgacggtctctactttgccgcctacgatttccgtcgcctcgttaggttcttgctcgttggattcctgctccatgcaccgcctcgccgattacctgctcattgccgattattgcgatgcccatcttagcgtgcgtgttgggcaagtctccgatacgatcgattactcgccatggccctcaccatgatcctcgctacgattctccttatccgaatccgcgggagcaacgtcattattgcccgcagacaagccgctgttggctaattcgtgctactgccctatatcctgattttcggtgttttcagggtatagaaaaatccccgtagagcatactatgctctgcttttgatgattatcgaaacatagaacatgctttggctcaatcgtcatatgcccgaagtggcaacaattacaagttatcccgcaccatcgcaacgacatcatgattgattttgttgatgccggggtcggcaagcatctcatcaagagtcatccagcggcagtccttggcaccaacatggaactcagtggaacgccaggcgtcaggcattaccgttacgctagcgcggtatagcgtgtattcgtaataacgaatctctccatcatgctccgtggatggcttctcagaatccttcacacaaatgtgagacagagtaaagtctttagcaggaattccgaattcatcggcaaaatacgtcgtcagctgacgaacatcctcatcagtactgcttgcggttgcatgattagggaaaaagtcgcatccccaacctaaatcacgatacagaagatatcggttagcgtctttcaccgcaatgatcgagcttcttcgttcggttctatccatgttggcgatatcctcatacagtgttatggcatcatacttatttctgcaagcagtaatcaaactccatactccatagaatatgaagataatgctcaatgcaaggagcaatccttgaaacatttggtcgagtccagatgtgagagcagcaggaatgtaaaacaatccttcgatgatgatgacgaccccattggcaatcggcccgaaaccaatctgctctttgtgctcaaagagcttggcacgcagttcagcttcgtcgattctcaacaccatgagtactaatactactcggggtagctcacccttccggtattcccaattagatacaccaacatataaatagtggagcggatgacgggaatcgaacccgcgtaatcagtttggaagactgaggctctaccattgagctacatccgcgttaagcgtcgcttttggcgacttgagttattatacatatttcttcggggatggcaaacgcgtgtggctgcagcaggaccagccaatctagttgatggattgtggctttgccgaggactcccctcagccgcctacggcgacagctcccttcagagaggggagctggaaaccgtcgaaatcacaaatggatgagctgggactcgtatggttggaggtcggcgcccatcgcattcagaatcacgaaccagcagttttcgggcagcgagtcgagcttgtcgatccggttcttgagcaggcgcacgtcgcggccggtgagcgcgctccacaggttaaccatgatggagacgttgtacagcatgtagcactcgggggcctcgggcgctattccacagaaatcgtcaccaccgcggaggcaatcggaccatcgtggctcagggaaatatggatatgcggcatcgaccccgcaccgagagccgagcgctgcgccgaacgcgcattccgccgctcctgcatcactgcataaggcccgttatcggaagcaggggaataagcagaggaatagcgagcgccggcagccgaattcgcgtaatcagtttggaagactgacgccgcccccttacccagagacacatgcggcacaccacgggaatcgcccaagatctcgatttcaggccacgggaaattatcaggcgtgaacggatagggggcatcgccaagataatcgcaccaggctttgaggaacgcctccttgcccgcccatttggcggccagatggacggcctccccgtcattcttctggcgcgcgcggtcggatgcctgccgcacctcacgcacggagaacagcgcacgcatgcgagaccccggctccgccaactgttcggcgaatgcggccacatccaccacgtcatgccccaaaccacaagtattcatgcttcctattgtgtaccgcttcgcgcgtaatctctacacctcatcagaattggggcctgatttccatttcagggggaaaagattcactatgctggatgacctcgcgcaataccgcaaacatcttgggctggctgcctagccgtccaaaaaaacatccgcgccccgccccggaggtctatctccgtttcgaggggcggattttgaccgttccggaggtctacttccgtttcaagggtctggtcatcctccataccacgagtatccgcagcataacgccaacgccattccgccgtttttacgccttgtctacttgggtaacagccccttgaaacggaagtagacctccggcgaatgccaaatcagccccttgaaacgcagaaagcccactccgagggaggggctttcgtatgttctgcatatttctctcactgagtttgtgccagcgagaaagctccaggggaaactcccctcatccgcttcgcgggagctcccctcaaagaggggagccgagatccggtgcgctactggctcccctcaactgaggggagccagaggaatcaggcctcgtagtagccgtcggcaccgaggcgggcgtccgggttgaggagcatcgccttttcgacctcgtggtggtcgtagccacggtgatcctcgcggaagcgacggttgtcgatcggctcgtagagcgcggcgcgacccatcatgccttcctcaaggtgacgctggccggcagccaggcgggcgttggcacgctcacgccaagcttccagtgcggcctcaccatcggccttggccacggccgcttcgaaggcacccggatgaaccagggccacgaagccggaaacatgtccgaagccgagcgaggtggccagaccggccttgaccgggcgaccagcggtctcgcgaccgaactcgtcctcgccaccgccgatgcgcaggggcttcctaacccagaccatgtggtcgtcgcgctggagcttcggatccacgcaatcgagcgctgcgttcgccggaatcacgccggacttgaacagctgcgtcagaccgttgacctggaagatgcaggcaccacccttggcgtggccggtaagcgtcttctgcgagatcacgaacagcgggttgccgtcggtgcggccgatggcgtgggccagcgtgttgtgcagctcggattcgttcgggtcgttggcgttggtggacgtgtcgtgcttggagaccacggcgatgtcgtcggctgagacgccgagcttagccaggtcgtgcacgagcttggagtccttgccaccgaggccggcagccagggcaccgaggcccggagccgggatcgaggtgtgggcaccatccgcgtaggagtggatgaagccgaccacggccgcgaccggcaggccgagcttttcggcgatgtcaccgcgggtcacgaggatcgtgccgccgccctgggattccaggaagccgccacggcgacgatcgttcgcgcggctgaagaagcgcgcgtcgatgcccttgccgtacatttcctccgagttggcggtggcgttcatgttgccgaagccgatcacggattccacgccgatgtcgtcgatcgcgccggtgaccacgaaatcggccttgcctagggcgatcttgtcgacgccctcttcaagggagacggccgcggtggcgcaggcggagacgggctggatcatgttgccgtaaccgccgatgtaggactgcatcacgtgagccgcgaccacattcggcagggcctcctgcaggatgtctgtcgggatctcgtggttgaggaagcggtcgaggtacagcttgcgcatcgacatcatgccgccaaagccggtgccctgggtcgaagccaccagcgaggggtggatggactcgaggatttcggccggggtgaagccggcgcccaggtaggcgtccacagtggtgacgatgttccacagggcgatcttgtcgacgtcgccgaccatcgaggcgggaatgccccatcgggtcgggtcgaagcccttcgggaactggccgccgactgtgcgggtcatggtggcgcggcgcggcacgcggatcatcgagccggcgtggcgggtcacgttccattcgccggattcctcatccggggcgatggtggtgtgcgcctcgtccaacttgacgtattcggcggcgacttcgcgggtgggcacagagaaggtgacgtcgtggtcgaggaagacctcggcttcctcttcgtcagcaccgtccttgtagtcgttgcccatgccttcctcgaacgggcggatgccggagcgggccacgacctcgtcgtggtagcgctcggcgatgtcctcttcgggcacgaggttgccgtcggtgtcgtaccagccgggcttcgggctgtcggcccaagtcagcagacccatgttccacgcaagttcgagcactgcgccggcgctcaggtcgacagtgccgtccgagtggatgccgagctcggcctgggtgcgcgtacgaccggagccccacgggcccagctcaccgacggaaacgatgacgatttcgtcttccggcttggcggtgacgttggtccagtcgttgaggtcgaccgaagcctgcttggtgatgatcggggtgggcagcgccttgatttgctgcccacgcgaggagtcggacagtccagtggactgtccggcgacggagccatccgtttcctgagacgaggccgcagcagcttccttctccgcatcggccatggcctccgcgcgcaacgccttgatgtcgatgggctcggagccgaggccaccggtcaggtccacatcgagcggggccttgagggcctgctcgcgcgattcggcagtgcacaggtcgagcagcttggccgcgatctgcgcggtggagtaggtgtggatgccgtgacgctcaacgacggcgaccagcgggtcgttgccgcccatcaggccggtgccacgcacccagccgatcttcgggtgagcgaaggtgacgcggctcgaccacaccttttcagcgcgggcacggttgacgatggcgtcaaaggcgctcttgacttcgccgtaggcaccgtcgccgccgaatacgccgcggttcggggaaccgggcagcaccacgtggagcttgtgctgcacgttggtgtcggcaccgatgtggctgaagccggcgatggcgcgttccacgccccacagcatcagtcgggcctgtgattcgaacaggtcgccggagtcggcgagcgtgccatggaccggcggagcggcgaacgggaagaacagggtcggctcccacgcgggcttcagaatcgtggtggtggcaccggaggtcttcttctgctcgtggcccacccagtcgaccagagcgtcgacgtcgcggtagctggagaggttggccggaaccagccacagcttggcgttgccggtggcgtgctcgcggtaggcctgcttggcccaagccttgatggacggcttgaagctgtgcgaggtggccaccacagtggcaccgcctgcgagcaggccttcgaccacctgagcggcaatcgagttcgggctcacgccggtgacgatggcgatatcattcgcgtaacgggaggcgttcttgttggaagcgacctgttcgagggcctcggagccggccttctggaaggcggccttaagctcctcgctctccgactcgttggcgaaccactgggcttcggcggcgatggtcttgccaaggccgatgaagctgccgttcaaggcggcggggtcgttgccgtagtaggcgcgggcgaggtcttcacgggcggaggcccaccggtcatcgaagaggatggccttgttggcgtcgaagcgcggagcgacctgcttggtccagtcggagccaagttcggcttcgaccgcggccacgacggcggcgttctcgtcctcggattcttccggagccggagcggccacgccgagctcgttcagcacgaagcgggcggtggcggcgagcacgccgttggaaccggtgaccttctcggcgaaggcgtcgagcgcggcggaatcgaccacagcaccgccagcggcaccaccggcggacggcagagccacggcaacgcccttaagctgggcgacgacctcaacggccgcatcgatcagcttgtcggcttccggcttgttctgcacggcggcggtgggcagcttagccaggtcgccgccacgggagctggcaccctcgcgagtgtcgagcagcagtgcggcgagcacgctggccacccagccttcgccgagctgccatacgttggtcacgcggtcgcggatgtactgctgtttgacgccggcggcaccgaacagcgagcgcagacgatcgcgcagcgcctcggagagcacggcaccgaacggcttgtagttcggggcggccttgttgacgatttgggcgagcttgtcgagcgtcgcttcagcagcaccgtccacgctggcgactcccagctcggagctgatgtccatgagcagctggttgcggcgagaagagacaccgttggtcagggtgtcggtggtgtcgttgctgccgatctggtcgaggcgcaccttggcggagtaggccatgagtacgccgatggcatcggaagccttgaagggcaggtcggcgacggcggcaccagacggtgcgccagcagcggcctgccctgattgcaggccgcgcgaggaggcggacagtccagtggactgtccggcgacggagccatccgttgtctgagcagcctcagtcgcggcatttgccggagcagcacccgatccgagcttggcgacggcggaaccaccggcaggagcggtttcgaccggggccgaggccgcagcctcttccggctcgtcgtcgggaaccagcgaatcggtgtcggtcatgtagacgcggccttcatcgcggccgacgttgtagacgaccgtatcgttgccggcgaactcgggcagacgtagggtcttggtaccgaggttggccagggtcggggcgttgccgaggccgacttcgacgtattcttccacgccgaggccgccctgttcgcgctgaccgaagagcagcgcctgggtttcaatccaacgcaccggggaggcgaactgccaggagagcagttcggtcaagagcagacggccgagcttctggtcgtcggcggcgtaggaatcccacacggccgggtcgtcgagcgcggccttgatgcgctcggacggcacgacttcgaggatcttggcggcgaattccttggtcatctcgaacggggtggccaccaggttcgggatgtagcggtccaccagacggccacggtagtcgatgtaagcaggaagcagcgcgtcgagcttgtcgcggaattccggcacgcccttgcgcagcagcgtggagtggaacggcacatcgatgccgggcaccagcatgaacgcgggcttgccaccgaatgcggccacgcggcgggcggaatcggccttcagggctttgagtccggcgatcgtaccggcgatggcgtactgctggccggcgaggttgtagttcacgatctccaggaattcgccggacgccttggccacggattccacgtattccttgacgtgagcgtcgtccacaccgaactggttcgggcgcagggcacccatgcggtagttggagcgaccctgtgcgtcacgctcgatgaggtggtgcatggtggaaccacggtggaacacgagctccagcacggtttccagcggaatcacgtcggcgaacgcggacaacgcgttgtattcgccgagcgagtggccggcgaagtatgcaggccagatgtcggcgccggcttcgcgcagacgggcggtctgggcaaaagcaaccgtcgcgagcgccacctgcgtgaactgcgtcaggttgagcaggccttcggggtgacggtaggtcacgccgttggcggtgagttccttcgggttgtcacgcacgaggcccaggatcgagaagccgagcttggagcgggtgagcttgtcggcgcgctcccacacgtcgcgggcggcggcggacttggcgcgctcgtccagaaccatgccctgcttctggatgccctggccggggtagacgaaggcggcgcgcggcgcacggaccagtgcggtgccgcgggagacgagctggccgtcgatacggcaggtgacttcgagggtcatgccgccgtggcgcactttgccgacgcgctcgacggagatttcgacggtgtcgtcaagctggaccatgccgtacatgttgtaggtccagccggcaatctcgtagtgggcacccttctcgtcggtcgcctgcacggcgtgctgggcggtggcggacagccacatgccgtgcacgagcggggcggccaggccggagatgcgagcgccacgagtggaggtgtggatcgggttgaagtcgccggaagtgcgggcgaaggcggtcatgtcgtgtggggcgacgaccttcacgcggcgcagcagacggcgcggagtggcctgcactacttgcaggccgcgcgaggaggcggacagtccagtggactgtccggcgacggagccatccgcttccttattcaggagggcaccaccatactcgggggcgtctgcaggcaaagcatcggagtagacgcggccgcggatcgcgaaacgctcggtttcgcgggcaagcggcgtgccgtcggcggcggtgtgggtcacgtggatggtgaccacgcggccggaggcggactcgaagtaatcctcggcccaagacttcagggtgatggtttcgccggtgtgcttgagcaggtcctcctcgttcacctcaagttcgatgaggtggtcgaggtggacggcattgagcaggccttcaatcaccgggtagcccttgacgtacacggagccgagcgccgtgtagattgccggccaggcagggccgaccagcgcatcgggggcgatgcggctgggctgcagggtggtcggcagagcggcgccagtggccgcttcgtggtcgaagccgaggttggcggatagggtgtaggttgcggttgcggtaccgaacggacgctcgtcagaggtcttgtcgtcaagcttcggcatctcggtgagcttgtcgccggtgatggcggtgttgccgatgcctgcggtggcggcgagcatcgcgtagacgtccggaatcaggcgttcgcggtccacgaccggcacacggccaggctcggtgccttccacgatgagcgggatgacgatatcgcgcacggcgtgcttggaggtgccgcagtccgggtcgttgtcccagtaggtgtcgaggtggatgtccagatcgtacttgccggccgcggcgtcaaacgcgcggatttcgtagtactggtcgcccagggcggtgccgtaggccgggttgtcggtgatgtggccgacccaggagatgttcggggacttgcggatgaagtcttcggcgctggtggcctcgccaagtgcggcgaaatcgtcgttctcagcggcatcggcggcttgctgttcgtcctgcacgcgcttgatggcggcggtttcgaagcggccgaggatgtcggcgatcggctcgtcgatggtggtgatgccggcaacggagatcgggccggggatggcacgcacggaatcggcggagtagcgctggtcttcggactgccagagctggtcctgaccccaccaacgcagcaggtcgttgtcgatgacgggtacgaacggcatgggcttggggtattcgcgcacgagcaccgggaaccaagccacgtcggtcgggaccaccttgagttcggcggtctgcgggtaggccagtgcgagcttttcgagcgcgggggccgggtcggcgagaatgtcgtcgtgggtcagcaggccagcggcagctgcctcttcagcagaaacgccatcagcggcgaacaacttggaggtgaattcgccggaatccgtgtcgttcacacgggcttcgatgcgctgcagcaggtgctggaagcggtcggcgtaagtcgggtcgacccacgggaaggcgagttcggcgaagcgctgcgcccactcaaggtaggtcatggaggccaggtcgccgaagtaaggcttggcggtcttgttcagggcttcgatgatttccttgcggcgggagtcgagctcttcggggtgcttcatgacgcgcacgagcagacggccgcattcggcggagtcgttctcgagctcgtaaatgtcggcgtgcaggtggctcaggccggaggacatgccaccgacggacttgccggacggcacccagtgggcggcctgcggggcgaacacgtcgtcggacttggcgtcggccggaataccgggcgtcttgacgagcagctgcttgacttcggggctggtgtgagcctccttggcggtcatcgcggcggtaccgataagcacgccgtcgaccggcatgtcgggcaggccgtaggcgtgggcccactggccggaaatgtagtcggccgcgcgttcgggggtgccgatgccgccgccggcgaccagcacgaggttgtcgcaggcgcgcacttcggcgtaggtggcggcaagcaggtcgtccagcgcttcccagctgtggtggccgccggcttcaccgccctcgacctgaaccatgatggtggtgggggacacggccttggcgatgcgcacgacctggcgaatctggtccacggtgccgggcttgaaactcacgtacggcagaccgtccgcctgcagcgactcgatcagggccacggcttcgtccagctcggggatgccggcggagacgaccacgccgtcgatcggcgcgccggaagcacgcttcttgggcacgatgcgggaggagccgaactgcaggttccacaggtaacggtccatgaacatcgcgttgaattcgaccgtgcggccttcctccagctcgtcttcgagggcggcgatgtggcggtcgaacacttcggcggtcacctggccgccgccggcgagctcggcccagtagccggcgttggccgcggcggccacgatttccggttccacggtggtgggggtcatgccgggcagcagtaccggcggcttgccggtgagcttggagaacttggtgaccagcttggcgccggccggggtgttgatgacgcgcggggcgaatgccttccagttctgggtgcgctcaggctcgctttccagcgtggagagcgtggagcgctcggccagcgtggtggcttcgaccacgccgatgccggtgccttgcaccacattgccgatcagcttgccgagcgtgttgccggggccgaggtccacgatccacagcttggacgggtcggcggcgtcgaacagcgccttgacgcgggcgttccagtccacatggttcagaagcacttcctcggcaagcgcacgggtgcgcttctggtcgaagccgcaggcgccggcccaggccacggtccgctcaacagcttcggccatgagcggcgagtggaagggcagggtgacttcgaggtattcgagggtcgggttgaacacggtgccgccgtggagcttctgttcacgcagcttggcctggtgcttgtgctcgcgctcggcttcgagggcgagtgctgccaggtcttccgggtagccggaaagcacgtggtggttgtcggagttggtgacggcgatggagatcgggccgcgagcgttgttgacgcgggccaccagagcctcaacctgttcgcgggtggcgcccttgacggagagcatcggactggcttcgccatacttggggttcaggcccagttcgcgcacgcggcgagtgccggctgcaccgatcagggcggcgacggccagaatctcgtcgagggtcttgccggcggcctcgatggagccggcggcctcgatggcgcgggccatgtgcacggcgagcacgccctgggagtggccgagcacggcgagcggcttggcctgggccacgctgtagccgaggtgttcgaggtcgagcagggcgccgagctgggacagcgccacgccttccacggacgcggtggcgtcggctgcggcgccgaggcgggccgggttcggagtgaagccgaacaggtcgaccggacgtccggtggtggtcagcaggtcggcggcgaccggggtgagcagtcggttggctgcggcgatgtggccgcgcagggcctcgtcaaggctgggatcggtggtctggtctgccagggctaccggccacggggtggactggccggcgaaggcgagcgcatggggctcggtggccaggcgattgaggaagaaggtggtcattgctttccttacttgtgtttggttgatgtcttcagaaatcagaggggctggttgccgtggtgtttggtggtgcgcttgacgcgccgcttggtggcgagcgtggccagcgattcgacgatcacctcacgggtctgttcggggtcgatcatgccgtcgatctgcccgatttccagcgacaggttcgcgttgacggtgctggtctcgtactccttgatgtacttggcccgcagcgcatcgacgtcctgcccggaggctttggccttggccaggtcgtggcggtggatgatgttcaccgcgccggccgcgccgagcaccgcgatctgggaggagggccacgcgaagttcaggtccgcgccgatggctttggagcccatcacgatgtacgcgccgccgaacgcctttcgcaacaccacggtcaccatcggcacttgcgcgttggcgtaggcgtagatcaccttggcgccgcggcggatgatgccggcgtgttcctggtcggagccgggcttgtagccgggcacatccacgagggtgaccacgggcaggttgaacgcgtcgcacaggcgtacgaatcgggcgaccttctcggacgagtcgacgtccaggatgccggcgagcacgttcggctggttcgccacgatgccgaccggcttgccgtcgatgcaggcgaagccgacgagcgcggaggcgccgaacagttcctgcacctgcacgaattcgccgtaatcgacgatgcaacgaatcacttcgagcatgtcgtagggctgacgttcgttggcgggcacgatggtggcgagtcgcttggcggtctcgcgttcggcgcgggtgacggcgtaggcgtagaccggcggcttgctttcgctgttggacggcaggtaggcgagcacggtgcgcgcatagtcgatggcgtcggattcgtcctcgccgaggtagtgggccacgccggacacccggttgtgcacttcgccgccgccaaggtcggccatggagatggtctcgccggtcgaggccttgaccacgtccggcccggtgacgaacatgttcgagttctcacgggtcatgatgatgaggtccgtcagggccgggcagtagacggcaccgccggcgcaggggccgagaatcaggctcagctggggcacgaagccgctggcctcgcaagtcttgcggaagatgcggccgtactgggtcagagcggccacgccctcctgtatgcgggcgccgccggagtccacgatggccacgatcggcactttgaggtcgatggccatgtccatcagtcggcagatcttctcgccttcggcggtgccgagggtgccgcccttgacggagaagtcctgggcgtagacggccactttgcggccgtagacctggccgaagccggtgatgacagctgcaccggcgttgccgccggcgatgttgccgccctggaagcggccgatctcctcgaacgtgccggtgtcgaagagcaggtcgaggcgttcgcgcgcggttttcttgcctttagcgtgctgcttgtcgcgggcgcgctcttcggcggcgcgggccagttcggcggccttgaccacggcggtgcgcagcggctggtgggccgagggctgggcggcgctggcggccgaggccgcagccgcggccttcacggccggcgaatccatgatgtcagtcattgccaccctccttcttggcgtcggcggccttggccttgccggcgttcacgtccagcgtgaccagcgtgtcgccggcctccacgccatcggccgggccaacgaaaatcttcttcacttcgccggcggccggcgcgtacacgtagttctccatcttcatggattcgagcaccaccagaaggtcgcccttggccacttgctggccttcggacacgttgatgcgcgtgaccacggcctgcatcggggaggcgatgacgccggatttggcaccgtcgttggccgtggcggcaccggaggccacgttgtgcaagcctgcgccgcgcaacggctgggtggggcgcttggcaccgcgggcgcgggccgagccggtgatgttctccacgatgtcgagcggcacggtgagcttgacgcggcggttgttcatctcgatgacgaacgtctccgacttggacttgtcgggcgcggccggggcagcggcacccggggcggcggccaaggaggccggctggccggaggcggcggaagccggtgtgcggttcaggtacgtgcgctccagccacttggtggacacggcgaacggatggccatgctcggcggtgaagtcgtcgttgcggaagatctccttgaacagcggaatcggcgtgggcacgccttcgatcacgagctcgtcgagcacgcggcgcacacgggccacggcatcgagacggttctgggcggtgacgatgaccttgcccatcatcgaatcgaacttcggggagatggtgtcgccctgttccacaccggtatcgatacgcacgccggggccggccggccactggatcttctccaaggtgccggagccgggggtcaggttggtggccgggtcttcgctggtgatgcgcagttcgaagctgtggccgcgcggttcgggggcgcgggtgagctcgccaccggcggcgatattgagctgttcgcgcaccaggtcgaggccgctgacctcttcggagacggtgtgctccacctgcagacgcgggttgacttccaggaagtacactttgccgttcggggtcaccatgaattcgcaggtgcccaggcccacgtagccgaccgtggtgaacaggcggcgggagtattcctccagcgtgctgacgatttcctcggacaggaagggcgcgggcgcctcttccacgagtttctggttgcggcgctgcagcgagcagtcacgggtggagtacacggtgaagttgccgtgcgagtcgcgcccggactgggtctcgacgtggcgtgccttgtccacgaacttctcgatgaagtattccttcagatcgccgccttgcagcgcgtcgtggttcatgtagaagcggcgcagctcctcgtcgtcatgcaccacggtgatgccgtggccgccaccgccatcagtgcgcttcatcatgatcgggtagccgtgggtgtgtgcgaagtcgagcagcgttcgcacgtcggtcaccggttcggacaggccaggcaccggcggcactttggcgcgcaaggccactcggcgggcggtgatcttgtcgcccaaatccaccagcgcggtgtggtgcggacccacccagatggcaccggcatcctcgaccttctgcgcgaagctcggcacttcggaaaggaatccgtagccggggtgcacggcgtccgcaccggttttgtgcaggatgtcgatcagcagatcctcgttgaggtacgtgtccttgtaggtgtcgccggagagcaggtatgcctcgtcggccatgtccacatagcggctattgcggtcttgttcggagtagacggccacggtggagatacccatctccttggccgtgcgcaccacgcgcagagcgatctcacctcggttcgcaatcagcagttttttgacagtatgagccatagtgtcaaattgtgctctccatatagaggagagggcaagccgcgttcgcacaaaagctttcacgcccttttgtaggctacgaacaaacgcgcgcgtaggttccggcaacgtaaccgttggcgccggctatcaaaaacgttgcaaatccgtcgattgcacatccttgcgcgccggttcaagaagttgacgttacggttgcgttcgtcaacttatgacaaatcgaaatcgacaattttgtaagttggtacgaaaccgcacgaaatcgaacacctctacgatggcaaccgtaagttcgggggaaggctcatctgcgggcgaacggaaggcgaccggaccggcatcggtccatcgccgcacgattcgcccgcacagggccggattcatttgggaccgtccaccatatggacggttcgggctgtcggggataccgcacggcccgccggaacctcccctcatccatcgcataccgcccgccgttcacggcgatatcacacaacataggggttattgatatgcagacttcacacaccaccgcatccgcagcggccaccacgccgctcgcccgtcgtatcgtcgccgcatcctggaagccggtgctgttcgccgtgctgatgtggctgtccgcggccgccggcgagattccgattccgggcacgccggtgccgatcacgctgcagacgttcgtggtgatgctcgccggtctcatgctgccgtggcgtcaggccggtgccgccgtcgccacctatctggcggccggtgcggtcggcctgccggtgttcgccggcggcacctccacgctggccctggtcggcccgagcgccggcttcctcttcggcttcctgccgggtgtggtggtcatcgccctgctgcgcggcaagtccgacacttcgtccttcgcggccgccgcgcgcaccgcgggccgctacctgctggccgcgctggtcggcggcgtcgtggtggtgtacgccttcggcttcatcatccagtccgcgttgaccggtgcgccgctcgccgccgtggccctggcctccatgggcttcgtcgtcggcgacgccatcaaggccgtggtggcctctctggccgccgccggcctgtccaagctcggtcgctgacctgagctactagctagctactggccggctattacagcactcccacatcggcggtgcggaccgtatggtccgtgccgtcttgtgttctcaggatcagtgaggcgtcttcgttgaggccgatggcttcgccggtcagcgtggtgccgtccgtgaaatgcgcctcgacctgacggccgcgcgcccagcacaccgccttcatttcctcgcgcaacgactcggcctggcccttcgggtcggcgatgaacttcgccagtcgttcacggaagccctcgacctgacgttcggccaccgcatcgcgcatctcgccaaacgacggcaagcccgtgacatgcagctgcagcgaagtcgactgcggcgtgggcaaccaacaggcacccagcgccagattcaggcctacgccgaacacgatgacgacgtcgtcatcggcatcagcatcagtaccggacgacggcggaatcaccagttccgagagcagcccgcccagcttgagcccgtggcagaacacgtcgttcggccatttgagttccagcaagtagtccggctggttcggcgcggcaccgtattcctcgatcatgccgttcagggcgtccagcgtgaccagtccggcgatcatctgcagccagccattgacggattcgtcggtggcgatcgcgcgcggaatgcgcacggcataggacatcgtcgagcaacggccgggctgactgatccacttgtgaccattgcggccacggccggcggtctgccggtcggcggccaccacggccaccgccagttcgccatcctggtggtcgggcagcgtcaacgacccgtcgccgatcatctgcgcggccagcgcgttggtcgaatcggtttcgtccacggcgaccacatgatccgcgacggctgtagttctgggtagctgcggcgttgcagctttcaatgcaatcatcatggacactacgttacctcggttgcgccgttttttgcccgcgatattccacggaaaagcgcacaaaatcaaccattttgggccggacagcccgtgttagcgttcacaacttcggaaattccgcattcgccgagcccacgcatgcacccggccgtcgtattggcttgcgaacaatggcgatgcccggcagacatcgaatatcaaccgttgacctgtgcggctaccatatattgtcatgacgtcaccagccaccgcgaagcttgccgccgtatccagccgccagtcccacccgcatcttgcgcgcgtgggcgctgccgcgcgctggacactggccgtgctggcctgcctgtggcttgcactgtgctcggcggtcggcccgctgtaccgggacgaggagaacggcaccctcgcccattggaactgggccaataccgcaatattcgtcgtgtcgttcctgatatatctcggaatcatcacgctgatggcgcgattcgcagcaggccagcgcatactgccgaagaccatcggcgagcgcctacgccaccatcagcagaatagcgaaacatcacggcccgccgccgatcagcaggccagccaaccagccaagacccgtcgtaccgttcgcgctatcgtcacgtccaccgtcactgttctggaccgctggatcacacgcggcacgaaccggttctggaagcttatgctggtgttttttgtcggctggctctgggtgccgaccactctgctggccgcattcggcgcggacctccgctcacagatccgcgaattcagctgggcctggaaccagtggaccggcctgaaacagccctatatcggcttcttctccttcgtgccgatggacatctaccccaccgcgcactacatgtggccgtccgatcccacgtatctgaccgaccagcacaatgtggtactcactgtgttctatggcgcgatagtcacgtttgcgaggcatctgaccggctcaaacgatgccggcatcgtgacgttggctgccctgcagacgctgttcgccgtgttctgctgcgctgccgccgccaatcgattcctgaaccgaccttggataggaaaaacggcaacggattccgccgttcccccacaggccggaggattggccagattcctgattctgctgttcttcatggtctgcccgctggccgtgttttccactatctccatcaccaaatcgccgctgttcgcgttctcgttcgtctggtggttcagcgtctggtatgaactcgtccagacctggcaccccgccggcacccgcaaacatcctcagacccctgccatcgccacgcccgtccacttgccgtgccacagcttcatcgccttcatcctggccacgtcggtgatgctgatttccgcgaaatatgcgtggtacatcatcgctctgcaaatcgtgctggctctgatcgccgaccgcaaacgctgggcgacttacgtcgtggcactgctcatccccaccgtactgattcacggcggcatctccttcgccatctcctctggtgcgatcatcggcggcgatccaatcgaaagccgcggcgtacagctgcaaatgatcgcccgcgtggctcagcgcaatccggacggtatttcagacgaagccaaaaagaacctcgcgcccgtcttcaatctcgatcagatggccgacgcttactcccagcaggatgccgacccggtgaaatcctccggtattcaggccaagaaggtcagctacaagtggcgcacggtgacgcccgaggatatgaccaatttcaacaaggcatggttcgaaatcgtcaaggacaatccgatcatcgcgctggatgcgttgctggccaaatgcttcggatacttcaatgtgaacgatcagccgtatgtatcgatggattattacgtggccagcgattacgtgcagaaaaactccacatggatcaaggattacaaccatgactggcgtgagcacatcgccggcttcactcgcgtatggggcagtattcccgtgctcggctggcctacgcacggcaatttctacgtggtgatgacattgctgatcggcgcggccgaggtgattcgccgacgttggctcaccctcatgacccatattccgctgctactgctgatgggcgtgatgattaccgcgccggccaataatttcgagcggcacatgttgccggttgcgtttgtattcggattcgtggtgctgacgtattggcgagagtctttggctgaaaggcaacgccaatcagcgacgctacactagtgactatgtcagattttctcgaacttcttgctgccgacgttgccgattcgtccggtgcatccggtatgccgggtgcgcccgattcatccgattcggccgcacccggcatcaccgcgaccaaccgcgtacgcaccgtgctgttcgagtgcctgttcaatcatctggccgacgaacgagtggagtccctgttcaccatcctcggtttcgagcatgacttcgattgttacaccatcgccggataccctgcccggtccgccgcacgtacggccaaggaaatcgagaaaatcgtggccgatttcggcggtgtgtgtctgaccgccaagcgcccgatcggcaacagcaccgccgtagtggcgttgattcgtccggtcggtgcggccacgccggaaatcatctgcaataccatcgccccgtcgttcgccgccgatcggccaatcgccttgggtccacagcgcaccggtgccgatggcgcgatgcgttcgattcaggccacgctctactgtcttcaggccgcgccggccctggccgccaccgtgcagccattgccgcgcccgttacgcaccgacgacgccctgcccgaacgtgcgttgatcggcgacgcggacgcccgtgacgaactggtccgcgtggtctacggaagcctgacagcagcaggcccggatgatccgacgctgctcaccgtctccacattcctgaagttcggcggttcgctcgagaccacggccaaggagctcaacgtacatcccaatacgatccgctaccgtttgaagcgcgccgccgaatccaccggctgggatgccaccgacccgcgcgaggcgtacgtgctgatcaccgccatcgcgttgggtcgtgtggccgaagcgtaacggaccgcagcgtagtcgggcagaagcataaccagcagaaccgtagccggcaaaggccatagctgaccggacataaccgtccagcccgacagcctagcgggccgaatcaggctgcctgaatttcgcgtacgccatcgcgcagtaacgcggccaaggattcttgagtggctaacacttcgtccacgaatccaccggcggacaggctggcgatcacgcgaccggactcgttgtccacaatcggtacaccaacggcaccgacacccaacgtcacatcctcatccgacagtgcatatccacgttcgcgagtcaagcgaatatcctcgcgcaactgttccacactgaccagcgtgttctcgttatatgccgggaacggcactcctgcaagatagcgttcgacatcggcatcctcgaaatacgccaaggccacgcggccggccgcgccagcatgcagaggcagcacgcggcccgggcgcaggatcagcgaatcgatggcatgaccttgcgcacattccacgcataccaattcagtgccggagaccacactgaggaatgaggtcatgccggtttgcgcggtgatggcatgcatgaccgcaatcgcaggctgccattcggtacgagacgtgcgagcggcatcagccaatcgcagccagtccagtgataatgagtagttaccatccgtatccgttacggcccaccccacatcgaccagtccatccagcacgcggtatacggaggatcgcgggatatcacaggcgtcggcgatatctgccggcgacaggccattctccgccgccaatgcgtccatcacacgactcgccttgtctaaagcgcgggtcggttcacgtttgtcttccgccatcgtcgacgttccttcccctgacttatccctgactcatcatattcaactgttcaggccaagatgatcaccactgtatccaaggcctcgcgacacctcacggccggtagtctgcaccaatcgcaccatgtcttgagccgatgccgttgccggttgcccatctaccagacaggccagctcaggttccaaggagcgggaaaggccactcagggcgattgccgcttgaatctctccggcgtgattgaataccggtacgctgatagtcacggagccggccatggtctggccgacgtcataggtgaagccgcattcgcgtatatgacgaacctgtcccattgctgtggcacgcatcgtggagaatgtgccgccgagctcgttggtataggcatagtgttccaacagctgctcgtagcgagccgggggaagccaggccgtcagtacatgagagggagcgctcatgctcagaggcaagctattgcccaccagctgtgcatagctttgcaatgtctcacgggtgcgtgtctcgatgcacaccgtgcgcaatcgcctccgaacgaacagaccccagatgccgaactggccgtgatgggcgcggaaggtacggcgagcgatctgctgaatgtccagtctgctttcgatttggccgccgatacgtacgcaatcgatgccaagccgatactcgccacgattgatgccccgttccacccaaccgactgcgacgagattatccagcaaacgatacgttgagcttacgggttcaccagtacgttcgcttatggtttttgcgatgcttggtcccagttccgccaatacatcaagtactgccttggatttcaccaatgcatctacgctacggtcatcacggcttggcgccaccatgcgcgtcacctcctggcctgtatgttgatacctcagccatcttaccgggtattcagcgggttgccgcccaaaacgcactgggccccgacgggatactcctgccggggcccaaggacgcgagataccccccccccacgcgcaagtgtcctgatatgcgggaagccccggtacctttgaggggtatcggggcttcctgtacgtgtggtgcggcggcgtgctactctcccacaccctgtcgggtgcagtaccatcgccgtgccaggccttagcttccgggttcggaatgggaccgggcgtctc

SEQ ID NO: 310 - DNA, 3240 bp, Unknown
  R101_18m  MAG No. k141_100017
gtaagaaggacatcatcatcactgccggcggtaagaacgtctccccgattccgatggaacaggagatcgtgaaatgtccgattgtggagcatgcggtagttgttggcgacaatcgcccgttcatcggtgcgctggtcacgctggatccggagggattggcagcttggctgccgtccgtgggattgtctgcagacactccgctcgaccgcatcgcgaccgccgctgccgtacatgatgagattcagaagtatgtggacaaggcgaacgcaacggtttcgcgcgccgaatccgtacgaaagttcgtagtgctagatacccagttcacgcaggaaaacaagtgcctgaccccgtcgctgaaagtggtgcgtccggcagtgaaccgcgtgttcgcgcaggtgatcgatcagcagctgtactccggcaagcgctgaatggggcgatcgtagagaaaaatacgggccgtcgttgggatttcccagcggcggcccgtatttttttattgcatcttcgatgacgctcgcagcgtcatcgaagataacgtgcgcaacgctccgttatttcagtgacggttgttgagacggtggtacatttcgctcagctgcagttccttctcgaactggcgggcggtggtgttctcgtcgatgacggcgagctcgacaccggcgatacgggcgaagtcctcccaagcctcacgaccgacggaggtggtcatgcaggtgtggtgggagccgccggccgcgatccagcactgcacggcggtcttgaggtccggcttcggcttccagacagcacgtgcgcacggcaggttcttgagggaaccctgcggctcgacgatggagacctcgtccatgagcagacggaaacgttcacgctcgtcagccatggaaaccacgacggcgtcgccaggcttgccagagaacaccagacgcaccggatcggacttgccgccgatgcccagcgggtagatgtccagcttgggcttggcgatggtaccgatggacggggagacttccagcatgtgggaacccatgtcgagctcgttgccggcggtgaagttgtaggagtagtcctccatcagggatgcgccaccttcaaggccgtagcccatcacggcgccgatgcgcaccagcacggcggtcttccagtcgccttcggcggagaagccccagccgtactcggacgggaatcgctgcgggccgacacccggcagctgcggcagggcaccaaggtcttcgaagttgtcaacgccggcggtgcagccgttttcgcgcatcatgttgaccatggcgcactcttccttggcagcgatgaagagctcgtcgtagcgggagtcgagcagctcgggagccacgtcgtacttggccttgtagtcctcgatgagggccttgacctgatcgtccttgaccttgtcgtaggcagcgacgagttcgttgacggcccaggtgttgatggaagcgccgaacacgcgttcggcctcggtcttgtcgccctcggtgacggcgacgttgcgcatgttgtcgccccaacgcatgaccttcatgttctgggatgcgttccagccggcgcaggcgcgtgcccaggtgccgaccttttcggcgacttccggatcggtgtagtgtccgacgacgatcttgcgcggaatgccgaggcgggacaccatgtagccgaactcacggtcgccgtgggcggcctggttgaggttcatgaagtccatgtcgatggtctcccacggaatctccttgtggtgctgggtggccagctgcagcagcggcttggtaagcacttcgaggccacggatccacatcttggccggggagaaggtgtggcaccaagtgatcacaccgatgacgttcgggttggcggaggcttcggtcatgaaggccttgacgccgtcggaggacttcagggtcggcttaagcaccaccttgactgggatcttgccagttgcgttgagcgcgtcaacgatttcgccggtctgctgagccacctggcgcaacgcttcctcgccgtacaggtcctgcgaaccgacgccgaaccagatttccttaccttcgaacgggttttccattgccatcgttgtttccttacttcattgtgttggatagaggtatgtgttatgtgacagagcggaaccatgcagaatccgctccgtcaagtcagtgtcaacgctgtcagcgcgcagcgctggcgtgacgcgcgcgtccgcaaggcgcaccgagcgaaggcgtacaacggtacgtcgaggtcggagcaacgcgagcggacgctccgtcacgtcaatgctgtccgtagacgttggtgtaacggtcgttaagcttgtcgatgtcttcctgggcaatcgggatgatgtcgccgatctgcttggcggcccacatggtgcgggcgacctcttcggtcatagcggccgccttgacggcgccttcagcatccttgccgatggtgaacgggccatggttctgcatgagcacggccggggacttcggatatttcttcagggtttccaccacgccttcgccgatggcttcggaaccgataagacggaagggacctaccggcaccggaccgccgaattcgtcacccatcatggtcagaccgcaaggaatgttctgaccggtggccgcccatgcggtggcgtaggtggagtgggtgtgcactacaccgtagacgtcgggcatgtggcggtagatgtaggcgtgggaggcggtgtcggagctcggggcttcggaaccgtccaccacgttgccgtcgaggtcgcaaacgaccatcgagctcggggtgaggtactcgtaacgcaggccggagggcttgatgaccatcaggtcggcggtgtgcagacgctgggagacgttgccggcggtccacaccacgaggttccacttgatgagctgctcgtgcagggtggccacgacttcgcgcacctgcttgacttcggcgcgtacttccgggccgtaatcagccaaagttgccatgatatgtttcctttctacaaaacttacttggtttccaagggaatatttgcgattgccgtgtgctcaatcggcagtcccttgcggaagcgatcgaaaaattcctcgaatcctgcaacgtcgttttcgtccggattttccgtggtggaagctgcatctgcgaatacgcgagcgtcaaggaattcgtcgagcggctgatcggcgtgccacaggtagtcggcgagcacggccatgccccatgcgccaccttcggctgcagtagacatcaccttga

SEQ ID NO: 311 - DNA, 7186 bp, Unknown
  R101_18m  MAG No. k141_100428
cgtccccatcaaacttgtgctcatcctcgtaggcaacgatgtccatatcgcctcgatggagtttcttgagtgtttcagccactcgcgcctgctcatcatcaacaacagggcgctcgccggctaagcatgtgagaccatcggacactgcggaaaaacactgccgaacccgcccaacaaacattgaagcaatacttttttatttgcttcgttactgcgtattctgtacttcacatgtgcgaaacgttggaattccgccaaaattttatttgcctggtatttgcttgggtgggtcgcaaagcgcggttgcggcacgattcttagtggtggtgccttatggcgtcgggctttccttgcaaatcgaggtaaggaaactggcccttaacccggaatttgaaaaagtaaaaggtccctggctgttcaccagccagagacctttttggtaacaactgaggttgaggaaacctcggcagttgggtccaacggggcgaaagtctgtggcgccgccgagaagattgccccgaagctagcgcgacctttctgctacaacacagcataccagcatccatcgaaccttatcttttacgggttccggcccctcgtcttcaatcagggcaccatttcaaggcagaagaatcaggcggcctttttgcggccgcggcgcttcatggtgccagcggtggcgttggccacgtcgaagatcacggtcttgctttcggggtaggcggtaccgttgacggactggtaggcgatttcgccttccggagcctcaggcagagtgaagtatgccttcactgcttcaatgagcgtggcttccttgacgcttaccgaagcagcctgcttgccttcgggcttgctgaacttaatggcgttgtcggccttggcggtggtcggggttacggcgatctgcttggtcttgtcgttaatcagcaccttgacgtacgccgggaatccgagcacttcagcggtggctttgttgaaacgaatggcggaatcggtgacggtcagaacggtcttgcccaccggcttgaccagctgaacctcttcgaatccctgaagcaatgaagccataattgctctccttattgcattggtaacgtgtttttatttacgccactaattgtaaccagctaatttcgcattatacaaaccatatgcatgcatgattgcataattgaagaacatttgacctacgtattgcgctccccgaatagcattgatttaaccaataccaagaaaagaggaaacaagaacccgcaatatcagccgtattgaatatagaaatatgcaatttcaacatcgcaataactgacggtctttttgctggctctattcgccgatatcgcattcaggccacagcgccgagcataatatcgacgccgtgcttgatttccgcatacacgcgttcaaacacctcgcgtgattgacgatgagggtcttcggtttcgagtgccgtaggcaaaaacggccgcagcataggtacgcaatccatgatttcgatgagcctgtctgcggcggtatcgccggcaatcggaccctcggcatgcatatatttgcaagcgttcacgaagtcattgaacagaaatactttgcgaatagccagtggattctgttcaagcaaatcggaaatttgctcacgctcaaaacacagaatcaggtcggcttgccggctgatatcggtggtgagaggggtggaagaatgggaattcgcgtcaatgccgtcgttcttcagcaaatcgataaccatcggatcagcgggatgcgggggatagtgcaaagtacccgcgctgcgcacggtgatattgccgctctgcaagccaattcctcggtcggcaagcttggctcgggtgtagtattcggccatcacggaacggcattgattgccggtgcatacatacatgatttgcataacaacgtcccttctcaagtgttgtgagcattccctcatatattccagtgagcattcctcgcgaatatgcgtgcgttatgtaccgtagcaataacatgaaaaaaccgggaatcatcgactcccggttcagtggtattcgcgaactatgcttcagcgtctactgtttattatgtcagtcacgtcagcgacgagtggtgttcttgcggacggcgaacagggcgatgcccgcggcggcaagcagcacaacggccacaccgtacggtgcgatggccgcaccggtgttggcggtggtagcagtcgtggtaccggactggtcaccggttccggttgccggaacctgaatggtggcggtcttggtaccggatacagcgccaacagccttgaccgcgatggtcttgccagcctggctggccttgaacgtgtacagcaaagtcaaggaaccatctgccttggcagtgaacgtcttggatacttcagcgatctgctggacgtcggcgacgatggcatcatcgtagtacacggtgacggattcgttcggctggaatgtgcctgcagggaacgtcacggtagcggtggtgccgccgtaagtaaccgttgcaccgtaatcatcagccatagcggtattcgttgcaaaaccaaagcccagaactgcggcgatagtggccagcacggccataatcttcttcttcataacttcgaacctccacaatagaaccggttactaccgataaaaaatcggttcttatcaatagaaaatcggtcttccttcaattacaacccccaaccatacacccccctttgtcggtatataaggggtaattatgttaacgggtaagggggtgtgacaacgtggtcacaccatgtgacaacgttcgaacatattgtcgccgcattaccgttgcagcggggtcttctgacattctgaaaacgttgttattccaacgattgcgctgattggcgatacgtgcatggcaaacaacagggaaattttttctgcgacacgccgacgggctactcggattctgatttgtactcgtcgtcaaaactgaacaggtcctctacggtggtgccgaacacccgcgccaaatccatggccagacgcaatgacgggcagtattgcccctgttccagccttcctatggtctcacgtcgcacgttgaccagatcggcgaggtcggattgcttcataccgcgttggagccggtgaagtttcagactagtcttcatcgtcgcctccggtgccggtatcgtgttccagccatagatatcgaatatcggaaatggccaaggcgcacatggccaatgcgggcagtagcattggcggaataatgtgaactatcgagcggtcaatcagattcagtgtggtgtagatgaaaccgacaattaccagaatgcccaccaaactgaccagcgcgaattgcatggccgcgctttgatgcatatcggaaagctcgtcgcgtcgtgggttctgccgtcggaatacagtcatgccccatacttcgccgccgatccacaacagcgccgcgatcgctgccacgattactccgagcaggttattgccaataagagccatcagcatgcaggcaatggcacctatggattcaaggatggcacgaaagcaaatataccgattaaaggtcatggccgtctccgtgaattatgcgagcgatattgaattgcatacgcaattataaagttaggggggtaaccccttgtgtggtggttaggccaaccggcggaggctctttgcgtagaccgagaataatcgcaatcagtaattgttatgggcgatccagtagttgtacgctgcgacgatgccgccgtagcgctgctcgcagtagctgatgaaccacttgaactgggtcttgtagttggtctgccagtccgcgccgaaggaagccatcttgctaccggggtaggcctgacccaagccataagcaccagacgtggggttggtggcggtggggctccaaccggactcgtggttgatgatgtagttcgcagcggtgaagtccgcttcgctatacccgttgtccaacagatactgatgcgcccaggactgaacttctccagccggaacagtggtgccgagatcggccgacgatgatgacgacgtcgacggcgactcggtggaaccagtgcccaccaagatcaccttatccaccggggccttcttgacccatgaggcgaatacgttagaagaggcgaccttatcgccggctcgcttgaccagcgaggtggtctccataatgcccttctggccctcggtctcgaccttttcctgacccctgggcaggctgctggtctccttgcgcacttcattgaaggcgatctcggtatcgttggtctccacatcggcatccgcgcgattaatggtgaccacggtggcctcggtgaccttggatttcagcgagggagatacggcatcatccgggtcaagcgtgatatcacccgtctccagcacgtccttgacggtggtcatgttggctttttcgccaagtactacgcgcgaatcgccattaatcttcaccgtaacgaacgtggtgttcttgtcggcgctgttgattgcgccacgagtggcagaacgggatgcggccgaatcggtagcggagaacgaagtgatggtggaaatcggcttcacatcatcagcatggtagaaactgcgcgacaccaatcccgccgcgccgagcagacctgccgcggccaccacagccgcgatcttcatccactggcgcttgttcaacggtctgagcatacgggtcggcttggcatgtctcgtcattgcgctccttgatcggatttcacactgaccaccatgataggcggcgcagtggatgaaggaaaatcaggctcaggcctgctggtcggcaccggactgggcggccttggcggcggccagatcgagtgccttggcctgggcgatcagatcgtcgagatcggcggcctgcagcgcgccggcctgctggaagatgacctcgccctgcttggcgatcatcagcgtgggtaccgcctggatgccggcggcctgggccagatcctggttggcgtcgatatcaaccttgacgaaggcgatgttcgcgttctccggctcgttggaggccgcctcgaaaatcgggccgaacgcgcggcacgggccgcaccaggtggcccagaagtcaacgaacacgatttcgttgtcggtgatggtcttctcgaaatcggcggaggtgatggcggtggttgccatgatgttcccttcttttgtgttttccttggcatcgccgtacggccctcatgcgtggccgccgggcgattgccttattcatgcaatacgtcttggcgcttggggccgtgcggttcgtggccgtcggctccctgctggctaccagcttcccagcaccacccaacatttgtgtcgtattttccgccgccggccaaacgtttcccaagatttcgccgtaaggtgacgcgtggcgtgattttgcgcgcaataatgggatgcatgccagtcatgaatgatgaagtgcccgacgagggcgattatgatgccggccgtggccgcggcgaattcgacaacatcacgcccgaggacttcatccacggaggcggttccggtcacggcaacccgccgggctggctggggccgtccgacatcaaccgggcgcgccatcagatgcccatcgcgtatgtggagatcgtgcccgtacgcaccgatgagatgggccgcatctcccaggtgggctcgctgctgcgcgtatccgaggacgggtcgatcgagcgtacgctgatcaccggccgtgtgctgtaccacgagacgttgcgcgaggccatcgcccgcaatgtggccaaggacctgggcgatatcgccttgccgctgctgccgatcgggctccagccgttcaccgtggccgaattcttccccacgccgggactaagcgaatactacgatccgcgccagcacgccatcgcactgtgctacgtggtgcctatcgccggcgactgcaagccgcaggatgagacgctggatgtggaatgggtggatcccaagagcgacgtaatggacacgttcgtggcgcagatggtcaacggccatgggcgcatcgtgcgacaggcgttggcctgggccggaatctgacagttgttttgccttccgttggaggggatggcgcgtagcgacggagggcggtccgcgttgagaccgctcccagccgactgtgccgacagctccgccagtggggcgcgaatgtgaaggagtaattcatggcaatcgaattggccaatcatatctaccgcgacggcgaaggcgtgccggtggtgctgatgaacgcctacccggtggaccaccgcatgtgggacgtgtgcgcgaaggcgctcgccgacttcgccgacctgaacgacgtgccggacttcccgatctgggctccggacatggccggctccggcgcatccccggtgccgagcgacgccgattcgggcccccgcatggcgaacggcgcgtacagcgaggcgttggatcgcctggccggagcctacgtggacctgatcaaggccgccggctatgagcaggcgatttgggtcgggctgtcgatgggcggctacgtggcgatggacatccagcgcctgtaccccgaaacggtggccggactggccttgtgcgacacgatggccgcgtccgacggcgtgggcggagagaaccgactgaagatggcggacgccgccgaacagacgaactcggtcgaaccggtcatgcacttcgcgcaaccggccgatggcgattccaccgtcaagaagactcctgaattcatcgcgaccatgaccggctggatcaacgaacagaacccggctggtctggcctggcgtcagcgcatgacctatggccggcccgaactgggggcggtgccggaaacgatcagcgcaccgagcctggtggtgtccggcgaactggacccctccagcaatccgagtgtgatgcgtccgctcgccgagcgaatcgccggcgccgaattcatcgacattccggactgcggccatttcagtgccgtcgaacatccggataccgtggcgcgagcactgctctcgctcgtcaggcgcgtgcagaacgcgcagaagaacgcataggagacctcgatgggcactgacattcatttttcgcccctggcgctgacccatgcgctgccgttcctgccgctcgcgcaaggtgacatcgactatcaggtggaccggcgcggtgaacccggtctgatcgacgagctgttggccgagccgaccaccaaagtcgtgcttacgcgcggcggacttgtc

SEQ ID NO: 312 - DNA, 4961 bp, Unknown
  R42_10m  MAG No. k141_1649
ccggggataatctggccgatctgcttgcggtattcggccatttccttgaccagccggtaatcgccggcaatcagagccgtacggtagccggccatgttggactgcttggacagcgagtagagcaccaggatgccagctgccgaaccttcacacacatgtggattcagggcacatggcgtggcggagagactgaatgcggtatcggaggcgggctcgttggattcggccaccggtgcggcaggcacagacgcagcagatgcagacgcggcaggcgcagaggacgaggctgtattgcggcgcaccgaacgccagtccatcaacgcatagcattcgtcggagagcaccacggcaccgatgcgacgggcagcagccacgatgtcggtcagccagtcagcggagatgacctcgccggaaggattacacggcgagttgatccagatggccttgacattcggaatattcacccaggaatcgacgtcggtcacatcatcgactttgaccacggtggcgccggcaagttgggtaccgatttcgtaagtcgggtaggagacggccggttggacgaccacatcgccttcgccaaggtgcagcaggctggccatcagcgccacggcctccttggaacccacggtgggtacggcggcagcgttgatggacttcagatccacaccgcgcagttcgcggaaccatgtatcgatagcggccttaaggtcggcgctgccggcggtgaccgggtatccatgggcgttgggggcgtctgcgccggcaaccagcgcctgctggacactgctcggcaccgggtccacgggcgagcctacggacaggtcgatcatgccacccggcacggttttggcggtggctttgaagccggcgatacgagaccagtcgtatggcgacgaatatgcgtggaagcccatgagaacccctttcttggacggtatgttcctaagatacgacgaaccctcggccgtgatagaccgagggttcaatccgaactatgcgctgtgtgcagcgcttatccgcaaatcagcttactggttctgcggcggcagcgcggcgacctgttccgggtctttgccgattgggccattggcggaagcgccgcccaaatcgccgacttcagcgaagaagttgacagcggcatccttgtaccaagcccactcgtccggcagatcatcctcatagaagatggcctcggtggggcacaccggttcgcatgcaccgcaatcgacgcactcgttggggttgatgtacagcgagcgggaaccctcgtaaatgcagtcgacggggcactcgtccacacaagccttgtccttgacatccacgcaaggctgagcgatcacatatggcatggaatcctccttaacaaatactgatacaagggtacgcgcccgttgggacgctcctcgctctcagccgttaacggccttatcggtttcggcggacagcgtttcggtcaggtcgcccttgccgaggcgcgcatgccagtagccgtagccgaagtagatggcgacgccgaccacgagccacaccacgaaacgaatccaggtgagcacggacaggttgagcatcaaccagaagttggccacggcgatgaggatcggaatccacgggtcgccgggcatcttgaaggcgcgcggcaggtcggggcgcttcttgcgcataatcgggatggagatggccaccagcgtgaaggcggacagggtgccgatgttgaccatgtcggagagcacgccgatgtcgaagaaggcggccacgagcgccaccaccgcgccgacgacgatctgcagagcggccggggtgccatgcttgccggtcttggacaggccgcgcggcagcagaccatcgcggctcatggcgaagacgatacgggtcaggccgagcaacagcaccatgaccacggtggccaggcccagcacgatgccgaagctgatgatcttggcggcccagtcggcacccaccagttcgaaggcggtggccagcgaggggctgtcttgcttggcgagatcggcataggagaccatgccggtggtcaccacggccacgagcatgtacatgacgatgatgagcagcatgcccacgccgatgccgagcggcacgttcttgtgcgggttcttggtctcctcggaggcggtggccaccacgtcgaagccgatgaacgcgaagaacacgagcgccgcgcccgaaaggatgccgggaacgccgtacacggatggggtcatgccggtggcgaactgccacagcggctgggtcatcacgccggtgacggcggaggaaccttccacggtggaggccggctggctcggcggaatgaacggggtgaagttggaggccttgacgtagaagaagccgacgaccaccacaaagaacacgatggcgatcttgagcacggtcatagcaccgtccacgcgggcgccgatcttggtgccgaatacgagcagcgtggtaaagaacgccacgatgatgatcggggcgatatcgatatggaaggagccgaacgccaggttggtgttggcgttccagcccatcaggcgcatgaaatcgttgaggtatacgccccaatatttggaaatcacggagccggccatcagcatttccagaatcagatcccagccgatgatccaggccatgatctcgccgaccgtggtgtaggtgaaggtgtaggcggagccggccaccggaatcatcgaagcgaattcggcgtagcacatcacggctgcgccgcacacgatgccggcgatcaggaagctgatgatcacggccgggccggcgtggaaggcggcggcctgcgcgcccaccgagaagatgccggcacccacggctacggccacgcccatgattgacagatcccaccaagtcaggttgcgcttgagcttgcggccctcttcacccgtttcggcaatggtctgttcgacggatttcgtacggaacagttgcatagtgctcttctttttctctgttgtttgcgcaccgaatgcgcacaataccgacaatcgagtatagaagagcccgcgtgtcttgtctattaataagacttagagtccgcaatatatgggattaatatccaactccatcgatcaatagcgcgattacagcacgccgacgcagaccggttcgggcaccaagtccactccgaacgcgctcttgaccgcctgctgaaccgcacgcgccaaagctgcgatatcggccgcgctcgctcccccacgattggtcaaggccagcgtgtgctgcgtggatagactggccggcgcgtccgcatcgaccttatatcccttatggcagccggcatggtcgatgagccaggcggcggacgtcttggtgccgggagtgccgtcgggcagagtcgcgtcgaacttcggcgcatcttcgggcagggccgccgcttggccggcggtcagaatcggattcataaagaacgagccgcagctgtggcgattgtagtcgggagcaggcaggccgtcatcgccaacgggaacgccggcggcctcattgagggaggccagacgctccagatcggtcaggatattggcctcgcgcttggcggtggccatgtcgggcaaggcgtagcgagtgggatcctcaagcatgcccttggcggcacgtactgcgagcacggctttgcggatgtcggcggtggccatacggtcgcccacttcgacgccaagcgctttggcaagctgtccgtaacctaccgtgccttcggccgagtgggtcagggcaaaggtgacggagagcaccacgtaacgtggcgtcgggaagaatcggtcggccggccggccgggaccggcgtacatgctggccttcagtgcggagtatcgatagccgaatcgaagatcggcgggtgtgaggtcgcgcgttgttttggtgtctcgatcccagacttccaccgattcgaccgaagtggcgacttcctgtccgtaggcaccgatgttctgcaccacggaagcgccgactgtgccgggaatgccggacagtccctcgacgccctcgagcccgagctctacggtgaaggccacgaaatcatcccaattggcaccggcctcggcattgacatgcacggtgcgatcctcgccctctaccggtgcagcctcgtccggcacagtgatgaggcgtcgggcgtctcgaaccaccacgccgtcaaaaggcttatcggaaacaagcaggttggagccgccaccgataacgaccaagggcaggcctttggaatcggcatcctccacggcttcgatgagccccacgcgcgtggtcggctcgatgaaatgggcgatggggccgcccacgcccatggtggtgatgtctgcaaagcttgtcatgacttcctatcttagtggcgcaggtgcgatatcggggcaatcatcggctgaaacggcagaacgcccgcgaggggttcgttcagacgcgggatttctgccgtttctcacgcgatgcggatactgattccgcaccctaccactcggctctggagtcaatacgcaaaaacccggccgaatgagccgggttttgtaaagctgtgatgcttgcgatcaacgagtctcgcggtgcacggtctgcttgccgcagcgcgggcagaacttcttgagctcaagacggtcgggcgtattacgacggttcttagtcgtaatgtagttacgctccttgcactcggtgcaggccagcgtgatgcccggacggatgtcggcgctcttagccattgtcattcacctctgtgttcttaggtatagtgcgcgcccaccggttagcgggcgcgatttgtagcgaggaagaggctcgaactcttgaccttacgattatgagtcgtacgctctagccagctgagctaccccgccagagagccccgagtgagaattggactcacgacctcttccttaccaaggaagtgctctaccactgagctatcggggcgtggcggatagtggattcgaaccactgaagcacgaagcggctgatttacagtcagctcc

SEQ ID NO: 313 - DNA, 64506 bp, Unknown
  R42_10m  MAG No. k141_2035
cgtattctccacgggctcggcttcgcggtcggaggtcatggcgtagccgccaccaggcaaaatcaggatggccgggcgtatgcggtccggttccatctcctcgctgttgtcggccacatagccaaagaatcgcgcctcgttatataacttaagaatcgtgagaatcaaagcaattcataacctaggaatagtgagttttacggcattatataacttaggaatcgtgatataatagctcataaatccttgaaaatactaggaatatgagcttaacatgtataagagaaaagtatacgaccatctacggcgatggaaagcagcgagcaagggtactactgcgttaatgattgaaggagcccgccgcgtcggcaaaagcaccgtcgccgaggaattcgcgaagaacgaataccgctcatacatccttatcgactggcagaaggctccgcaggcggtacgagactcgttccgcaacaatctggatcatttggacacgctgttcatggacctttccgtctattacggcgtacgcctgcatgagcgtgacaccctctttattttcgacgaagtacagctcttcccctttgcccgcagcgcggttaaacaactcgttgcggatggtcgatatgacttcatggagactggctccctgatctccattaagaagaatgtcgaaaacatcttgattccctccgaggaagaatcggtgagcatgtttcccatggattttgaggaatttctatgggccagaggagaagaactactcgccgatgcgatacggcaatcttttgcggacaggcgagcaatgtctccgctgctggacaacaaggcggaacgcctgttccgtgaatacatgctggtgggaggtatgccgcaggccgtagagcgttatctgggaacatccgatatgggcaatgtcgatcgagtgaaacgccaaattttgcacctgtacgctcaggacataaagaaatacggcggagattcgaaagaacgggtcaaacgtatcttcgatgaaattccagggcaactttccaagcatgaaaagaagttcacactgtcgtctttaggcgaaaacgcacgcgaacgtgaatatggcaatgctttcttctggttggatgaatcgttcctgatcaaccgctgcatgaatgccacggatccgcatgtgggcctgcgcctacaccaagaggactccacgatgaaatgctatatgggagacaccggcttgttagtaacgcaagtgtttgccgaccgcgcatacacgtcgaatgagttgtaccgcgatatcctgttcggcaagctggaagtgaatgaaggcatgctggtggagaatgtcgttgcgcagcagctccgggcctcaggccatcgcctgttcttctattcccgatattcccgtcaggcgaaggaccgcatggaaattgattttctccttatcggggagtattcaaatgccgccatgaaggccagggtctgccccgtggaggtcaaatcgacaaagagatacaaaacctcatcgctcgataagttcaagaataaattcgacagccgggtcggcatgcaatatgtgctgcatcctagaccaatgcgcgttgaaggagaccgcctatatctgccgttgtatatggcgcattgcttgtgatgattctagaacgtatcgcagagaatgattctcaataagaaaagcgtgaggattacgatgcctcaatcgcacatgcagagcgtcatatcagtgagatcccgccgttgcggaccatgtttgactgtgcggaaaagttcggatgcctcacacttttcttgacgggaattatttactgtgaggcattgcgcaggttggcggccatggcgcggtcgcgcaagcctttggtgagcttgagaccgagggttacggcgatcaggactatcgtgcaggcgatccacagcgttcgaccgccgaagttgctgatggtccagccgccaatcagcggcgccagcgcaatcgataccgaccacactacgttgtagacgccctggtacgtgccgcgtgccgacgcgggtgccatggcggcaaccgtagtggtggcgatagggaatgtgcccagctcacccagcgtccacagcactacggcaagcgcgaatccgccccaggaatgggccgcggcctgcaccgcatagccgatgacggttacggcgaggcccatcaccagcacgcgtgaattgcccatgcgcgagaacagtttcatcgcgggaatctgcagcaggcacaacataccgccattgatggtgagcagcaccgaatactcgcccagccctagaccaaggtccgtcatggcaatgggcaggccggaggtgctttggaagtacacaaggaagtagccgaacatcagcagggagaagccgaggaatggcgtatcagtgagcacgcgccgccaattgcgagacatggagcccttggcactggcagccggtgcggcatccgagtgattcggcccctcgacgccggcgaattccgcatgcgtaacactgcgttcgtcttcatggcgcaccgcacttggcaccgatacagtaatccccaaatgccgcacctcgcggaagaacgcaatcagcaatatcgcgacggctatcatcaccgccgcttcaacgtagaacatcagcgaatacgagatcttgaccagctggttggccacaatcggcccaatcgcgtacccaaaattaatcgcccacgattgcagtacgtacgcacgttgctgacgttcggcgggcaccacatccgcgatatacgcggcgatgaccgggctgggcagtgaggcgaacgcaccatagacaaacagggccgcgcctaaagccacggggtcagtgagcacggaaacgaccagcagggcagccgctgcgccgatttcgccgatgataatcatggattggcggccgaatctgtcggacaaggtaccgccgaacaggcagccgatgattgcgccgaagccgtacatggccacgactgtgcccaccacaccctcatcgaggcgcagcgcggaaaccaaatatatcgacaagaatgaggtcacgaagcgacccatccacagaatcagaatcgccaaccataatccccaatacagcagggacagtccgaatatcatgcgctgcttcttcactctcaataccttaccggctaccgacggcggaatagccgcgttttggcgcggggtgctgggacaatagcacctatggctatcaaaaaaggaccgaccaaggggtcgggtggcaagcatcgcaacaaactgaagggttacggccccactcccaaagccgaggaccgcgtctatcacaaggcgtataaggccaagaaagcggccgaacgtcggcagatggccgacccgcgtctggcagcccgccgtcgagtggacaagttcgcttcggcggatacttcggatctggtgtacggccgtaattccgtgctggaagcactgcgcgtaggcgtaccttcttccacgctgtacatcatgtctcgtattgaacatgacgatcgtactcgcgaaatcgtgaaaatcgctggtatgaacggcctgcacatgctggaggccgatcgtctggagatggatcgtatcgcccgctccggcaaccatcagggcgtgattctgaaggtcgatccgttccagtactcctcgctgaacgagctggccgatcgtgctgagaagaaggccaaggcaatggaggccgcgaattcggcggccgcccgtattgctgcgcgaccgctgttcattgcattggacggcgtgaccgatccgcagaacctgggtgccgtgattcgttcggcggccgcattcggtgccaatggtgtgattctgccggaacgccgttccgcttcagtgaacgccgccgcttggaaggtgtctgccggtgcggccgcgcatatgccggtggcgcgcgtggtgaacctgactaaggcacttgagggcttgaaggagcgtggatactacgttgtcggccttgacggtggcggcgataagctcgtcggcgagactggctttgaatccgatccgctcgttgtagtgctcggttcggaaggcagcggtttgggccgactggtgcgcgaaacctgcgacgcgattgccggcatcccgatcagctcgtctgttgagtcgctgaacgcttcagtggcggcgggtatcagcctgtacgcggtgtccaacgcacggcgcaaggctgcggcggagtgattgtcgcttgaggccgtaataggttgtacacacaaagaagcccctctatctgaggggcttctttgtgtgatgggctcacctacagacagtccaccggattgtccgcttaatgactccacactgccgcatccggatcgtcatcggggttgtagccgtcgtcgtccgggtcgctgtaggtggattcgtcgtcaatgacgccggaatcggcctcttcgttaagttcggcgagtgccttggaatcaaggttgtagctcggcagaacgttgtcgatgtagctggtcacggcctcgcccatcggcacgtcgtgaccggccttctccgccaggaaccagcgatggtcaagcacctcatggaagaactgagcaggctcgatctgggagcgatattcgcgcggaatcatacgcacggtcggctcgaacacctcgcgcatccaatcggtggccacgatttccagatcctcgccctcacgccacgtggaggcacggtaggcgtcaaggtcgttgagcagacgacgggcctggttctcctgcacgtcaaggccggtgaggcgcagcagcttgcggttggcgtagccggcgtccaccacgcgcgggcggaccagcacacgcttgccgtcctcggcggtcttcatttccagctcgtccacgtcgaagcccagctcgttgagcttgttgacgcgctgctcaatcttccacatttcgtccgggttgaacttgtcggtgtcggtcagagcgctccacagcgagtggtagcggtcgaccaggcggttgcccacctcgatctcatccacgtcgccgggcagtagcttgccggacgccaaatccataagttcgccgatgatgttggtgcgggccaagtcgatatcgtattcgcgctggccgtcggtgagctggacttgcaggtcaccggtctcggcgtccaccaggaaggcggagaaagcgtcggcgtcgcgcaggaacaggacgttcgacagggatacatcgccccagtagaagccggccaggtgcaggcgcaccagcagcacggcgagggcgtcgatcagtcgttcggcggtgtccgggcgcaggttgcgggcgaacagcgcacggtacggcagtgagaacttcaagtgccgggtgaccagaatcgcctccagcggctccccttcacgggtgtgacggccggtgaccacggcgatcggggtcacagttggcagttcgagcttctgcagtcgacgcaggatctcgtactctcgctcggccacctggcgcgtgatctccttcatggcgtacacctcgtcgcccacgtgcacgaatcgcacgacgtggcgggagatgcctcgcggcaggttggccagcaggtcctcaggccaggtggccaagggcttgtgccagggcagcgtgaacatctttgggttcgagctggcggcggtgattttcagtgcttgcggttccgctgaatcggcgtgttcgtcttcggctttgacagacgtggccttcagcgcacgcggatccatctggggcaattcgttcaactccatgtgttcgattttacgtgtcgttcgcgatgtgtgctccttggccacgacttcggcgcgttatgtttacgggaaaacaccgtttggtctctccctcagaccgtctagaaggcaaaaagaaaagccccgcagctatgcagggcttttccaacgaggtcataagagaggaagagaataacctcgtttaatggttgacgaagcgattagacctcgccaagtatctattagttcagacgcagctcagtcgacggagcgaacaggtgcatcttggccgggtcgatcttgatcttgacggtcgcgccaaccttcggcagcgcacgcggattcacacgaatcgtggtgagcttgttctggtcggacatgacctgggaagcctcagcggcggagccatcggtgacgatgttgccgtagatgtagccatcggagcccagatcctcgacgttcacaaccttcagggagaaggcgttcgggtcgtcagccggggccaggccagcgtcctcaggacggaagccgaccacgatctggccgttgtcttcggcggtgagcttgttgacggcctcagccggcaggtccacggtgtcctcaccgatcttcgccttgccgttgaccaccgggtgggtgttcaggttcatcgacggggagccgatgaagccggcgacgaagacgttggccggacgatcatacagctcggtcggagcaccgacctgctgcaggataccgagcttgatgacggcgatgcgatcgcccatcgtcagggcctcggtctgatcgtgggtcacgtacagggtggtgacacccagctggcgctgcagggcagcgatctgggtacgggtctggacacggagcttggcgtcgaggttggacagcggctcatccatgaggaagaccttcggctcacggacgattgcacgacccatggccacacgctgacgctgaccaccggacagagccttcggcttacgatcgaggtactcggtcaggtcgaggatctcagcggccttctcgacgcgcttgcggatctcttccttcggagtgccggcgatcttcagagcgaagcccatattgtcggccacggtcatgtgcgggtacagggcgtagttctggaacaccattgcgatgtcgcggtccttcggctgcatcgtggtgacatccttgccaccaatgaggatgcggcccttgttgacctcctccaggccggcgagcatacgaagggtcgtagacttaccacagccagaagggccaacgaggacgaggaactcgccatccttgatatcaagattcagatcatccacggagggcttatcgttgcccgggtagatacgagtgacgtggtcgaaaacgacttctgccataattactaatcctttcagaggcaggtacgtgcctcacgatccgttgtaaagggatttgttctttactgcgcttccgccctcgccaccgacgtacaactttgctttcggaaactgcaagcttcagcgtttacttttttccggttcagtgaaggttctcttcgttgagccgagaactactatacacggaccgtggaccaaggcaagtggcgtgtctgaaaatgtagttaactttatgggcgtttctgggggtgttgtgtggttcggcccatgacacgcttgtttctcgaacgtgcgaaccggcacgcccggcgtagagcaggcctgctcttcccgaactgacggattccatcagtcgccgactaatgcgacacagactcgaaggtgacgccgttgcgggcggctttgcgctcggccttgcgctcctcggcgttttcgatgcgctggatgcgcagctggcgccagtcctcgcgcatgtcgcggaaacggtcggccagcgttacggcatcgtcatcagtaccgctgccatcggccttaccgaacgtgccatcggccaccttggtgatgcccagcttgagcagtccgagcaactcacgcaacgtttccggtactggctcatcgccctcatcggcggacttggtcaggccctcgatgcgacgacgaagcgcgtcggcgtcctcgggatcgatcttgagcccggcgatcagcgactggcgcatggtctcgtaatcgaggttggcaaagaaattcagctgttgcagcgtcatgaagcccttgagctcggggaatcggtggacgatgtattcctcgcggtcgtcggcggcgcgggtccagtcgcgggtgagctgcggatcccagttggcggtaatcgatccctcgcgcatgcggtagtggtacagcgccttgggcagacggaccacgcgcgtggcctcgccgatcacgttgcagatacgggagagatcctcgattttgcgacccaccgggaaggagaatccggtgccctgataggtggaggcgggtgccaggaaggcccagaaatagccgtcgatctcagccttgacctgctttttgatggcctcgaccggggtcaggatctgcacctcggtgaagtcgttgtggcgatagttggacagcagcggcttgttgttctcggagatggtgtcgaactggaacatcacgaggtcggcgtcatactcgcgcatggcgttcaggcagtcctccaccaacgtgggggccacggtgtcgtcggaatcggcgaagtatatgtacgcaccggtggccccggcgatgccggtgttgcgggcgtcggacaggccgccgttgggcttgtgaatcacgcgtatgcgcgggtcgcgggcggcccaggcgtcgcacatggccgggcaattgtcgggcgagccgtcgtcgaccagcagaatctccagattggcgtacgtctgcgcggcaacggacgccacgcattcgtcgaggaacttctcgaccttatacaccggaataatgatgctgaccaacggctcctgttccatgcctccagcgtagcgccgtcgtgcgaacgcggcggcgctgcgggttcgcggaccgcgaaacccttagaaatcccagtcgtcgtcatcggtttcttcggctttgcccatcacgtaggaggagccggagccggagaagaagtcgtggttttcgtcggcgttcgggctcagggcggccaggatcgcggggttcacatcgcaaatctcagccgggaacaaagccgggtagccgaggttcatcagcgccttgttaccgttgtaccgcaggaacttctcgacgtcatcggtcaggcccacgcggtcgtacagcgactgggtgtactccacttcgttgtcgtacagctcgttgagcaggtcgtacgtgtagtcctgcagatccaggcgctcggcatcgctcagctgggcgatgcccttctggtacttgtagccgatgtagtagccgtggacggcctcatcgcggatgatcagacgaatcacgtcggcggtgttcgtcagcttggcgtgcgcggagaagtacatcggcagatagaagccggagtagaagaggaaggattcgagcagggtggaggccaccttgcgcttgtacgggttgtcgccctcgtagtagtcgagcacgatttccgccttcttctgcagaaactcgttgttctcgctccagtcgaatgcggcatcgatctgttcggtggagcacagggtggagaagatggacgagtagcttttggcgtgcacggattccatgaaggcgatgttggtgtacacggcctcctcgtgcggggtgagcgcgtccggaatcaggctcacggcaccgaccgtgccctggatggtgtcaagcagggtcaggccggtgaagacgcgcatggtgagcgtgtgctcgtcctcggtcatcttctgccagctagggatgtcgttggagacggggactttttcgggcagccagaagttgccggtcaagcggtcccagacctcaaggtctttctcatcttcgaggcggttccagttgattgcggagacgcggtcgatgagtttcagcggtttgcgcggaatggaaatcggtgccatgagtgttccttattactcgttgtcgttgtcgttatcgtcgttggatttgttttcgaactcctccggcgcggtcagccggagcagtgccctatagatggttcgtgacattgttggttccttagatggtggagccccccctcagtccgcttcgcggccagctcccctctctgaggggagctgtcggcgttagccgagtgaggggagtaacaacggctctctggttgttcaatgcgtgcggagaccgccgtctgaggccgaaggcgtacgaaggtacgtcgagtgccgaagaaaggcggtatacgctccctcgaacgatcagagcatgcaggagacgcagccttggacttcagtgccttccagggcttgctggcggatgcggatgtagtagagggttttgatgcccttgcgccaggcgtagatctgggccttattgaggtcgcgggtggtggcggtgtccgggaagaacagcgtcagcgacagtccctgatccacgtgctgggtggcctcggcgtacgtgtcgacgatggccttccagccgatctcgtaggcgtccttgtagtacccgaggttgtcgttggtcatgtaggcggccgggtagtacacgcgcccgatcttgccttccttgcgaatctcgatcttggaggcgatcgggtgaatcgagctcgtggaatggttgatgtacgagatcgagccggtgggcggcacggcctgcaggttctggttgtagatgccgtccttcagaatcgcgtcgcgcagggcctcccagtcggccgcagtcgggatcgcgatgccgtactgttcgaacagcgcacggacccgttcggtgcgcggagtgagcgaacgacgaccatcggtgtacttgtcgaagtagttgccctggccggccggcttggcgtagtcgctcgtagcgaagctggcgaacgtgcggccatgctccacggcgagcgcgtgcgaggcacggtaggcgtggtaggccacggtcatgaagtacatgtcggtgaagtcgaggccctcttcagaaccgtactggatgccttcgcgggccaggaagccgtgcaggttcatctggccgagaccgatggcgtggccctcctcattggcgcggcgaatcgaaggcaccgcgttgatgctggtgtgctcggccaccgaggtgagtgcgcggatcgccgtctccaccgtgtggcccaagccgccatccatcgccttagcgatgttgagcgaacccagattgcaggagatgtcgcggccgacatgcgcatacgtgaggtcctcgttgtatgcgctcggctcctgaacctgcaggatttccgagcacaggttggacatggtcacgcgaccttcgatcgggttcgcgcggttgaccgtgtcctcgaacacgatgtacgggtagccggattcgaactgcagttcggcgatggtggtgaagaacttacgggcgtcgatgtaggtcttcttgatgcggtcgtcggccaccatctcgtcataatgctcggtaacggagatgtcggcgaacggcttgccgtacacgcgctccacgtcgtacgggctgaacagggccatctgggccttctgtttggccagttcgaacgtgatgtccggaatcaccacgccaagagccagcgacttgatgcggatcttctcgtccgcgttctctcgcttggtatccaggaagcgcaggatatcagggtggtgggcgttgaggtacaccgcgcccgcgccctgacgtgcgccgagctggttggcataggagaaggagtcctccagcagcttcatgaccggaatcacgccgctggactggttctcgatgtgcttgatcggggcgccgagctcgcgcaggttgctcagcagcagggccacgccaccgccgcgcttggagagctggagggccgcgttgatgccgcgcgaaatcgactccatgttgtcttcgatgcgcaccaggaagcagctgaccggttcgccacgctgggccttgccgaggttcaggaaggtcggggtggcgggctggaagcggccggcaagcatttcgtcggcgtattcgatggcctgctgctcattgccggcggcgagctccagggccacagcggcgcaacgctgcgggaagtcctcaagatagaggcgaccatcgaacgtcttgagcgcgtaggacgtgtagaacttgaacgcaccaaggaaagtgccgaactcaaagccggcggattccacgtgctcgtagatgcggtcgaggaattcagcggagtactggttgaagaccgcagggttgtagtactggttgctgatcaggtattcgagacgctcggcggtggaggcgaaccgcttgctgttggtggccacgtgccctgtcacgtattcgcgttcggcggccttgtctttgtcgaactggatcttgccgtcggcgtcatagaggttgagcatcgcgttgagcgcgtggtaatcgtgcgccgggtcgtactgttccgctgcggtgtcggcagtattgtcgagcggcaggccggtggcggtgaggtcagtcattggaaatccttggaatatggcagaagtgtgtttactcagacagttgctccccccagtcaacttcgttgacagctcccctcggagaggggagccaatacctcgagggggtcaagatttactgttcggtgaagaagcggacgaggccgtttcgcacggcggcagtgtcttccggggtgcccatgagttcgtaacggtagaggtagggcaccttgcatttggcggcgatgatgtctccggcggcacagtaggcctcaccgaaattggtgttgcctgaggcgatgacgccgcgaatccactcgcggttggctggatcgttgaggaagcgtttgacctgaatcggcactgctttcttgaccacgccgccgccataggtgggcaccatgatgacgtacggttcgcggacgtttagcgccgggtcggcggcccgcaacgggatgcggtagacgttgatgccttcgtcctgcaaacggcatccggccacgaaccgtgcggtgttttcggaggccgacgagaagtagaccaatgcgccgatcgtcttgccttcggccgcgaattcgggctggctcagactcacgcggacaccgtggcggcggcgcggttgtcggcggccacctgctgggcgacttcgcgaatcaggtcggggcggtagccggtccaggagttgtccggcgtgatgaccaccggagcctgctggaaaccggcggcctgcagctgctcaagggtggaggggttctgcgtcaggtccacggtttcaaacggcacacccagcttggtgagctggcgcttggtggcatcgcactgcgggcaatgcggcttggtgaacacggtgacggtcatggcgactccccttgatgtggttctgatgaacagtgaagcgaaggccatattacagcggtgtgatttgaaatcaaggcactatatgtagtggcgcgtgtcacataacaaacctagatatagggtttttcgttgatattccgccattcccatgcacccccgaaaatcggcgtgcagcgacccgcccaatcacatgtggcattgttcacatttgcgtttgaaccgctcttcgactgatcctcaaccgccctgcaaccgccatcttgagtttcgaggggctgttttgaccctttccggagatctatctccgtttcgaggggctggtactcaagtaagcgcatccccaaaatggcggaatgacggtggggcgaagccgtttatacccgtgttctagcgggccaccagcccctcgaaacgggagtaaacctctacggaaggccaaatcagcccctcgaagcggagaacggatacctcggcaccccgtgtggagccagaaggcccggccggatgtccaaacgagcatccggccgggccttaaaagtagttgttcagttatcagaatcgatgcggcgcgatactactccgcgtctttacggctccaacagatcttcgatgcggcagccaagcgtgcgggccaaagcgagcacggtggagacggcagctttgccaaggtctttgcggcgctgctcgtacatttggatggagcgcagggtaacgccggagcggcgggccagcccggattggctgagtccggcgcgcacgcggatcgtgtgcagccgggagtcgccctcggtgcgattatgggcggcccgctcgtcgtacacgtcgacgaatcggctttcgtcggcttcgtgcagagtcgggtacagtcgcacgatatcgtcgagcgacagcacatcgagaatgtccgagaaccgcactcccctggtccattggcagtatgcgagtacccatccggcccagtattcgggtgttgagccggcgcgcagtgcggctggcggcatatcgagaatgcgcgcccaaccggtttgccgcatgatttcggccaccagctcctcgccggacatgccacacacgtatttgggcgtgcctcgcccgaaaagcgcggccgcctcggaggtggcgaagaagtccatgaataggccgaccggcaacccgcaatcgttcagcgcataatcgaaggcgccggccaagttggccatggcgtccggcaagtatgtctcatcataggcggggatcatcgttggtcactttctcgcggatgatgtcgcgcatgaacaggccgtcgagatcggcttctgcacttttgcggcggtaggcttcgcgagctgtgcggtcgcgctcgttacgcaatccgtggtaggtcgaagcgcgggcgatttcgcagccttggaaccgcagtgccgcgaatgcctgaggactggcgagtacgatctgcttgccgagctcgcccaaccgcatcgcctcagcgagttggtcgatggaaatcgcgttattgacaaaagcgcgggcgaatgagaaatacgaatcgtcggcacgatatccgacgatgacgtcagcctgactggcatccggcagaaacacttgtttcagatattcgatgccttgcgcggcgacggcggtggtcggctggaaacgacggttttcgaccagcatggccagccagttcaggatggtgtagggcggctgggacaggtccaggaagaggagcccgtccgtggtcaacgtgtaccgattcgcgaaaccgtcatccagtcccgcgcacgcccattccttggccagctcgacgctgcgcgtgcaatagaatccgcggccataatcgttgttcggcttgaccagcccgtattcaggatgcttgatgacatgcgaagagccatgccacagttcgatcgatgcggtctccattggccggctccttctctctccttacatattcttgattatatcactgtggtgatagtcataagggaaatacgagatgaaaaataccgctgtatacgttcgtacacaacgtgaaatgtatacgaacgtatacaacactgatgtccggagtcatgctccgcagtggcgcagcggacgcgccactacaatcggaatatgggactgaagacgtggaagaagtggacggactggccgctgatggtgctgtccgtggtgtttctggtggtgtattcgtgggaaattctctcccgcacgcatatcgcgctgtgtgaaaccgtcatcaacgtgatctgggtggtgttcgtcgtcgattatgtggtctcgctgtggttggccgacgatcgctggcggtggttcaagcacaacctgttcacgctgctgaccatcgcgctgccgatgctccggcccttgcgactgttgcgtttgctgaccgtgctgcacgtgctgaaccgcacctccggcatggcggtgcgcgggcgcatcaccgtatacgcggtcggcgcggtgggaatgctcatgtacgtgggcgcgctggccgtgtattccgtggagcgcggggcgtccggatccacgatcaccgacttcggcacggcgttgtggtgggcgttcgtgaccgtgaccaccgtgggatatggcgacttctcgccggtcaccttccaaggcaagatcattgcggtggtgctgatgttcaccggcatcgcgttgatcggtattgtgacggccacgctggcctcgtggatcgtggatcaggtcaatctggagacggatcggcgcgaggacgctcgggagaaggaagtggccaaggaagccgcgcaagaggctattgcaacatcagccaatcccgaaatcgacctattgcgcgaggaagtgcgtgagctgaccgctacggtagccggtctgcgcaccgaacttgagcgacgttgattggcgaagcgggacaaacaacgattctgccaagaaggtccgcgtcagttgttgtcaccgcggattgcggcagaatcattgtcgccacggctgttttcttcagtcggctcaacccaacttttgataatttttatttttttgatatttttgataatttttattttaggttgattcagcgaggaggcggtccacatgaaggcaaaggaaaacccattcaagccaacggcaggaggggaaccgcccctgctcatcggccgaggcaaagttatccgcgatttcgagaaaggtctcgataacggagtcggtgccccagggcgcattatgcttgtcaccggcgctcgtggaaccggaaaaaccgtgatgctcactgtgttcggagaccgggccaaagcgcgcagatgggatgtcatcgaagaaacggcctctgccggactatgcgaacgccttgttgatgccttacgaaccgggcgaggggcccttgaccacctcactatccgaccatcgttgacttttgctggagcgggcatcggcctcggagaagccgaactatccccgaagcgtatgcccgaaacgttgagaagtgccattgccggacggttggatgcgcttgagaagcgccatgctgggttgcttatcaccattgatgagactcaagcggctgagcgatccgacatgattgccatcgccactgccatacagcatcaaatcagggaacgacgcaatatcgccatcgtgttcgccggtctcccacagatgatttctgatttgttcaatgacgaagtcatcacgttcctacgtcgcgcgaaaacgaacatgctcacagatattcctcttgatgaagtgcgtgatgctttcgccacaacattccgcgcctccggcatgtccatcaccgacgctcaattaagcactgcagccaatgtgacagccggatacccctatatgattcaactggttggctaccatatctgggatgccgcagacatgcgggactcggataccatcatcgacgctgatgttacggcaggtatcgaggaagcacgtattgaccttgataacgccgtgtgcatcccggagttgcaaggcttatccaaaaacgaccgtgagtatctcgaagccatggcagcgtcagatggtccctctcccaccgtgaatgttgcacagcgcatgggcaaaacgcctaactatgccgccacctaccgcaaacgcctccttgacgccttcgttatccgcgaaacagaacgaggcgaagtcgattttgccgtgcccttcctgcgcgaatacttgcgtcggaatcagtaatcggcacaatgcacagtatcgatatattccgttccatataatgacttttcgcattcagatacacaatggacggcctgttgagtagcactcagcaggccgtccattctatttagctattcagttatcggagacacacctcaggccttggcctgagcgccagcgacctgctgggaggccatcacgccgaacaggtagccgtcttcggagaagtattcgaaggtacgaccggcgaagtcgcggcattcgaatctgatatcgttatcgattcgatcagcggctcacgatactgcccttgcatcgctgtgccactgttgaatgtgcccggctggctcacctttgggtcaccgccgacacatccttgatgccgatggttatagagtcgcaaattcacgactggcgcacctgcccacgcacctatcctgtcatttcgagcgcataatttgctaccacatccggtcagggcaatcgaccttaatggcgtaaacggcacttctcaatacgtaaacggcacttattcttggctcccctctcagagaggggagccaagaaatatcaagctcggcctcccaggagagagccagaataatgcaccggcaaggcattaggatggagggcatgagcgatttgaacgcgttgaatcttgagcccggcgaagtggttggtgggtatacgctgatctcccggctcggctcaggagctatggggtcggtgtggcgggtgcgcgacgacggcggcaccacctatgccatgaagattctgcgcgactccctgaccgacgagtcagtggcaggctccggctctgcgtccacggccctgcacgaccccgacctcaagcccgatgtcacgccgcgcgagcgcctgcggcgcgaggccatggccttgaagaaggtcaatcatccgggtgtgtgcggcatcgtggatatggaactcgacgatacgttggcgttcatcgtcactgaactcatcgagggcaagaatcttaaggatgatgtggccgccaatggccggtatgtgggcgacgatctggaacgcttggcccgcaagctcatcgaagccaccaaagccgtacatgcggccggcatcgtccatcgcgacatcaaacccaccaatgtgatggtgtcggccgccggaccggtattggtcgatttcggtatcgcgatgggcgagggcgaaagtcacgtgacccgcaccggcctagtgatgggtacacccggattcatcgcacccgagattattgacggtgccgaatccgacgacgccaccgattggtggtcggtggcgtccgtgctcgcttttgccgcaaccggcgcgcctgtgttcggcaccaagccgatgatggcggtacttgagcgcgaggcctcgggcaacgcgaatctttccggactaccggccggcacattggctgccttccgttctgcactggacccggatcgcagggatcgttgcacgccggatcaattgctgaatgccatcgccttggatgcgttgaatcccaacgcttggcagggcgagcaggcgggaccgttcgccgcgggagccgtggctggacaaccggctgcgatcgttgccgaagccgcggaggcgatgcccccttttggcgcggccggcggcgttgaccgcaataatccccgaaccatctggcgcgcggccgaggaagccgctgaggctcccaccatggccgtgttctccggcaataagggcgataacggcgatggcgaaaccgccgtattctcgccggctggcgccgctaccgccacgctgcccttagccgatatgccgccacgtccgccggccggtgcggagcaggccacgcaactgttgcccgacgctgctgccgatttcaccgacgacgccggcacacaggtactcaccggcgcgaccacaccgatgccggaccaaaccacaccaatggccggcgccaccacaccaatgaccaacaccgattcgactccggccccgaccacgccgctggccgagcgcaccaccgtactccccacgccgcagccgtcatcattccccccgtccggcaccgcccagagcagctgggatcccgcaagcaaccagcccacagcggtggaccccgccattcgcccggcattgcagcgcatcatcgaccaaaccgcccaagcggcccccaccgaaaccatggtccaaaatcctcccatgcccaatccggtggacgtgaagcgaggggaatatctgcagcgcggcaccctgccattgatcctgctggcggcgccgctggcggcactggcggcaaatgctccgctcgtggccatcatcgcggccactgcgttgttgtggctactgctcaccctggcctataacaccgaaccccagcttgagcgcgagggcaaacgcggcggcgagcgcaaaaactccgattcgtggattcgcgtggcgacttttccctggcatctggtcaaagccctgctgctggccattccccgcatactgctgctagtcatcatctatatggcgggaaccgccgtggccaccgcggctctggcactgcccgttcacaccatctcctggtatttcaccgaggattggggtattccggtgccgttgctcaatgatgtgccgttctccgcttccgggctggcgctgggcggtttcatggccatcggctggctggtcactgtgttcgccccacagtcgatgatgattcggctggggggcggcgtactgcgcgggctcaaacacagtcgcccggcgggcgcgccatccaccgaagtgggtggggctccacctgctccagtggcgccggcgcccaagggcggcgggcgcggcaccgtgctgttcaccatatgggccatcatcaccgtggccttgtgcgcgatgccgattctgggcatgccgatcaactggatgccgttcgcctagagcggggcggaatctcacacatcagccatccgcacacatggccgttgtgtatccgatacgttcgttccgtcacacttttacagggaattcacctcagatcagctctgggcgcagtcctcctcaggcccggtcattatgatggggcccaaacattgaagcgattgcaaggggatagctatgtcagatccgaagcgtcaggccaagcgtgccacacgcgctgagcgccgagcggccgaggaggccgcccagcaggcacgggccgagcaggcggctaaggaacgtaagcagcagaccatcatcggctgcattgtggtggccattattgtggtgctggtggccatcgctggattcgccgtatacaaggctatgcggccgtccaacaccagcagcagtagccagcaaagcaacatgaccgtggacgaggcctatagcaagctcaagaaagtcagtacccagccggccaacgccgatgacaaggccggcttcgtgatctcgagcaaggggtacggtcagaaggccgaaggggcgcccaccgtttccatctacatggagccgctgtgccccggctgcgcctcggtgaaccgccagcttgacccgacgctcatcaagctgatgaacgccggccagctcaacatcgatttgcacttcctcaatttccaggacaacaagagctccgacaactactccaaccgcgcgttcaacggtgccatctacattgccgagcatgatgacaatcccgatcacctcatgagctacctctccaacatctacgctgaggatttccagccgggcgaattgtccaattacgagccggtaagcaacgccaagctggagaagcaggccgtcaatgccggcgtgagcgaggatgtggccaccgcggcattcagtggtaagaacgaatacgtcaagtggctcaccgcctccaacaactacacgatcctacgccccgaactgttcaacagctccggcgcgttctcctcccccacgctcaccatcaatggcgaatactgggatctgaagcagctcacgctggcggacaccagcatggtggacggattcctcaagtccatcggcttggactccgatcaggtgggcgtggaaggccagatgccatcgatcggcgccaacaagaagccgatttcgctggccgattaattaccggcgcggctcggcctgaattgaccactcgagaactaccggtatactagagatttgttcaaaacgatttacgcgttaagaacaatcgcctctttagctcagatggccagagcggccgccttgtaagcggcaggtcgtcggttcgatcccgacaagaggctcgacgcgtagaaaagtggcgtattatatgatacgtagacttttctacgcatataattcttaccttgggtaagtactccaggagccttcccccaactatgggcttcctggaatgagggcggagcgtcccccaaccagctccgcgccttcagggggggcgggaacatccccttctctcccgccccctttttcttttctttttttgagctcagaacaatctgacgagcaggaatggtgacggtggccggtgaaaccgcagtacgggccggaacaaccgttacgatgggtggcgtaatcgttcatccagcaggaagagtatggcaatggcacggcgttggaccccgcagcggtttgttacactgcgtcgcatccgcgtaatcgcctgtatcgcggcgaccagtatcgcgctggctggatcattcgcgttcaccgcgcgtaaatccgtagccctgaacatcaacgggcaaaccacccaagtcaccacatatgcgatgacggccacccgtcttctggaggaacaaggggtggatatcaagacccacgatatcgtcactacctcgtccggcgaccaactcgccaatcatgccgtggtcaccgtacagtccgcctaccagaccactatcaacatcgacggcacgtccgttcccttctggaccgtggccaccagtgccgaccagttgctgggatttttcgaggaaaaccagaacaacgccacaaaaatcaccgtcgacatcgacaatgtgtacaaccagctcaccggcggactggtcatcaatcaggatggcccggtcaccgtcattgcggacggcaagacttccgtggcccccaacggcaaactgcctgcggcctccattcttgactccaaaggcatcgtgctgaacaaagaggaccgtgtgagcgtcgaaaaggacggcgataccactatcctgcgcgtacggcgcgtgacgcatggcgaggaaacgcgcacagccgtagtgccatactccacacaaaccatcatcgactccaatctgcctgaaggccagtcggagatccgccagcaaggcgtcaatggcgagaaaacccaggtgtataacgtcacgtatgtcgatggcgtggccgaatcggagacgctgaaatccgaaaccgtcaccacgatggccatcgaccagatcatcgccgtaggcgccgccaagtctgataccgataagggttccgataaaggttccgacaaaaaatccgactccgccgataacggcaaggccgattccggttccaacaatcagcacgagtcgtccggtaacaatgccaacaacacaggcgacaagaacaacagcagctctggcaacaacacgaacaccgataccaacaacaatgccggcaacaccggcggcaacaactccggtaacaccggcaacaccggtaacaccggcaacaccggcaacaccggcaacaccggcaattccggtaacactggtaattccggtaacaccggcggcggtacgaacaacaattccggctcttccggctccgattcaggaacaaccaccacgccctccggccgactctggcacgccaccgtagcccaggctcaggcctatgccgccggtgccgccgcgcagcgcgggtggacaggcaacgactgggattgcctggtcaaactatggaaccgcgagtccagatggctgtggtatgccgaaaacgcgagctccggtgcctacggcattcctcagtcgcgaccagcagacaaaatggctgcgttcggcgccaattaccgtgacgatgccgccgtacagatcgattggggtctgtggtacatcgcacaaacctacggcagcccgtccaaggcatggcaacattccgaacaaatcggttggtactgatcggttacgaagcccacaaggaacacacgcttatgaacgacaccattcccgccaccggtcacctgttaggtgccgccgatatccgtcgtatcgcggccgatgccggcatcagccccaccaagaaattcgggcagaacttcgtcatcgaccccggcacggtccgtcgtatcgtacgagaggcgggagtgaccgctgccgatcatgtcatggaagtcggccccggcctgggatcgttgacattggcgattctggaaaccggcgccaccatgaccgcagttgaaatcgatccgccgttggccgaacgactgccgggcacagtcgccgaattcatgcccgaagccacgtcacgactcaccgtcgtcaatcgggatgccttaaccgtcaccccggagaacgtgcctgatttcagcgatgacgcatcgtttacgctggtcgccaatctgccgtacaacgtggccacgccgattctgctcacgctgttggagcgtttcgacaacctcggctcgttcttggtgatggtgcaaaaagaggtggccgacagactcgccgccaagcccggttccaagatctacggcacgccgagcgtgaagctcgcctggtatggcaccgccgaacgggtgggcaccatcggccgcaatgtgttctggccggctcccaatgtggattccgcgctcgtcagattcacccggtatcaggccgatgacccggccgccccgggagcctcgaacagcacggccgacggcggcgcacaacgggaactcgtatttcgtctgattgatgcggcgttcggtcagcgtcgcaagaccctgcacgcggcattgaagaccattgcgccctccgaggcattctccatcgccggcatcgatccgacccgtcgaggagagacgctcaccatcgccgaattcaccgctctggccaaggccatcgaatcgtgtggagatggagatgaggcacaatgagtccggtaatctcacatccacgcccagccgatgcccgacatcagttcgatgagctctcccccatcaccattacggtggattgcccggcgaaaaccaatctcaccttggaagtgggacctgctcatgacgaatggggcggacgccacgaactggacaccacctactgtgcaatcggcgtatacgacaccgtcaccgcaaccgccaagcaacccggagcgggattctctctggagctcgaaggcgcttatttgggcgacttggcctcctcacgcagcgacatgcgccgcaaccatgcggtactggccctcttcgccatggcccaggcggccgagcgcgagccggatgtggcgttgaccatcaccaagcgcattcccgtgggtgccggactaggcggcggttcagccgacgccgcggcgaccatgctggcggtcaatcgtctctgggagctgaactggcctatagagcgtctgcgcaccattgccgccacgttgggcgcggatatgccgttctgcctgaccggtggccttgcatacggcaccggtttcggcgaacgcatcacggatatcgcccccggcagccgcgatgagctggcgctgatagaacagggattcagcggcgaagtattggtcggcgcgtaccagtcgcaactcagcactcctgaggtctaccacacctttgacctcgtgggagccgcagaaggcgaccgcaatcatctgcaggctgcggcaatcagcctgcatccccgcagcgggcaggccatcgacgccgccacgcaggcgggtgccagccatgcattcgtctccggatccggcccctcagtggtcgctttcgccgccgacgaggcagcggcacaacgcattatcgatgtgtggcgcgatacggctgtggtcgatcgcattattcgagccaaatctcccgcacaccccaatatcggcgtcagacagtgacgctaaggtagcaaccagccacccgacccatgaaagaagtccaccgatgacgtatcaggttgatgaacgtgaagcccgcaaggcgtacgtgcgccaccgccagaccatcgtcttttccatcagcggcgcggtattggcagtagtgctggtcatagccctactgttcaatttccacgttttcggcctcggcgaagtggagactccggcccgccagccgaattacggcaacgcggcgccgtgcgcggtcaaggacagcagcggcaaagcgcaatacgtgtccaacgcttcggtcggcatccgcgtgatgaacggcacctctcacggccaattcgccaaggccgtgggtgaggctttggccaatcgtggattcagcgtgcagaaaatcgataactattccagcaccggcgttgaacgcaccaccatctacttcggcaagaacgccattaatcaggcgtatacgctgatcggcaatttcaccgacgccaccatgatcatgacggctcgcgaggatcaactcatcgatgtggtcatcggcgccacgttcaacgatctgcaggacaccaaatcctccccacaatccggtaagaccatcaccaatatcgagggttgcaaggccgccgatagcatgaccaagctgcccgccgacaccaaacacgacgcatacacggcggagtaaggcgcatacagcttcatcttcgcgaaaaaccgtacgctgacacgtattcagcgtacggttttttggtatcggactagtatcggactactgaatctcggcgtaccagcgcttgagttcttcgacggccacatcgtggtccaccggaccgttatccaagcggtattccagcatgtgcttgtaggcgcggccgatcatcgggccaggctccaggcccagcaactccataatttcgttgccgtccagatccgggcgaatcgcgtcgaagtcctccttcttcttgagttcgcggacgcgctcctccatctcatccatggcctgggagaagatcatcgccttgcgcttgttttgtgtggtggcgtccgcgcgcgtgagcctgttcagccgctcgtacaggtgcccggcatccttgacataccggcgtacggccgagtcggtccacggctcgtccacataaccgtggaagcgcaggtgcatattcaccagttccgagacgtcctcgaccagatggtggtcaaaacgcagcgccttcaaacgcttgcgggtcattttggcacccaccgcgtcatggtggtggaagctcactttgccgcccggctcgaaccggcgggtcttcggcttgccgatatcgtgcatcacggcggccaagcgcagcgtcaggtcgggggcgggcaccgggccgtccgggccggtttccagggcgatcgcgcgttcgagcacaatcatcgtgtgctcgaagacgtccttgtggcggtggtgttcgtcgatctgcaattgcagggccggaatctccgggaagacgatgtccgcaagaccggattcgaccaacgcctcaaggccggcgcgcggacggtcggagagcagcagcttggtcagttcgtcgcgcacgcgctcggcggatacgatgtcgatgcggtcgcgcatcgaggtaatcgcctcggccgcgtccggcgcgatacggaagcccagctgggccacgaatcgcacggcgcgcatcatacgcaacggatcgtcgtcaaaggactgtcgcgggtccaccggcgtgcgcaacacgcccttggacagatcgctggcaccaccgaacgggtccacgaattgcaggtcgggcacgcgcagggccatcgcgttgacggtgaagtcgcggcgggacaggtcgccctcaagcgtgtcgccataattgacctcgggcttacgcgagtccgtgtcgtacgtgtcggagcgataggtggtgacctccaccttgacctcggtgccgtccgggcggcggcgcatggcacccagcgtgccgaacttgcgccccatgtcccagaagccgtcatgcccccaccggcgcagtatcggctcgaactgctcaggccgtgcggatgagcagaagtccaaatcgtggctctttctatggagcagcaaatccctgaccgggccgccgaccaatgccagctcgtaaccctgttcggcgaacagtcgaccaagttcgatggcttcgggccatacttcgaaattcaatgggcaccttcccgcgtgcgacgtttttctgccctaccagcataccgttaccccacctgcacacggggttgagtaaggtggagaatatgattacgcccgccgaccttgcccgcatactggggcaaacaccagattcggcggatagccatacccaagaccacctgctgtatacgtccgaaactccgcatcattccgccgattcgggcgattctcccgatgccggcggcaccgtgagccactccaccaatcaggccgttcatcaagacgaagtagacgcagtaccgactgcgcaacattccggtgtacccggcacacccgcaacgcccgtcacgcccgcaccatccgaatccgaaatatcggacgccgccagcgacatgcccacaccgaagccgatgatgcccacaccggccaccgtcttcggcatgcatgccaccgtcaccatcgccactaccagcggcactatcgaggggcaggccgatggtatcgccggcgaggccggtgccgagacgattgccaaggtcgagccgattatcgccacggcacaaacgtccgtaaccatcgtcacgaacgattccgcggcgaccgcccacgcggtcgtagatactgccgttgcggtcgccaaggccgccgccgcgcataccgcagcgataccgactccgcgcgacgtgctgatgccgcctgcggcacgtaccgcaccggccgcaacgccggtcaccatgccggtctcagcgccgtctgcagcaccagtgaggcccgcaacgtcagcgcatcccacgccggccacggtcttcggccggcatccgtccgcggatgttgcctcgccggaaccggcagtgccagtagaaccggtgacgccatccagcccgactccggccatgatgccgcaacgccgtacgtcggacggtccgaccacattcgcttcactggatgcccaggaactgccggtcgtacgcgaatattcggcaggcggtctgattttcgatgaccagaatcgcgtggccattatcgcccgtcattcccgctccggccatctcgaatggtgcttgccgaaggggcatatcgaaaaaggtgagaccccgcagcagaccgctgtgcgcgaagtgcatgaagagaccggcatcctgggcgaggtgatcgattccatcgccaccatcgactactggttcaccggcaccacgcagcgcgtgcataagctggtccatcacttcgcgctcaaacagaccggcggcgaactgacggtggaaggagacccggatcatgaggcggaagacgccatctgggtacgttttgaagatttggatgacgtgttgagctatcccaacgaacgcaaaatcgcgtggctctacgccaggaagaagaacaggcaggcaaacgagtgaacctacccggagtcttacgacattgcacacgtctggcacacgcactggcggctggcgtcgccgttgtggcgatgctggccgctccattgaccgtttacgcgaacgatacgacggacacgactgattcatccgatacgacggacgcaacgggcaatcataccgagaatcagcccaagcagagcattgccatcacgcaaagcacccccatcgtcacctccaaatcgggctatcatgtcaccgcggtcatcagcaatacggacagcacggccacgtcaagcggcacactgcacctgaccaccaatacgctgttcacctttgtctcgcgcaccgatattcagaattgggccgagaacaacgcccccatccccacccccaacgagttgggttccgttgacgtgccatcgattcccgccggcggcactgccaccgtcaccatcgaggtgaacgccaatcagcagacccttgcctccatagggagctgggggccgaagccgctgatgctgtcgtatatcgtcggcaatcggatactcgccgatttgccgagttttctgacccgatcttcggatgggctcaacaccgcgacgacaccggccatgaacctgaccgtggccatgccctacaccgccagcggctggcaggtcgataacaaggccatcagcaatcgcattgccgaaaccaccacttcctcgacatcaacatcgtccaagtccaacagcacggacaaggccgacaagtccgataacgccgacgccggcaacgcggccaaagccactgatacgcaagccatatccttatccgagcaggatgccgataccgcgcgatcccttgggcagacattcgccaagcaccgctcgctgcaagtgatcgcggatcctctgtattggcgtcagtccgcagtgcaaccgtccattgccggcatcatgcagcccgccgactttgacatcaccgcctataccgcgctgggtgataccgcggcctacgaaaaggccggcatcaccactgaacagtggaacgccaagcaggcggccgcatggtatgccgccggaaacgactccgaaacaccctccgcgtacgcatggcagggcaacaactgttggacgttggatgcgctgaccgcagcacgcgagcagggctatgacacggtgattgccgatgcctctttcgatgccgaccagactgaagccgtacacacaggcacctacgtggtggatacgcctgccggcgatgtcaccgtgctgaaggagcaatcgaccttgggcatgctggccaagggccaacccaccagcacggacgcgcaggccgagtccagcgatgccggtcggttggcccgactggtcgctcagagcgcgttctaccagatggaacagccctatacatcccgatacctgcttatgacgttctcccgcaccacggaggccagctggatcgatcaggtgatgagcgccttcgagcaggcgtcctggttgaatctgacggatctgaagaccatggccaaggccgatccgtacaatgtcagcgattcggtcaatcccgacaaggccgatgatgccaacaccgccaatacccggtcggcattgagacagttggccgacagccggcatgacatcatgcgcatggccacctccatattgaagaacgagattgattccgacgaggtctcgtcgttggccccgcaggccctggcccggcaggatgccaatgacaccgtctcgcacagcaacgatccgacgcaatggattggctctttgctggtgctgcatgacgatatggcgctgcgatccatgtctggctccccccagccgacagccacgcgaaaagccatggtcagagccgcgaaaacactggccagcgatcttctgaacggcgtacgcatcaacccatcggaatcaatatccgtgttcagcgaatccgcgaaaatgccaatcaccatcagcaatgaccttccctacgccgtcagcgtgcaggtcaactcactgactgactccatgcagatcgtcacctcgcgaaccgctgacatcgatattcccgcgcatagcgacgctcaggtgaccttcaccatccgcgtttccacttccggctcatcgacggcccatgtgtcgttgaccgaccgggaaggcaacagattcggcaacacgcaggacaccgcgatcaccagtgtgatgcgcatcagtgatgccagcggcttcattatcattggcttcgccgtgctattgggcattatcggcctgtggcggcagttccatcggaagaaggaccccgacgaatgagttcaaccgtaggtcgtaattccctgatcatggccacgggaactgctgcttcccgtgtgaccggtcagctccgcacgattcttctcgctgcggccatcggcaccaccggattggcggccaacgcctatcaggccggttccatgattccccaatccgtgttcacgctggtgtccggtggtattttcaacgccgtgctggtgccccagatcgtgcgcacgttgaaagaaaaagacgcccaagaacgactaaatcgtctggttacgttggccatcggcatcctgttggccatgactgtggtgatggcggcggccagccctctgcttgcccgcctgtacgtgggtagcgacgatcaccagatgatagccctgaccacctcgttcaccctgtggtgtatgcctcaggtgttcttctacggcctgtatacggtattgggtcagatcctggccgccaaagaccatttcctcacgtatgcgtggagctcaaccggtgccaacattattagttgcgccggttttactggttttattctgctgttcagcaaggccaatgaacagcccctcgaattctggaccgccgacaagatcgcgcttaccgcaggcacctggactttgggcgtggccttccaagcgctgatactgttcctgccactggcccgtatcgggttcaagtacagacccagcttcgggcttggcggctttggactcaggtctatgggtcccgtggcgttaggctctttgggcgtggtggtcaccagcgagatctgcggcattatccttacccgtatcgccacatccgcaccgcagcgcgcccacgaactgacgggtgccagcctgttcagcgtggcaggcaacgcgacctatcagaatgcgtacacactgttcatcctgccctattcgctcatcgccgtatcggtatccacggctatgttccccaaaatctcccgttctgtcgcagctgcgaatctggatgaggcacggcacgacctagtcaacgcactgaataatgtgggcctgctcatcatatttttcgccgccgccatgattgtgttccccgaaccgatcatccgcgcattgcttccgtccgtctcgatggacgagaccatgctgatttcctacgcgcttatcgccctatctgtgggcactcctttgggatcggcgttcctgctgattcaacgtacattctatgcctttgaggacggtctgaaccccttcttgtccgcggtgatgcagtatgggttcacctcggtattcatgatcatcggcatgatggtgcttcctcctgagcattgggtactcggcatcgcctgctcggtgacactcggcggattactggcgttgcctctgacgttgatgatgttgcgccgcaagttcgaaggcaatcttggcggtcgggagatcacgaggacatatgccaaggccattgtggcggcactggcttccggagttgtggtctggctgatcaaacgaccggtagtcgcactgttcgacgcggatattcgaccagtaggcgggcacatgagctggtggtctgcgctggccatctgcgtggtgctcaccatcgtgctgaccatagtatatgtggctgtgttgtgggtggtacgcaccccagaactcatcagcgcctatcactcgatactggcccgtctacacaagactccggccagtgaggacgttgctgtgacagcccagccggaaaaagtcgacgatacgcaaatcaatcctgagacggagcccgtcaaggatagccccgcacgtagaatatctaagaccagtctcgaacaccaatcacacggagccgaacgcactatgaaaccgcaactcggagacacaattctcaaccgatacaccttggtatcatcgttgcgtgcagagcctggcattcaggcatggaaagccaacgaccgtgtgctggcaaaggattgccagctgttcatcattaccaatcgcagcgctttcgccgcaatcgatgagatcgctggtcgcatcgccgccactcgccctgatcgtgtgattcccgtactgaaataccgtatggaatccgacgtacttctcattgtcatgccggtggatagcggccaatgcctgactgactacatggtggataccgccaagccgctcagctacagcgccatccggtcgattatcggagaatgcgccaacgtgctgcgcgagatcattgcggatactcccagcagcatcgtcatcacaaccgacaccgttcgagtgactacctccggtgtgcaaattgccgatgcaccatgtgccacgatgctggccgatacgtccgctaccgatctgcgtacggacggtcctgaacggtatgcgattcgccagcttgcggcattactctataccctgctgacacgcacgccaagccaagcgacacccacattcaatctgcgtgccttgccgcaagacacccctggcgaattccgcgtgatttgcaagcgtggattggccttgagcgagcccgacgagcatacgttgccaatggctgcccttgtagaactcgacgccttgttgggtaattggaagccgctctctgaactgagcgatgttgatattgctttgccgagcgtggaaagcgattgctcgattaccaaggcgatactgaagcctgccaacgagactgatatcgtgcctattcccagcacgttgattaacagcagcagtcttccggaattgtctattaccccttccctgccggttcagccggcctccatccccgctccgcacgtgatgtcaccggttcctctgcctgatgggtccagtattgctgacggcaaccagtctcagtctgatgcccaccgtctgtttgacttcaacctttctgacgcctgggagcacgagaatctttccggtgaagacaccggtgactggtacagcgaaatgaatccggcccccatcggcggtccgggtgataatgctcggttgacagtgcctattgttaccggcggtatttccgacgccaccgtgggagagacaaccagtcgtattcccatgttcctcgccagcggccgtgctgtggctcctggtgaggaatcgctgcgtgccttggaagaggagcaggcccgcattgccgaagtaagcgccattcctccgagcttcacaccgaaggatgtgccggatgacgaggatgacagcaagctgcccgatgaacatctgttcggtaaactgtcgaccaaggtcgttgccatcattgtggctctgatattggtagtggcagcggctgtttgggcagtgtatgcgttccgatcctccggagacaatcctgccgatgcttccagcaactccagtgaaggtgactggcctgatatcaatgctgacgctgtgccattcggtggcagcaagaacgcgacgaacggtggcaccactgacgattcttcaaagtcaagtgatgccactcagagcggatccaaggactcggcatcagacaagtccaagaagtccgagactgctgattcgtcgtccaagaagaccaaggccaagaagtccggcgataaggattccagcgctgctccgcaaccgcgccatgagaacaacacggcgtttacgatttccagcgccaacttcctgtcgaatcctggcggccaatccgggtacgcatactacatgcaccttgaccagccgcaggatgcgtaccgcatggttatcaccatccgcacatccggtggtaagggctatattcgcgcgaataccactggagaccccactcagggcaagcaggtggccgaattcacctttgctgaaggtggcactactgaagtgaagttcaccaaagccgtcaatacgcaggatctgctgctgtgggtgccatcggatagcctgccgcagagccagctgtacatcgagaaggtggaggtcttctaatcggcatctatgccgataactgacccaagaaggggcggcaccgttcgcatacattcgacggtgccgccctttcttcgcgtctggctgaacgacacggaatatcgtatgggggtgtgacaatgtttcacgtgaaacataacgtcatcattatcggttctggtcccgctggctacacggccgccatctatcttggccgtgcaggtcttaatcctgttatggtcactggtgcgttgtcgccaggtggacagttggtcaacaccactgaggtggagaacttccctggattcccggaaggtattcttggcccggatcttatggatcgcatgaaggaacaggccaagcgcttcggtacaacctatatcgcagacgatgtctcttccatcgaggcgtgtgaaagtgattcggtcaagccgacctatcgtataacgctctccgatgactcccaattggaggcatcggcgcttatcatcgccacagggtcgtcattccgtaagcttggggtgcctggcgaacaggagctgtccggacatggcgtctcgtactgcgccacctgcgatggcttcttcttcaggaacaagcctatcgtggtcgtaggcggtggcgattcggcttttgaagaggcattattcctgacccggttcggttcttcggtcaccttgattcaccgacgcgatagcttccgtgcctcgcagatcatggtggaccgagccaaagccaatccgaccatcaccctgctgaccaacacagtggtgacctccattaccggcacctcctcccccacacagaacaccggtgcacctattgccattcctggcttgacaatcaaacgaccggctgtggcaccggccagtgtcagcagcattgccatacgtaacgtggtgaccggagaagaaagcacgctggacaccaacgccgtgttcgtggctatcggccatacgccggccactgattttgcggccggtgttgtggaccgtgacgatgatgggtatgtcgtggtgcagggtgccagcacggtgaccagtgcgccaggcatctttgctgcaggcgattgcgtggatcgtacttatcgtcaggcgatcagtgcagcgggcatgggctgccgtgcagcgctggatgcgcaggcctatcttacggactgattgcggcggactgatggtggcttgctgttctgtctgctgcctgtgacataggagcaacgttaggtcagtattacagcatgccgcccttggacagtacgtaccagtcagaggcatagaaagacccctcaggcgacggagaatcacgatgtgtgatttgtcatcctccagcctgaggggttttctattgcgacaggggctacaacgcaggcatacgcccctgccaggaatcacgcagaggctataacgtcttgcgcgtacaacgcactgcacagcaataatgccggcgacaacacgaatgttcttatcgtgttacacccatttggaatcggcatcgccttggctcggcaccagcagctgcaggatgcgatccatatcctctggtgacgagaagacgatttcgatgcgaccatgcttggtgctgcccttaatcgacaccttggtgtcgaaatgattttccaaactctgctggatggcggaaccaacccaaggattggtcttggacgtcttgggcttcttcggctgctcccccgacgcaatcttcatggcgacgatttcttcggtgctgcgtacagaaagaccttccgcaataatacgagaagccagcttgtccatttcctccggatcgctcaggcccaatagcgcacgcgcatgaccggacgatagcacaccggcagccactctcttttgcacagaggccggcaggttcagcagtcgcaaggtattggcgatttgcgggcgagacttggacaccgacttggacagttgtacttgtgtcaacccgaactcttcaatcatctgctggtaggcagccgcctcttccagcggattcaaggccacacggtgcaggttttccagcaatgcatcgcggagcatatcatcatccgcagtggttttgacgatggcgggaatcgtctccaacccagccaactgggatgcacgccaacgacgttcacccataatgagctcatacgggctgtccaaatgaccagcaaacggatttgtgctggattccgtctcgtcgtgcttggcggctttggccgcagcaatctggcttgccggacgcttgcgcacgactatcggttgcagcacaccaacttccttaatggaagcagacagctcattcaactcatcctcgtcgaagatggtacgaggctgatgtgcattgggcccgatatcagacagtttgagttcagccagataaccaccggctaccggcttgagctcgtccttcttatctgtgtcagcggtctttgccgccgatgcagtctgagatgtttcacgtgaaacatctttgacggtgacggatgtacgatgtgccgtctgagacgcagacggcttgccgccctgctgaggtgcggcgaccttaccggtttgaggtttctccgtaccgaaaaacaggtcgctaggatgagtaatggtgtccaatgcgggcatggatgcgcgtttaccggcggctttcttggctgctttgctggacgataccatctgaggcgcggcaggctttgattcctgctgggcagtagccttcttggcgggggttatgtcagcagtggccgccggagtagacgaatcctcctcaatcattgcgggctgctccgccactggctcctcccctggcaatgtggggaacaaagcgccaaggcccttaccgagtcgtgattttgatgccattacttgttcctcctcgcatcaatggtgtcaaggacttgttgcgaacgctgtgcgatttccaaagctgcttcaccatacgatatggcacctatgccacgaggatcataggcaatcaccgattgggagaaactcggcgcttcggagatcttgactgaacgcgggatggtggtattcagcacaatgctgggatagtgtcccttgacctcgttatatacttcacggctcaatagcgttcggcgatcgaacattgtgacgagcatggtggacaccagcagtactggattgaaatgctcctgcaccaaaccaatcgtgttgatcagctggccaagaccctccaatgcgtaatactcagcctggataggaatcagcatctcggtcactgcacacatggcgttgatgaccaagaggcccaagctgggcgggcaatcaatgaacacgtaatcatagtgtttatctgattgacgcaggtagaggtccaaggcctccttcaacaatgtgtttcggttgggcagatcagccacttccaactcggcaccgctgagatcgattgatgcaggcacaacatcaagtgtgggaaaatcaggacagaccgtgataacatcacccagatcggaacgcccctcgataacgtcatagaccgagggctctcccgatgcatgagatacacccaacgccgtagaggcattgccctgcgggtccatatcgatgaccaacacctgcgcgcccttgttcgccagcgccgcagcggtgtttaccgtggatgtggttttacccactccccccttctggttggccacggcaatacgacgggtacgttgaggtttggggaaatcggttttcttgagtacatcgtagcgtgagctttcatcagccatctggctgccaagcactgaaccgtgaccatcgaatattcgctgaagcgtttcggaagccgattctataggttccgactgatgatccttggtggacatcgctcctccttgcacagacgtaagttccagtgttctcattcgtatggacatgatgctcgttatccacaattgcgatatgcaatgtggataagtgtggataagtgtgaatgacgttgagtgttagattatgtattcgcagacgaaaaacattgaaaaatcagtgttttcatcattctgcacatcgtcccgtaaaaatgtggataacttttacgcacatatggaaatgtggataactcaatcagtactccactcatcgcttatccacaatcaccacgtgggtaggctcaagatccggtccgacagccgcctcaacgacgcgtggacgacgaccaccgaattttgcaatctccttgccagccttgtcgatttcagcctgagcagaccgtcccttcagtgcgatcaactgtcctgacggtttcagcaacggcaacgtccagccagagagtttggtcataggagcaaccgcacgacacgtgacaacagcgaacggatgaatttcccgcttccgtacctgctggatgacggcatcggagcgtccacggataatctcaacgttctgcagttgcatcaggtcaacacattcatgcaaccattcgattcgccgctccatcggttcaatcagcgtgaagtcatgatcaggcaaacacgcggcagccaccaatccaggaaaaccaccaccactgccgacgtcggcaactgttttgaagcgaataccattcgtcacattccaaacgtacggcacaatcgcagcggaattcagaatatgccgttcccaaatgatatcgacgtcacgggggccgattaatccacgaggttcaccctcttcggcaatcttggcatggaaacgctccaacttcggcaacgcatcacccaagacctcagcaagtacaggtgacccctgcagctgatccgtcatagccatctccctcaccatgtttcacgtgaaacaatcaacatggaaaaggcgtcgctcattacgacgccattctccctacggtcactcttgtttgtttagagacgacatccgttgaacgtccttgtcatctcaaaaactcgtcgacctattactcctgatcaagctcgtcgtcttcggcaacatcctcgattttgttcttgagatacaccgtcacgtaacgatgaggctcctcaccgtgcgagcgagacttcagcccctcttcccgaaccacatcgtgaacgactttacgttcgaaggaattcatcggcttcaaatcatacggctcgccggaatccttcactgcgtcaatggcatccagggcgatatcacgaaggtgctgacgcttgcgcttcaggaaaccgtcgacatccacaatcagatgagaacgctcgccggtcttctgctgtacagccagacgagtcaattgctgcagagcatcaacgacttcaccattatggccaataagatgtttgatgtcggtatcgtcatcagcaacgatttgcacggtggggcggtcattacgcacgcccatctcaatgtcgccctcatagtcggcgatatccagtaggccttcaaggtaatccgcggcgatgtcagcctcttcgttgagctgatcgatcgacttcacgtcatcctgtgccatacgctactccttcatgtcgtgtttgaattccaagtctaagccctgctcccccgaacagagaaagtaatgtcggtgcgtgttgaatgtttcacgtgaaacatcgaacgcgcaccgacatggtcgtcacttctttttgcgcttacgcacgggctgttgacgctgatagccctgagtggccttacgctcagcctcttccttggccttggccaatgcttcttcttccagagagggcaggccggcctttgcgcggcgagcattctcattacgatgatcacgcttctccttgtccgccgcagccggagagccaggggtcgggaatgcatacacctgccacagcgtacggcacaagttgcaaacgttgttggtcagccagtagaccagcacggcgaacggcatggtggcaccagagaagatgtacatcaccgggaagagccacagcatagccttctgcatggtctcggcctgtttgttcatcgatgcggcgggcatgttgcgcttcatgttgaagtactgcataaaccacaggcagaagcacatcaggaacacgaaggtaccgatgaccaccttgcctgcagtagatgcgcgggtgaagttatcggtcacactgacaatgccgaacacatcggtttgggtgaattgcttggcggttgctacgtcgaacgcgcccaacgcaccgcgtttaccgttggcaatgtagggaatggccgacagcgtatagaacatggacatgaacaccgggccctgaatgagcataggcaagcaggagccagccggattggcgtcattgtcttgatacagtttcatggtttcacggctcatggcctccttggaagcctgatccgtcttgcctttgtacttgttctggatgcgcttcatcttcggcgccaatgcctgcatcttgcgcatcgacttcatctgcttgcagaacagcgggaagatacacgcctgcaccaccagcaccaggatgataatggcaagcacccatgagacaccaatcgggctcatgcccagcatcgcgaagaagtcatgcacgatcttcatgatccaggtctgcaaccactcaacgggagtcaggattttatatagaaatccccaaaacccgctatcaagcagaaattcatttgagttcatcgttgggcctctctttgggttgtggccaatggtgtcagtcggggctcttcatgagccttcgaccacgaaaatctgtaaaaaatggaataccgttgtggaacatcgtcgattcccccacgactccacggccggcaacgcagtaatctcagcatggcgagcactccccctttgaacgcgccataccgttccaatgcctcaatggcataattcgagcacgttggataatacttacaacaaggcggtgtgtttgccgagatgtgctgttgataccagcgcaccccaccaatcatcaccgccttgaaagaagctgtcatgcctcagccaccttatgcgccactgtggcaaaagccttcgcgatctgctgatctagcgaagcgaacgatgcggtcgcggcactgggcttggcgcgcaaaacgatatcgcaatgcgcgggcagcagatcctcatgggctctggccaatacacgaaacctacgcttcaccgtattacgggtgaccgcatgtcctaccgatttggagacagctaatcccaaacggcgatgcaccgtccggtcgtcatcatcatgatggtcgtcgggcaccaaatagtgcacgacgatatccttgccacctgctttgcgccggcgtttcagcacggtgacgaaatcacgatggctttgaagccgctccacctcgactatgcctgtggcactgatcggaatgatcaggcggagagggacttgcggcccttggcacggcgacggttgatcaccgcacggccagaacgggtgcgcatgcgcaggcggaagccgtgcttcatgtggcgacgacggttgttcggctggaacgtcctcttcataatccattgctcctaggtctattcggcaacgcttcgcgctgccctcacgtgagtcaagctataccaaagtactctcacccctaccctcaagtcaaaacggacggagtattttcacatttcgacacgttgcgagacacgcctcaaatctcttataatcggcggaataccaaccattcacggccaaaagttatccacaaattacatgtctgttattcacaatccagttatttcaacacgcgacacggtggataacttgtctaaaccagagtaaatattatctgttgtacagatttcgccacaccgatagaaggggccaccatggttaacgcttccggcgaccccgtaatcgaggccgcccacatctggtcagacacgctgacggtgctcaaacacagcgcttcgctcagcccacgagaaaaaggctggttggaaggcgttgttcctgaaggcgtcttcggttcgaccatcgtgctgtgtgtggacaacaacgatacgcttcaagccattcagggtgatttgaacgattccctgcttcaggcattgcgtacggtaaccggcgaaaatatgtttcccgcgttcaaggtcgtgccgaaaaccgagcccgaaccgctttcggcggcaaagccggcgcagccatatccttcggaaatttctccgaccgtcgccgagttcggtaaagaatcctatggtgcaaagccggtagccgcaccgcgggaaccgatgcccgccaccgagtcgcagttcccggtcggtcagcagaagatgaatcgcgatcccgagactcatctcaataagaacttcacgtttgattccttcgtgcccggcgattccaaccgttttgcccgtacggtcgcactggccgtggccgaaggttccggtcaggatttcaacccgttgtgtatctatggcggatcgggcctgggcaaaacccacttgctgaacgccatcggcaactatgcactggtcaaggatcccgggctaaaggttcgatacgtcacgtctgaggaattcacgaacgaattcatcgacgcgctgcaaaacccgaaccaaagccagggtcagattgctgaattcaaccgtcgataccgacaggttgatgtgttgcttattgacgatatccagttcctcggcggcaaggaagccaccttggatcagttcttccatacgttcaatgcactgcatcaggcaaataagcgtattgtcattgcttccgatgtggcacccaagaatttgaagggtttcgaggctcgactcatctcgcgcttcgaatccggcctgaccgtagacgtcaagccgccggatctggagacccgaatcgcaattcttcgtatgatcgcctcgatgaacggttcgaaaatccccagcgatgtgttggacctcatcgccgaacgcttcaccgagaacattcgcgaacttgagggcgcgcttacccgtgttacggccgtggcctcgctgagtaatcagccggtgacccgcgccttggccgagcagacgttgcaggacttcttcaccaccgatgtggaaatcaagcccacggacatcatcagtcaggtggcgaagtacttccacctgacgtttgaggatcttgtcggtaaatcacgaaccaaaaacgtggctgttcctcgtcagatcgccatgtatctggctcgcgaaatgaccagtatgagcctgatggatattggccaggtctttggcgggcgcgatcacaccacagtaatgcatgcctgcactcgaatcagtgaccgaatgcagcaaaaacaggagatctataactacgttatggagctcacggttcgcctcaagcaaagcaacaccaactgacacaacgcttctgagagacgaaaaacggcacttttcggaaagtcagtccgaaaagtgccgtttttggttgctcaggcggattctggtggatacgtcgaggcaacggattcgagacatcagattcctcatggctcccctttgtgaggagagctgtcgtcgcagacgactgaggggagtttcgaaggggaacacgcaaaaaaacccatgaaacgagagaatcgattctgaggaccgattttgcgggtttgggcgagcgagacgaaaaaagtgccgaaaacggtctccagaatcgattctcctcgacgaaaaacagccttcaacacgccgtgcgaaagtacgaaaaccaaaaaagttatccacacagttgtgcacagatgtgggtaaactcggcggataactcgtggattacccactgttttgttgtggaaaactcgtgcataaccgcgacctcgatgtggaaaactcaaattcgacgaactggctgtggaaaactcgcccacttatccacaagccatgcagaatttgtccacaattttcagggacttatgaaccgttgcatttgtagggctcacccctacttatccacactatccaccggccttattacgacgattacttactcagttacgtgaaaagcatcatcgccacagtaacagccagtcacccatcgtacgtaagttcgccacctaacggctagaatatttctcagccaatccgacgaagggaacaatcacacatgaaagtcgaaatcgatactgcagccctggccgacgccgtagcctggacctcccgagtcatcgacgcacgtccctccaacccgattctcgctggcgtcaagctggaagccattgacggaacgctgcaattctccgccttcaactacgagatttccgctcgccaccacatcgaagccggcgttgacgaagccggttccatactggttcagggcaagctgctggccgatatcaccaaatcgctgcgttcggagaaaacgtacctggtcaccgacggctccacgctgaccatcacgtccggcaagtcgaagttcaccttgcagctcatgcccgacaccgagtacccggatctgcctgtggtaccggccatgctcggccaagtcgatgccccgactttcgttcaggcagtgaaccaggcatgcgttgccgtctcccgcgaagaaaaccgcccggtactgaccggcgttcgcatgcaattccaaggcgacaaggtcgtcatgacctccaccgatcgcttccgtttggcccgcgccaccttcacttggactccgcagaacccggacgtcgacaccaccacgctggttcgcggctccctgctcaaggatgtggcccgtgctcttgacgagcaccagaacatccgccttgatttcgatgccgatagcccgacgctgctcggcttcgaaaacgccggccgcgtctccacctcccagctcatcgacggtgaattcccggcggtcgaccgcctgttcgccgacgaatacccgattcaggccgtagtcaacaagcaggatctgctcgacgccatcagccgtgtggctttggtcgccgaacgcaatgctccgattcgcatgaccttcaccggtcaggaagtggcgctgtccgccggatcggtcgacgaggcccaggccaacgaaacactggacatcgacatggatggcgacgacatcaccgtggcattcaacccgtcctacctgaaggagggtctgtccgccgtgaccgaaccattcgtgcgcatcaagatgacgaccccggtcaagccggtcgagttcaacggccagcaggaagctgattccgacgagtccatggactaccgatacctgctcgtgccgatgcgcttcaacaactgagatccctgaatttccaacgattcgctaatgcacatctcccgtctcgcactcgaccactaccgctcatggagtcaagtagtggtcgatttcgtaccaggcgtgaatatcctgttcggcaagaatggcttgggcaaaaccaatctggtggaagccgtcgaagtgctgtccaccggatcgagtcatcgcacgtccagcacgttgccgctgatcgaacgcgggcagaccacggccaccatccgcgcgaacgtcgctgatgatgccggtcaaaccactacgtatgaagcgtcgattcatgcgcgtggtgccaaccgagcccgcatcaactcggggtcgtcgctgtatatgcgcgatatcatcggcaagattcccagcgtttccttcactcccgaagatcagcgattggtgtccggcgatccgggagcacgccgcgtcatgatgaatcaggctgcggctctgctcgagcccggatacatgcagacgttgcaacagttcacgcgcatcgccaaacagcgtgccacattgttgaagcaattgaatgccaatgccaacaatggacagccgatggatgcggttctgagcggtttggaaatctggaccggccagttcatcgaagccggtgtggcgttgacccgtatgcgcgctcatgtgatcggtctgcttgccgagccatttgccgcgatttacgccgacttggccggtgccggcgagcaggtgacgctcacatatgcgccttcattcgacgaagtgctgatgttcgacgatccacatccgcagatcagcgagcattttcaacgcatctaccccggtgaaatggctcgcggcgtgaaccttatcggtccgcagcgcgatgacatgaaccttgagttggccggtattcccgcccgcgagttcgcttcgaacggcgagatgtggacgatggcgttggccttgaaaatggcattgtttgaaatcgtgcgtgaccggttgggattgcagccgattgtgattctcgatgatgtgttcgcccagcttgacgacagccggcgcacgcagattcttgatttcgccagaaaacaggatcaggtgctgattaccgtggccgctgaaggcgatgtgcccgactatgaatcggcccatcgtatcgacgtggccacactggccgaacccgcttccgtaatactgccaactctgggcaatttgtccgattcacgggaaaacgagagtttaggtaagtatgacggaaaaaccgcggtggacagcgcgtccgtagaacggaaagcgtcatgaacccgccgatcgcccgccaactcaacctggacgagaccaaactgccggccgaaatattcgagcggctctcccgtcgcggggcgaccttgaaggactacagacgccgccgtgaagaggccatcgaaaacttcggcaaaccggggcgcgatccggctgaactgggcagcgtgatgaccaccatcgccggcaatggcgtctgggcggcgaatatgaaacttgcgcaattgcgcaaccattgggaccaagtggtggggcaggccatcgccagccattcggcagtcgccgatttcacggacggcgtactgaccatccgtgccgaatccacggtctgggccacgcagctgacctaccttatcccccaacttaccgataccatccgtcgcaatctcaaaggattgaccatcgccgagattcgcgtgaccggaccggccgccggatacacgcgcaaatgggctcggcggcggtagccaagataccaaacaaattcgcagaagcctcgctatggcgctcgtcgggttagacgagtaaaatcacatgcagtatggtcaaatggccagaagagccctttacgggcctcgtaagccatatcgcctccgtgaatgaccttcatgacggaggttgaccctgtagtcacggaaggaagcctgttggcagacgaaaccagcaaagaggagcagctgaaggcggctgcggaacgcatcaacaatgcggaattgaccgaaggcgaacttgacgaatccatggcccccgagcattatgaggcctccgatctgagggtgctcgaaggactcgaggccgtgcgtatccgccccggtatgtacatcggttccaccggcccgcgcggtttgcaccacctggtctatgagatcgtcgataactcggtcgacgaggcgctggccggatacgccagccatatcgaggtcaccattctgccggacaacggcatccgcgtggtggacgatggtcgaggcatcccggtcgatgaggtgcccggcgagggcgtctccggtgtggagaccgtgatgaccaagctgcacgccggcggcaagttcggcggcggcggttatgcagtgtccggcggtctgcacggcgtgggtatctccgtggtcaacgcactctccacccgcgtggacatcgaagtgcgccgtcagggcttccactggacccagacgtacatcgaccagcaccccaccgcgcccttgaagcagggcgagccgatgaccgaaggcgagtccaccggtacgtccgtgactttctgggccgacccgaagatcttcgagaccaccatctacgacttcgagacgctgcgttcccgtttccagcagatggccttcctgaacaagggcctcaagatcagcctgaccgacgagcgtgagaatgaccaggccggcgacgaggtggccggcgacgccgcggacgagcccggcgcaaagcaccagaccgtcacctaccagtacctcaacggcatcaaggactacgtcgactatctggtcaaggtgcgcaaggccacgccggtggaagaggacgtcatcagcttcgaggccgaagacctgaagctcggcatctccgccgaactcgccatgcagtggaccactgcctactccgaggccgtgcacaccttcgcgaacacgatctccaccaccgagggcggtacccacgaggagggcttccgcgccgcgctgacctcgctggtcaaccgttacgcgcgagacaagggcatcctcaaggacaaggacgagaacctctccggcgacgacgtgcgtgaaggcctgaccgccgtgatctccgtcaagctcaccaacccgcagttcgaaggccagaccaagaccaagctcggcaactccgaggccaagaccttcgtgcagcgcgtgatgaccgacaagctcggcgactggttcgacgcccacccgaacgaggccaagaacatcatccagaaggccatcgaggcatcccgcgcccgtctggccgccaagaaagcccgcgagaacacccgccgcaagtccatcttcgagtccgccggcatgcccgacaagctcaaggactgccagtcctccaacccggaagagtgcgagctgttcatcgtggagggcgattccgcaggcggttccgccatccagggccgcaacccgatcacgcaggccatcctgccgctgcgaggcaagatcctcaacaccgagcgtgccagcttggaccgcatgatgaagtccgacaccatcgaatcgctgatcaccgcggtcggcggcggctatggcgaggacttcgacatctccaaggtccgctaccacaaggtcatcatcatggccgatgccgatgtggacggtgcgcatatcgccaccctgaacctgacgctgttcttccgctacatgcgcccgatgatcaccgccggctacgtgtacgtggccatgccgccgctgtaccgcctgaagtggaccaagggcccgcacgacttcgtgtacaccgacgccgagcgcgaccgcgtgctcgccgaaggcaaggccaacggacgccagctgcccaagggcgaaggcatccagcgctacaagggtttgggcgagatgagctatcaggagctgtgggagaccaccatggaccccgagcaccgcattctgaagcaggtgcacatcgaggacgccgccgcggctgacgagaccttctcgatgctgatgggcgatgaggtcgaaccccgccgcctcttcatccagcgcaacgccaagaacgtgcgttggatcgatgcgtaacggaatcctccaacctccctcgtcagagggaggtacacaacggacttagacaactaaaggaacaacagtggcagatgaaaacaacaccggcgacgagcagttcacgccggacggctcgatggagccgttgagcccgcaggaggcggacaccaccgactacggcctgatggacaccggcgaacgcatccagcgcaaggacctgcagcaggagatgcgcgagtcctatctggcgtatgccctctccgtgatcgtcgagcgtgccctgccggacgtgcgcgacggcatgaagcccgtgcatcgccgtgtgatctacgcgatgtacgacggcggctaccgccccgatcgcggctacaacaagtgctcccgcgtggtcggcgacgtgatgggtaagtaccacccgcacggcgatttcgccatctacgacaccttggtgcgtatggcccagtcctggtcgatgcgcaacatgctcgtcgacggccagggcaacttcggctcccccggcgatgacccggccgccgccatgcgttacaccgaatgccgcatggccccgctggccatggaaatggtgcgcgacatcgacaaggacaccgtcgacttcgtgcccaactacgacggcaagacccaggagccgaccgtgctgccggcccgcttcccgaacctgctcgtcaacggttccgccggcatcgccgtcggcatggccaccaacatcccgccgcataacatgcgcgaggtggcggacggcgtccactgggcgctcgaccacccggacgccagccgcgaggaactgctggaaaacctgatccgcatcatcaagggaccggacttccccaccggcgccaccatcctcggccacaagggcatcgaacaggcctaccgcaccggccgtggcctgatcaccatgcgtgccgtggtcaacactgaggagatcaacggccgtatgtgcctggtggtcaccgaactgccctaccaagtcaacccggaccgcctcgtcgtctccattcgtgaggccgtgcgcgacggcaagatccagggcattgccgacatgcgcgacgagacctccggccgcaccggccagcgcctcgtgctggtcttgaagcgcgacgccgtgccgaaggtggtcctgaacaacctgtacaagcactcccagctgcagcagaccttcggcgccaacatgctggcgctggtcgacggcgtgccgcgcacgctgagcctggacgccttcatccgccactgggtgaaccaccagctcgacgtaatcgcccgccgcaccgcgtacctgaagcgcgaggccgaagagcgcgaccacatcctgcagggctatctcaaggccctcgacatgctggacgaggtcatcgccctcatccgcgcctccgaagacaccgacaccgcccgtacgggccttatggggctgctggacatcgaccaggtgcaggcggacgccattctggccatgcagctgcgcacgctgacccgcatgaaccgcgacaagatcgtggccgagcatgaggaattgcagcgcaagatcgccgactacatcgacatcctcgccaagccggaacgccagcgcaagatcatcggcgatgagctcgacgagatcgtggccaagtacggcgacgaccgccgcaccaagatcctgccgttctccggcgagatgaacgtcgaggacctgatcgccgaagagaacgtggtggtcaccgtgacccactccggcttcatcaagcgcaccaaggccgacgaataccgcgcccagcaccgcggcggcaagggtatcaagggcaccaagctgcgcgaggacgacgtggtggatcacttcttcctgacctccacgcacaattggctgctgttcttcacgaacaagggccgcgtctaccgcatcaaggcctacgagctgcccgagggttcgcgcgactccaagggccagcacgtggccaacctgctgcagttcgcgcccgacgagaccatccagaccgtgctgtccatcccgaactacgaggtggccaagtacctggtgctcgccacccgttccggcaaggtcaagaagaccccgctggccgagtacgattccccgcgccagggcggcctgatcgccgtgcgcctcatggccgacgagaatggcgagaacgccgacgagctcatcggtgccgcgctgtgcaacgccgaggatgacatcatcctggtctccaagctcggcatgagcctcaagttccaggccgacgacgagcagctgcgtccgatgggccgccagaccgccggcgtgcagggcatgaagttccgtaacgacgacagcctgctggccatggatgtggtccctggcgactccgacaaggacctgttcgtggtgaccaacgagggcttcgccaagcgcaccgccatcagcgaataccgtctgcagggccgtaacggcttgggcatcaaggccgtgcaactggtcgagggccgtggtgccctggtcggcgcgctcgtggtgtccgaagacgatcaggtcatggccatcatgaagtccggcaaggtgattcgttccaacgtggacgaggtcaagcgcaccgggcgcaacacccagggtgttaccttcgccaagcctgacaagggcgacacgattctctccatcgcccgtaacgaggagaaggacgagcccgaggacagtggcgatgccgcggcgaacggcaccgccgagaccgcacaatccggcgagaatgtgaacaacgcggacgaggcgtgagcagcgtcctgaaaagctggtagcctcgcatacagcagaggctaccgccaagcctgttaaggagaaacgatgagcgagaatctcgaagacaacgagccccggatcataccgccggcagtcggcaatacgcagaacgatcatgtcgagccgctgatcggtactgagcacgctccccgcgtggcacgctccgtgtccagcgatccggaagaatccacgttgccttcttcaggtgccgccactcccgtgcgtccggcacctcgccgtagcgcccccagggctcgccgcatgagcttgtcgctgacccgcgtggatgcttggtccgtggccaaggtgacgttcatgctgtccatcgccgtggcgattattcaggtcgttgcctccgcgatcgtatgggtgctgcttgatgtggtcggtgtattcagccagattacgcagattgtgtcttccaccggtcttgatgcaggcggtttcgatctcaagaacgtgttgtcccttaccaccgtggtctccggcgtcaccatcttctcgattgttgaagtggtgatcttcaccctgctggccaccattgcggcactgatctacaacgtggtcagctcgctggtcggcggcgtgcacgtcacgctcggcgacgactgatatagctatactggcagaactcccctcagtgaaccgcaccccggttgttggactgaagtaattcagattcgatgatcggaggtgcggtttcttatgtgtggggtccgtaggcgtcgttgctgggccgagacttgggactccggcgacgctgggggtggcaggcgtcggtgttgggacaggttttgtatctctgacgacgctgtggagggcttaccgtcgtcagcggtacagatcttggagttctgccgatgctgagggtgtgttctgtgtcgtttgcgtccaattcttggccctctgccgacgctgggcacagcaagcgtcgttgctgggccaagttttggactgccgccgacgcagagaatgcacacagcggtgttggtctgccagcgtgtggcagcttggcgccgttgaggaaggtctatgtggtgtggttccgccaaaggactggcaggttggcgctactgaggggactttatgggctcttccggttttggcgtgtaggggccgtgcggtttcattcactttttcaatcacacaccgaatcaaaccgcacggcccctacgcaccaaaatgcgaagagccggtttcgctaactagtgcctatatgcctgcaatcaggctgatttgtgctgtcaggctggctggcgtcagcggttgatctgccgatgttgctgctcgtcagtctggactgttgggctttcgttttgacagcggaaggaagatcctcctcgcggtagggcaacaattatcagtatcataattaaggtaatcgtgattacattaaccatgatactcttattattgggcggtaggcggatcggagggctgcaatgtttgtcgcacgagagcacgagttacaagtgctggaaaagctgtttaccagcgattcgttcgaaatggtggtgctgtacggtagacggcgtgtagggaaaacggcgttgatcgacgaatttgtcaaagataaacgcgtgctgtacttcacggccatacagcaaagcgccaagatgaatcttgaagatttctcaagagcggcattgtcgttctttggtatgccggattccaccccgtcgtttggcaggtggtctgatgcgttatcgtttgttgctgaacgtgctgcacagactgacgaacgtatggtgttcgtattcgatgagttcccttatgcggctgccgccgagccagcattaccctccatgttgcagatagcaattgaccatggattcctcgccacaaaagtgacgatgattctatccggtagtaacgagggattcatggaaaacgacgtattggggcgtaaaagcccgctatacgggcgtcgtacagcacagattcgactcctgccattcgactatgcggatgcggcaaaatttctaacgaacacatctccgcaagaactggtccaatactatgcgactttcggcggtacgccatattatctggcccgtatacaggaagccgatggctttgaatccaatgtgctgcgcttgatgttcgacaacttgggcgtactgcgtgaggaacctatgatgctgttgcgtcaggagcttcgtgaaccggcatcgtattattcgatattgcaatctattgcgggtggtaattcctcgccaaagcttatcgctgaacatgcgggtgtcggatctgattcgattggagcatatctgaaaacgctggtcgatttgcgcttaattgagcgaaaagtgccgtttggtgaagatccgagtaaatcgcgcaagggaatgtatgtggtgagcgatcccttctttgcatattggttccgctttgtggggcgcaacatgagcattttggatggtaatatcagcgaggaggttacgagcagactcgcttttggaccagcgtttgatacctatgttggtcaacaatttgagacgatttgcctgcaatggcttattcgaaacaacgctatgggcaacctcccctttgttgccactcagttcggcaaatggtggggcaatgatccgattgctcacgagcaaaccgatatcgatgtgattgctgcggattcgctcgataaaacgattctgttcggtgaatgcaaatggcgtaattcattcaacgaaacggaggctattgaaaagctccatcagcgtgctggcttagtccgcggctatcaggcaggtaatgcgtggcttatgctgttcaccaagaatccggtgagtgagtccacgcgaacccgctacatggatgatgaacgaatggtgttcgtttccgcggaagagttatacactgcgtgatgcattactgggtgattgtgacgcggtatctagagtcctgccgacagccacgtggcaattacgccgaatcacgcaccaccaaatcggtgttcaggtgcatcacgcgcggtgaagagactccgttgatggctttgatgaccacgtcggccatggtccagcgcgctgatccatgtgctgatcgacggtggtgagttccggggttatggaggtggaagctaagttgttatcgggcttacgtatttggggatagcacttgttgctcgttgtacatatagcaatgcccttgcctcctcacgggaagcaagggcattacgctactgcttagtactgctcagaggcaagcgtcacagcacgccctgggcaaccatggcgttggcgaccttgacgaagccggcggcgttggcgccgagcatcaggtcaccctcgtgaccgtattccttggcggcggccagggagttggcgacgatctcttccatgatggacttgagcttggcgtcgacctcttcgaaggtccaagacagacggtagctgttctggctcatctccaggccggagacggccacgccaccggcgttggcagccttggccgggccgtacagcacgccgttcttctggtagacctcgatggcctccggggtggacggcatgttcgcaccctcgacgaccacggtcacgccgttgtccacgagcttctgtgcggattcgccatcaacctcgttctgggtggcgcacggcagagcgatgtcgcccttgacggtccacacgcccttgctgccctcgtggtactcggagcccggaacgcgctcggcatattccttgatgcggccgcgctcgacttccttgatctgcttgacgacctcgacgttgatgccgttcgggtcgtagatgtagccgttggagtcggagacggtgacgaccttggcgcccagctgctcagccttctgagcggcgtaggtggccacgttgccggagccggagatcacgacggtcttgccctcgaaggagtcgttgcgcagcacgcgcagggcttcctgggtgtagtagcacacgccgtaaccggtggcctcggtgcgggccagggagccgccgaattccagacccttaccggtcaggacgccggagtactcgtcgcggatgcgcttgtactgaccgaacaggtagccgatctcacggccaccgacgttgatgtcgccggcgggaacgtcggtgaactggccgatgtggcggctcagctcggtcatgaaggcctggcagaagcgcatgacctcggcgtcggacttgcccttcgggttgaagtcggagccacccttgccgccgcccatcggcagcgtggtcagggagttcttgagaatctgctcgaagccaaggaacttgacgacggactcggtcacggtcgggtggaagcgcaggccgcccttgtacgggccaatggcggagttgaactggatgcggtagccgcggttcacctgaaccttgccctcgtcgtcaacccaggccacgcggaacttgatggcgcgctccggctcgacgatgcgctccagcacaccggccttctcgtactccgggtgcttctcgacaaccggctgcagggtctcgaagacctcgcgaacggcctgcaggaactccggctgatcgccgtcacgggcaacgacctggtcgtagacacgcttgatgtactcgtcagtgagcatgattctcctcgatttggtagggaattaagacggttttattctatgcgcgcaggcccttgctgcatagagtctcgctcggataacgggaaagctttcggcgtggttatggagtggctcaagtttccgtttgttagatttttcgggcgattgttggatgtctgtctatgcgtgaatcgggtcgaaatggaagccgcatcacaccggaggcacgttcatatagtggacataaaggcggacttgggtgatgtcagatgtgtctgttggggatcgtgcggtctgtggggtttgtggggtgtggctggaccgtggggtcgtatggtttttgtgacctgtggggtttgtggggtgtgtggccgcaggtcttcggcgcgcaggttaccgggttcgcggtcagtgtgcgaagtaggtctgcagaatcatcgtggtctcggtgcttaccggcaccgtgcggtggatgagattgagcagttcttcaagtgcggtaggggaagccacgcgcaccaccagcacgaaactgggggcgccggccaccgaatagcaggagacgatgccgtcgatattgttcagcttgtccggaatcgaggattcggctgagtagtcgagcggggtcacgttgacgaacgcgctgatgggcaagccgcgctgctcttggtcgatgatggccttgtatcccttgatgatgccgcgcttctccagcttctgcacgcgcgactgggcggcggagactgacagtccggtcgcctgggccagttgcgcgagcgtggcgcggccgtcggcctccagcatggtgaggatgcgctggtcggtctcgtcaatcgcggtcatgatgtcttctccgttcgttgtgctctgtgttcactgtacctgttgccggaatgcgatggctttccgattttgcctggtaatttcagtagttcttcctgtgttttctgttgtgtggtggaatgtttacgtttaaagtcctaattggatgtaataattccttttgaaataagagaacgatgaaataattccattgaggagggatgatatgcagaagttttccaacatgtctctgtccgaagttgcatctgctgctgtgcctgctactatgcctgctgccggtcgggttgctgtgccgaccgccgagcccgcgagcctgtccgccgaagccctgaatatcccgcgctccggcatccgagacgtattcgaccgtgtagagcgcgtgcctgacgcgatttcactgaccgtgggggagcccagcgccacggccgcgccacatatcgtggcagccgcttgcgaggccgcacaggctggccgcactcggtacaccaacgtgcttggcatccccgaataccgcaaggccgtggccgattactccgcctgtgtgaagggacttacttataatcccgaaaccgagattcaagccgttgacggtgccacgattggcctgtttctggcgctgaaagccgtggtgggcaccggcgatgaagtgattattccctcgccgttcttcacttcctatgacgccgaagtgatgctgtgcggcggccgcccggtcaccgtggcgctgcgtccggagcacggcatgcgcgtgaacgcggcggacatcgaagcggcgatcaccccgcgcacccgcgccgtaatcatcaactcaccgggcaatccgaccggcgcggtaacctctgccgccgaactggcgcgtattgccgaagtatgcaagcagcacaatatttgggccatctccgacgaggtttaccatccgttcgtgtttggggaaacgttcggggaaacgcttgggggagaggcagccgtggcaccatcgatcgccgcggtgccgggcatgaaagagcgcaccattgtggtggaaagcctgtcgaaaacctatgcgatgaccggctggcgcatcggctacctgctggcacccgaagcggtcatcgaacagaccggcaaaatcgccgaactcatgcactcctcggtgaactccttggcgcaatacgcaggcgtggcagcactggctggcccgcaagataacgtggccgccatgcgcgaggaataccgcgccaagcgccagatcgtgctggacggtctggccggatgcccggtattgcgtctgatcgaaccgcaaggcgcgttctacgcctttgtggacgtacgcctgactggccttgactccggtgaattcgcagaccgtctgctggacgaagagcgcgtggctgtggtccccggcgaggccttcggcgaggaggggcgcggcttcgtgcgcctctcctacgccggagatgccgacgagctgtgcgagggcgtcgcccgtctgcgcgcattcgccgaacgggtatggaaccccatcaccggccaccacaccgccacctatcaccccatggaggtgctggcctgaggcttaaagcgaggctaggccgccattcggcctcgtcggcgcgagcgatggcctgcttcttggctcgcagcaagatgtagccgagtaccagaacgttggccagagctcgatgttggcatcgcgtcaaaacaaccgcattaaggctgccgcgtctcgtatcgttacgcgtaggggctggctgaggcgtaatgctgaagagtaacattgaagcgatggcaatcaaaccgatttgagggagagaggcacacgatggcgtactgcggccactgcggaaatagagttgatgggccggcacgattttgcccggcatgtggagcgtctgtagacagcgcaccagttgcgacggcaccagtaccggccgcatcgccagccgtaccgcctgcgtcgataccggcacctgctgtgccggcgtctgcggtaccaccatcgataccagccgcgccggttgccccatcggtttacgccgcgtccgctgccccacagccggcaccaaccgttcccctgccggctttgccgattcccgctcctgccgcatatcaggcgactgatgcaaccgccgtcctggcaccgcagcgcaaatccagcaagaagctgatcgccgctttctgcgcattgcttgcgacgattctggtggcggccttggcgttcatcatccccaacttcaccgccgtcaaagcgatgctgggcttccggcccaccaatccgctggtcgtcaccttcgacgcgatcaactcgctgtccactctgcgcagcaccaaatacgaactcagaacccacagcatcactgacgattctcttgacgtgcggatgtctggcatgtattcgctgggcaaaaccaccaacgaatcctccgcgtccttcactagcaaaacagacgaatatgcaacgaccttcgcttggtacaaaggcgcattcgccgagaaattcgtttggcatgacgacgacccctactacatctactgcccggccgaccaatatgaagatgacttaaggaacggcgttggtagtgatgtggcggacttgatattgaacgtcaaggatgcgttggtcaagaacggtgcttgggacatcaccggcgcggagcaaacgttctacgatcagctggacaagatgaacgacgatgggtactcgaacgacatcgaccgggccaagggcacgaaaaggtctgccgaggtgaaggccgaggccagcaaattcatccaacaatatttcggcgtggagctggaagataagaatgtgcgcagccagctgttcccgaatacatcgtctgccaagtctgccggcaatacgcagctgtcgtaccaaatcgatatcaaagcgttgtctcagcatttcgtgaattactggatcagtcatgaagcgcagtatccgcatctgaaatcctgggtgattcagcaaatcgaggatgccggcgtggacgatgctgaagatgagtaccgtcaggcgctcgataatgtgcgcaactgggatttcggcacggatgaagagccggagatgccgactatcaccgtggatctgaactacggcagaaagcgtctgatgaattcgattgccataagcgtgtccggcaaggacgaatacggcgactcctataatggctcgctatcgttgacgctcagtcagcagaacgcggtgtctgtggacgaccccgatttgactgatatggtgagcaaagccaaggacaacaacggactggatttgtcctgaatatggtgcgtgggatgttgcggcggcgctaatttcctcggtgggctatcgcgcactcttcccgcttgcagcggtctgctcgctgattggcgcggtgctgatcgtcttcatcaagtcagtgaagtaaacatacttattcatccctcttccttccataacaaacgagcggaggggttgggccattgttttgcggtgtgtccagtctctccgctcgtttatttgcttgattctgtggaatggaaggggcatgctctatgtcaaataagataatgcggaagggctgttctgcgtgcatatatcttgctgaacgtatttgagggtactttctggttaaagacacgccctatggtgggcagaatgctgccgttgtgtctggcgtcggtcgcaggacatgttgtatcatgagggcacaagcttaattcagccgtcctcaatctgattagtcgtcgggtcggattggcgtgatcggcttgcagggaatcatccggctcttccggttttggtgtgtagaggggatgcttataggtgggcttgtatggtgtgtctgaagccgccggtgtggaggaggctgcgggtgacgtagttgtcgaggttgcggaagccgagggcgatgccgcgtagggtctcgggcctgccgttgatggcctcggtgggaccgttggcggtgccgtgggcgcggtcgtcggatcgatcgtccccggtgccggcaccgtggtcggcgcatttgtcggaacggcgattggcactggagccggatggctgataagtagcggcttagacgcactttacgacaatcaggtgcacagaggcggtggagatgacccgggcagtcatttcaaggataatctcgggttttggaagtgggggtatctgttggcgttgttcactcggtatgtgttggtggggcgtcttgaggacggggcgcaggtgttctgggacacgctggagaagacgccggtcaagcgcaagctggatttcggcggcgattccggctgggcgcgggctggcgcggcggccggcggcgctgccgccgcggctgcgcccggcctgatggtcatgatccacggcatcgcccggctgctcaccccggacacgaagacgcaccacacgcataccgatgacgtgacgctgctggcttttctcagaccggtcactatatcccgcgacgcatggaacacgtacgtggcggtcgccgtgatgtggctggccggactcctcctgtactggggtttctgccggctcgtgttcggccggccgaacacctacgtccccgcctcgctggaggacttggcattcgcctcctccgtgcccgccacgaagctgcgctacatgttcggcggccccatcgtcggcacgctgttcctcatcgcgatatcgggcttccccatagcgatgacatggatgttctggtcgagcgcgcaatgggtcgacaccggcagatccacacctgactggattggatggttggctttcttctgggcgttcctcgccacatgctccccgattctgttggccttgcgtttcgtcggaccgtgggactggcggggacgtttcagcccgcgcgcgggcgccgaacgctggagccggctgaaatgagcacactgctgatgggggccgggatgggcctcatggtcgcaatctcgctcgcattcatcctcgcgttcaacatgtcccggctccgctggctcatggaccacgacatccacccgctgctcgaggagcacggactgcgcgaacccgacgacgggttcacgtcctccggcgccaaggagcgcatggccgcgttccactcggacgtcgcggaggcgctggcagcgccggaacgggaacgcgaagcgagggaacggcgacgattcactgtgttcgacccgacggtcgacaagttgccgctgccggcgggcccctacccgttcgaccgtccgacggcgtcctgggcacgcgacatctacgaggaaggcgattgggcgtacgccgacgcatgggtcagggggcggaggaagccacgcgtggtgcgcgagcaacgctacgactcgtggcgcaacgaagtcctcgcccgccacggcctgaccgacgcgccatccgccacgctcgaacacatcgaacacgccgctgcacgcatccgcgccctccaccacaccagcccagccgaagcctacaaacaagcctgcaaggaagccaccggcaacacggtcaacgacgaaaccaccggagaaggaaaagaaaacggctcttccggttttggcgtgacccgcagcctcctccacaccggcggcttcagacacaccatacaagcccacctataagcatccccctacacaccaaaaccggaagagccaattatctgccggtaccttccacccgagaggaaggtgtagtcctccgggtccgggcgatatcgccgcaaggcgaaggattttcgtgtaccgttccgtgaggacggagcgacaatgaccacgcggttggtctgaatcctcgaggggtggtccttaacaggaccacccctttttcgatggagagggccatggcgcactgggagaatccctcgaacaagaacgcaaaaaccctcagaatcggtattattccaagggttgtctgtggagctagccgggttcgaaccggcgaccctctgcttgcaaagcagatgcgctaccagctgcgctatagccccgtgagaaaaaaagagcggctcgcagccgcttcattttttctgtgggcccgggaggacttgaacctccgacctcatccttatcagggatgcgctctaaccagctgagctacgggcccgattcatacgcttcaaaagcgcacaagtaattacaataccattgaacggcggtatgtcaataacggcgtgtcgtgattgtcgcttgcgccatgattgccggctcgacggtcaatgtccagcaacgccacagccaatgcccagctatgtaaccttgcgttctcacaccgtaatgctgcggttacacctccctctctgcgcagaaatgtccaatacatatgaggcttctgctgttttcgtgggttgggctcttggttgtggtgggcgtatgtcgagtccgccgcggcggagcatgacgagggcgatgggattgttcgcgtggtggaagccgtcggccatgcggagggtggcctggatccggtggtcggacgcctcgggcctggcgtttgaactgcccaattcgattgtcccgaggatgtcgggcccatgacggcggatctttcgggcgagttcgacgatctcggggatgcggctgtgggacgcccggaacacccggcggtccagttc

SEQ ID NO: 314 - DNA, 18430 bp, Unknown
  R42_10m  MAG No. k141_2471
atgatcgccggcgacatgttcggcaagatcgttattgagctgtaagcctcacagaattatgtattgagaacgattcgctgcgtggcttaactccgctatcaggagtacagtgggccttattctcaataactagggagtaaatgataatggcaaatgaatccaagcccgaagtcgcagtggtcatgggatcggccagcgactgggagaccatgaagcgcgcctgcgatattctcgaccagttcggagtcgcctaccacaagcaggtcatctccgcgcaccgcacgcccgagctcatggccgagttcgcgcacaacgcccgcgccaatggcctgaaggtcattatcgccggtgccggcggtgccgcccacctgccgggcatgatcgccgcgcagaccacactgcccgtaatcggcgtgcccgtgcgctcccacgccctgtccggctgggattcgctgctgtccatcgtgcagatgcccggcggcattccggtggccaccaccgccgtcggcaactccggtgccaccaacgccggcctgctcgccgtgcagatgctctccgccttcgagcccgaactggccgacaagcttgaggattaccgtaacgaactgaaagaaaaggtggctgaatccaatgcccagcttgtctgaggaaacaggcggtcgtgtttcgatgctgatgccgggatcgaccatcggcatcatcggcggcggccagctcggccgcatgatggctttgtccgcccgctacatgggcttccgcgtcggcgtgcttgacccgacgccgaactgcccgaccggtcaggtggccgacttccagatcaccgccgaatacgatgacaaaaccgccatccatgatctggccgtgcagtccgacgtgctcacctacgagttcgagaacgtggacgccgatgccatcgacgaggtgcgcggcatcaccgccaccccgcagggcactgacttgctgcgcgtgacccagcaccgcgtgcacgagaagcggttcatcaacgaccacggcaccgccaccgcaccgtggcgcgccgtcaacaacttcgatgagcttgacgccgcattggatgatattcattatccggccgtgctgaagaccgtgtccggcggctacgacggccacggtcagctcgtgctgcgttccgacgccgacttggagaagatccgctcccgttccgaccgtggtggcggcttcccgccgagcatcctggaaggcttcgtcgacttcgcattcgaggcttcgatcctggtctccggcaacggcaaggacttcgtcaccttccccatcgtgcgtaacgagcaccgcaacaacatcctgcacatgaccatcgcccccgccgaagtgtccgaacatgtggctcgcgaagcgcatgaactggcgattcgcttggccaagggcttcgaactggctggcacgctggccatcgaactgttcatcaccaaggacgatcaggtcatcgtcaacgagctcgccccgcgcccgcacaactccggccactacaccatcgaggcctgctcgatggaccagttcgacgcccacatccgcggcatcgccggctggcccatgcccaagcccaagctgctctcgccggccgtgatggtcaacgtactcggccagcatgtggagccgacgcgcgcgctgatcgccacccacccggagtggaatgtgcacgactacggcaaggccgaagtgcgccacgaccgcaagatgggccacatcaccgtgctcaccgacaaccctgatgccacggttgctgaccttgaggccaccggctgctgggacgacctgaaaaagaaggcgtgaccttatcgatggttgaacatatcgaacgccagaccaagcagaaggacgcgattcgcgccgccttggccgactgtgaggagttcatctccgctcaggacctgcaccgcaggctggaggacgaaggctcgaaaatcggcttggccaccgtgtaccgccagctcaacgccttggccgatgccggtgccgccgacacgatccgcctggacggccagcagctgttccgcctatgcggcgacgacggacatcaccaccacttggtgtgcaagcggtgcggcaaaaccgtggaaatcgatccgcccagcgaggcttggctgcgcaaagtggccgacggccacggcttcaccgtcgaatcccacaccctggaggtcttcggactatgccctgattgccaaaaggagcagaaagcgcagaaggctcagaaagcagtgagcgaataattgaatgggatcggcttcaaagccgatcccatttgctattccgctgctattccaccgacttcagggcgccgagcatgtcgaccgtcttcaaccgccggtagaccagcacgccgagtccgccgagcaccttgatggtcggcagttcgcggatacgttcggagacgttgagattcgtcagattgtagaggatcaccacggccagcagctcagccgcgagaatcagcacttccatgatctgatccggcaagtcgacgattgtggccacctgtttcttcgaagtcgtgttctgcacaatgcccttcgcgccgtccaactttatgagcttggcgctacgcgactccacattggaggtctcatggttcttgagcctcaccatataggtgttcgactggtactgttcgccgaacacgtgcttatagccacccgaagtcatgaacatgaaatgcccgatatgcatttcggtgatgccgtccacgcgcaccttgcgctcggtgccgctcgaatcggtgacggtaatcgtgtcgcctaccttggcgtccatcatctccgccatacgttcggagatgatcgcaccacggtcggtgagcacctgcggcttgtgcccggtgcgcgaacgcagggtgatgtagtcgccgaaattgtaggcgtcatcagtggcgatcagggtaatcgactgtttgtcgttctccttgccggccactttcgacatctcctcgtagtagatcggcgcggactcggagacggccccgcccctcatcgccttggccacttcggcgcgctgcgaataatgttttcgtcagctttggtcaggccataatcgctgatgacggttatgtcagcgagattgttctgattaaagaagtcggtgccggttatttgcatgtccgggccggtgacgaacaggcctacgagcgcaaaggagccaagcgtcatcaggctcacgatggaggcgaatcgacccttggatttggccatggtgacgcgggtgtctttccatagcatgcgcttatggaatgacccgttgcgtcggcggttgcgcttggccttgtgcgcgtggggcgttctgccggacgcggtataggagtcgtttgctgaatttgcggcggaatcggctgcggagtcggtcgcgggcgtaaggttggtcgtttcggtgaaatcattgagatcggtcatactgcttaccactccagatccttgatatccatcgggtgctcgttcacttcgatcgatttgacgcgcgcgtcatgcatgtggatcacacggtcggcaatcggcgcgatggcggaattgtgcgtcacaatgaccacggtcgcacccttcttacggctctgatcctgcagaatctgcagcacctgcttgccggtgttgtagtccagagcgccagtcggctcgtcgcacagcagaatcttcgggttcgtggccaccgctcgggcgatggccgcgcgccgctgtccgccgcccgaaagctgcgcggggaagttgttgatacggtcctgaagccccacgtcgataagcgcttgggtcggttcctgcgcgtctttcatgatttcggaggcgagctccacgttctccttggccgtgaggttggccaccagattgtaggactggaacacgaagccgaggcgttgcgctttgtcaagcgtgagtatgcgttcttcgacgcactgtcccgttcgggcaacgatatgcagatgtatgaccgggtcaaggatgtgttgaagcagatgctgcttgggcaggcggcccgtgtgggtgccgagctgagctacagcggcattccgcacgactatgcgctggaaattctggtctccgccgtctcatcgattatctggctatgggtccggcgcggctgcaaggaggcgcccgagcaaatctgcgccatcatcgagaaaaacaaaaccaccgcgcccgtagacatcatacggtaagcgcggtggttcgtgtcggaatctgactcccctccctgagaggagtcaatccgcaggagaaatcggaaacctaaaactcagacagccagctcggccttgagttccttgaggtcggccaggatctcatcgtggcacttctcgttggtgtcgaaggcaaggtggcagaaggcgcactcgtggccttcgcggttctcgtggcaagcgtgcaggcaagccttgcccccgcactcttcggtgtggttgtgctcgcagccggtgtcgtcacagcagtcgccggtgaagcagcagccgcagcggccacaggcggccacgccgtgctcgtgcttggtggcgtcgaacttggccagcgtgtccttgcagacggcgaaggtgccctcttcggtaacgatctcgtaagcatgctcatcgatggtcttgatagtcattgttgttcctttcagcgtttgttcgtctgcgactgtagggcggcagacggcagcggcgaaagttggtgaaagtgattatcaggcccattgctgctattaagagcaatgagacctcatgcagttttgtgtcggtaacgggccgattgttggccgagtgtcgacgcctggtataggtggtggcggtaccaatccaaatattggtggaacgacgacgatgagcgtgtctggcgtcggtgctgcgccaagcgttggcaatctaacgatgcgagtggagcttatatcgtcgctattgcgccaaggattggaagggcaccgatgctgaaggccagtagcgtcgggactgcgccattatttgttcgagcgccgacggccagtatcgtctggcgtcgtcagtggtccatcctttggtgaggtgccgacgctgagaggcggttcgatggcatgcttcgccgcacacttggggcacaggtcgaaaatctccagttcgtgggcgatggtctggtacttcaactgcttggtggctttgtcgatccactgctcaaatccgggaatctcgatttcgatggtccgcccgcattcgtggcatacgatgtgatggtggtgatgctggtccgagcactcgcggtagagggcctcgccgttgacgtggattacgtcgagctcgccttgggaggccatcatctgcacattgcggtaggcggtggccgtgccgatgcgcgtgccgcgctcgcgcaggatgtcggtgatttcctgggccgtggcgaatcgggatagttccgccaggacctgggtgatgaggagtcggggtcgcgtcacgcgccgagtggtcgcggtttgctcgatgctcatgacgttttgcccctttctgttaacaaatgatattcattatcgttattaaagcaaatcagatgcccggcatgttgtcacatgatttgaatcaactggcagaaatcccgcgtttcaacgaggcctgcgcgggatttctgccagttttgagccctataaaggcagagcccccgcgtacctttcgttgtaacgcgggatttctgccgatatggggcgagtcatggcgcagcgcagtgctttccatttcgggagacgcgtcatttactgccagtagaagtagccggtcggggcggccgcggctttgctggccgaccggacctgcagtatcaggccttggcgctcgtggccggcggagccgtaggcgccctgcttgatgacggcgtcgacggtgacccagtcgtgattatgcggggtgccggccttgccggagctggctatgaacccgaatggggtcatgtcgagaatgcagcaggacatgaactggcgggacagctcgaactcgtccgcgtcgaacgtacgcgacttgctcacaaacccggtgacctgcacatggtaaccgacgtaacgctgcggattatggtcgatctgctcgaaccatgagccgaattcgtcgtcgctgatggtcagggtcttgtttgtcgtgtcgagtccgtgcagctgcgaggcgccatcaggcttgtgcgagctgcggggaatggcgatagcgcggccgccggcgtactcgtcgaagccgccgctgccgctgctgggctggaacggcacgacgatcagcagcgccggaataatcaaggcgatcaggaaccgcaaaaccgaacgctccgtggcgtggaacagtccgagccatgctgcggtcgccagcacgaacagcagtgccgcaccgatgatgagatacggcagcgaacgcggcgtggtcagcgtggtgtatgatccgcccaccgccgcataggcgatggccgcgcccagcgccgcgaaacacagcgcctccacgcggtcggggagtgtgactttgcgcttcatggctacgctcccatcaccagatgggcggcaatcgcggcgaggaagcaggccgccgccacggtcgcgatgaaccggatgatgaaccgtggccggcattccgtggccagcatcagcgtgttcttgaggtcgagcatcgggccgaagaccaggaaggcaagcatggcggagaccggcagcgcgccaatcatgctggcggcgatcaccgcatcggacgtagagcacagcgaacacaggaacgccagtcccatcgccgccagaatcagcacgatggcaccagcgtcatcgagcgtgcttgaaccgttggtcaacgacgacaatgcggtgcgcatgatggaggcaatgatcgtgccgaacagcagaatcggcatcatccgcataaagtcgtcatgcgtatgccgaatgaaatgcgcgaaccgctccaatccgcgccccgtgcccccgccggcgggggctgtcggcaaagccgactgggggtggctctcaggcgaatcacccgtcgcccctgcacaatcctcgcaaaccaacgaccgcccaatcgtcagcggcctctcacgtaccgcaggggagcggggcggccacaccgcgaacgacacccccgcgactatcgccactaccatgcccaaccccatgcgggccgccaccatccatggtttgtcggtgaatgcgaaccatgtggaccatatcgccatcgggttcatcaccggcaccgcgcacagaaacgtcaccgcacacggcagcggcaggcgtttgcgcatcagattcgcgaacgtgggcaccaccatgcaatcgcacaccggtaggcacaggccggccgccaatgccgcggccagtccgccggccaacgatttcggtatgtggcgggccagagaatcggtgctgacgaacgtgctgaccacggccgacatcatcgcgcccagcagcatgaacggaatcgcctgcaggataagccccgcggcaccggtgccgatacgcaccagcggaaccggaaacccacgcgactcgagcatcgcggaagccgcaatcaggaacgccaccagcggcgtgccgataatcagaaacagatagttcgccgaatggtcctgttgcgcggtgttcacctgttccgtgcgctgcgtgcgaggttctttcatgcgaatatcacctgccatatcgccgtcatattagcaccgtacgcatgatagtggtcgagataatatgcgagttccccgcataccgatggtacacatcgatatgcggggaactttgcacatggttgcctgggccgatggcgaatcggtgggccagcatctcggtggccacttcctccttgctcatggatgccgggtaatacgtgggccagttgtccatttccttgaggatttcttcctgtcgttgaagtgacgttgcacggtggcggcggtggcagaaccggccccggccttgtccgcgtagacggcgttgatggcttcggcggccttcttcgccctcggcgtggtcgtgggaatgctcgtgctcgtcggtggcggtgacgcccatgaggccgcccacgttcacgatggtctggcgtttcttgtcaagctgcgccttttccgcccagccgtcgtagccggcgccgttgagcaccacgatgtctgccttggcgagcttggccagatcggatgcggtggcctcataaaacggcggttcgccccggcaggtgacggcatacggaaggaaatgggagaaagaacgtacgccgccggcctgtggagcggaccgtcgagttgttgttacgagacttgatggattgcggaatccacgatgttggttatggcttcatatacccctttcgtacggctgcggccagattctgcggaacctgaaccacttcgccttcaggcgttctgaccgtggccagctgaggcaccttggccttccagttggctcggcgcgaatgcgtgtttgctcgggacgccttgtacttgggcagtgccatcagccttgcctcgccttccagtgggggttcttcttgttgattacatacagatggccgcgccggcggacgacataggagccatccttgcgggccaatgagcggaccgatgccttgaccttcatgtccgttcctttcttcttgtcttacggtctttgcggaatgtgcggcgaatcacttgcgcccgtaacgagcgttgaacttctgcacctgaccggcggcgtcgatcaccacattcttgccggtgtagaacgggtggctgtagctggacacctccacattgacgagcgggtaggtgttgccgtcctcccagtcgatggtcggcaggtttacggccttggccaccagtgtggacttggtgaggaagtacttgtcggcggagcggtcatagaagaccacggggccgtattcggggtggatgccctcttgcatggttatggacctttggttgtgtggtgttgtgtggtgatatggatgagaatggcgtcggacgcgcgggtggaatccggtgaattgagatggcctgagacggcctgacggccggttgtgccggcccgatcaccagctggatttcaccacgccgggcagtttgcccttgtgtgccttctcacgcagattgatacgtgacaggccgaacttgcggttgtaggcgcgcgggcggccgtcgatggaatcgcggttgcgcagacgggtggggctggcgtcgcgggggagggcctgcagcttgcgcatcgcctcggcgcgttcttcggcggtcagatgagggttgacgctgtcgcgcttgtgttcggcgcggcgttcggcatacttggcgaccatgcgttcgcgctgcaattgtcggttgatcttactggttttggccatgtccggctccttgataaggctccggggcgcgggaatcgcgccggccggagctgggacgagtgcattcgttcattgggcgcatgccgcaaggttcggaagatgagttcatgaaatggtgatagaggaaaccgccggaatgccaacaaggaaacgatttcggcgggtgcttaagcctcttcctcgcctcgcgactggtgtccaatgaacgaacagatggattagcgggtctctcggaagagcacccgtttgcggactaccggatcgaacttggtgagctcaagacggtccggcgtattacgacgattcttggtggtggtgtaggtgaatccggtgccggccgtggacttcagggtgatgaccgggcggattgcggaggatttgcttgccatgagtggtgctttctatgtgtgggtgtcacgctgttatgtcacgtatgtcgcgtacgtcgcggtgccatgtgggtgatgcagctcgttagcgcggtttgttgcgcggttacgcgccggcacagtggcgggcctactgactgcccgagcatgggggtgatgccgtggccggttcagttgacgttctgatcgcggcggatgcgggcgatcgccgcctcgatgccgatgcggtcgatggtcttgatgcccttggcgctcacggtaagcgtgacgtgccgctgcaaggacggcacccagtaccgcttggactgcaggttcggggcgaaggttcggcgtgttttcctgtgcgagtgggagacgcggttgccgaccccggcgcgtgttcccagaatttgacatgttttggacatgcctgcaactatatcataatgataaccattatcaaattagaaaggctgtcatgattcatccggcattgcaatcacagggaaacgcggaggggcgcacgcccgtggtgctgctcaccggcgccgaccgcctgagcctggactccgtggcgttctcgttgatcgattccttcccgtccgtatgctcgattgcttatgacgtgcgcccgaacgaagccgtggaatccggtctcgatatcgtgcgcaacgtcgcgaagccccaggcaagcggggtggtgttcggcgagtccgattcgttcgggctcgaggggtgctgcatgagctgcacggtcaaacatgaccttgaacggacgctcggatcgctgcaagggcgggccggcgcgtttctggtctcgctgcctgtgggccttgaggccacgccggtcgcgcagtatctggccgattccttccgtctcaacgagtggggtgagtcgatgttcgtgggtgcggtggccaatgccgtaggccttgacgaattcgaagagcgattctttgacgacgaccgtttgtgcctgtacggcatgggcgaggagaacggcgtctatgacgagcgttcgaccggcgtagtggtctcccgcctgatccgtgaggcctcgtgcgtgctcgaattgccggtcattggtgccggttgcctggcacgccatttggatacagacggggagtgcgcctgccgcgacatcatccgtgcaatcgccttgcgtgatgcgctggtctgtgaggatgcccacaccgtggggctcgtcgacctggtgcaggcgtcggtctgtgccgcgatgccgttgtgacatgtgcggcaaacggcagaacccccgcgtccgaacgaaggtggcgcgggatttctgtcgtttccgaggccttaaatggcagaacccccgcgcgggtatcgttcggacgcggggatactgccgtttcgtctgccgaaaacggcgggatcccgcgttgtcatcgtcggggcgcgggatttccgccggcagcgcgggtgtgcgcgtgcaacacaccgacgtaaatgcaaatgataataattctcaatacatgttattctgtcgtgttgggggccgggcgatgatgcagcaacagcagcatcgcccggccaaacagccgaattagagaggaaaatccaatcatgtccatcatgtccaacgccaagcgcgcgctcgccatcgcggccgccgcggcgaccctgttctcgatggccgcctgcggttccagcaatgccgccggcaacaagtccgattccagcagcgccgcgtcttccggcaagatcgaggtcgtcgcctccatcaaccagtggggttccgtggccgaagacctcggcggcagcaacgtcgaagtcaccaacatcatgaccaagaccaacgttgaggcgcacgattacgagcccaccagccaggatgttgccaagttcggcactgccaaggtggccgtggtcaacggcgccgattacgacccgtgggccaccaaggccgcccagtcgaccaaggccacgctggtcaccgccgccgaaaccgccggcatcaaggaaggcgacaacccgcacgtctggttctccgccaaggtgcgttccaacgctgccgacgccatcaccgccgcctaccagaaggccgacccgagtcacaaggacgactacgccaagctcaacaaagaatggcacgccaaggaagaccagcttgagtccaagatcaaggagacttccgccaagaccgagaacctgccgtacgccgccaccgaatccgtggcctggcacttggccgacgacctcaagatgaccgacgccaccccgaagggctacgcccaggcttccgccaacgagagcgagccgaccccggccgacatcaaggacttccaggacaccctgaagggcggctccatcaagatgctcgtcttcaacagccaggaagccaactccaccaccgaccagatcaccggtgccgccaaggacgtcaacgtgccgatcgtggagctcaccgagcagatgccgaagcagtacaccaacctgctcgactggatgagcgcactggtcgaccagttcgccgccgccgtgaagtaatgcggcagtagccggcaatccgcaacagcgataagggaaatagccaagtcagatagcgaggcgttgtctaggggagaacagaacacttcgctatcagggaaggctccttatatatcagggtgcttcggggatgtcccgaggcaccctttgcgttagggtgaatagttaggaaacggtaagaaaaatagtggaactatggattttccaaggttcagcggcaacaatatgcccttgaaaagtcacatacggaaacaggcgaatgagcgagaacactagtagtatcaccacagtgaaaccccatttcaagctttgggtcaaaaaagccgaagccaatgaagtcacgccccagcacccccacaagcccttccccggctgggcgtacggcgtgctcttcgttatcttcgacattattgttgtgacggcgctcgaagtgggcgtttcgtccagctccacccgtgtgcaactgtccagtccgaccgtcggattcggcttcgtgagcaagatgtggaccgacggcaatttcgtattcgtactcaacgtgatacttgtcgcgttgctgtacctcatgttgctgatgctgttcaacagattctggacggcaagcatcgtgattcttgcggtcggaatcatcgtggccgccatcgaacatttcaaggtcgagatccgttacgaggccattctgcccgccgacctcggcttccttggctcgaacaccggcaatatgctcaccttcattccggccggcgcgcacgtgaccatcctcgtggcacttggcgcgttcgccgcgctgctcgccctgattctggtgctgcgccacttcgacgggcgcaaaggtcgcatgatccgtacggacaacctgagcctgaacctcacctcccgtctgattctgctgctgctgccgattctggtgttcgcgttgtactgcattcatgtgagcaccaccgattcgctggccaacaagttctcccgcgccttgggggacacgccatccatgtgggattccgtgtatgacgcgcagcgcaacggtccgctcgtggcctttacccgtcagctcaacccgaagatcatggacaagccgagcaactactccgaggagaccatgaagaaggtcgccgctcgctaccagaaggaagcggagacaatcaacgcctcccgcaccaacaacctcactgattcgacagtggtgtacgtgctgtccgaatccttctccgacccgagccgcgtgccgggactgaagaccaataaggattcgatgcccaacatccgcaagatcaaggcgggcaccacctccggcctgatgctctcctccggctacggcggcggtacggccaacctcgaatacatgggactttccggtctgagcatggccaatttcgattcctccctgtccagcccgtaccagcagctggtcccgagccagcattggacccccaccatcaaccagatgtggggtgcgcccgccaactcgctcggctaccatccgtacgagtccagcatgtactcgcgcgctacgaactacaagaagttcgggttctcgcacttctacacgctgaccggtccggacgtgatcaagtatcaggacaagattgacgagtcgccgtacgtctctgataagtcttcctatgattctgcgctggaaggcatcaggtccggcaagacgaacaagttcattcagatcatcaccatgcagaaccacatgccctaccacgagtggtatgagaacaacgactacaccgctgaatccaccacgggtacgccgctgggtgatgatgaacagcagtcgattgagacctatcaaaagggtgtggagattaccgatcaggccactcaggagttcctgaacgaactggatgcgctggataagcccgtcaccgtagtgttctacggcgatcacttgccgggcatctactcgtccgccagcgaggatggcaacaactccttggccctgcacctgaccgattacttcatctggtcgaataaggcttccagctcccaaggcaataaggcaagcgatgcagcctactcttcgccgaacttcttcgtggcacaggccgccgatcacatgaacgccaaggtcagcccgtatctggcgttcctgaccgaaatgcattccaagattgccgctatggaaccgcctgtggtcaacaaggtccaaggctgggatcgtattcccgaaggccagaacatctatctcgaccaaaacggcaacccgatgtccaccgatgacttcgacaaggaaaccaagcagttgcttgccgactacaagctcatccaatacgacatcaccgccggcaaaaactacctcaaagacacagattttatgacgttgccgtaaagcagacagcccggccgaaccgtaaagcggatagctcagtgggctatccgtaggtgaggggagcggctgtgccgcgacggaaaatccggaggattttcggtctgtaggcaacgtgcgagccgacaggcgagccagcaaaacgcgggcgaagcccgtccaaaattgctgtaccgttgccatagtgctgtgagcttcctctgatgagggagctgtcgaacgaagtgagactgagggagagatcccacagaccaatcactcccgccttacaataaagccatgaagcgcattgatgtgaatcatggctggcggttccgttcaattggcaaggaccgcgatacggcagcgcggcagccagtcacgctcccgcacgatgcgatgattcacgagtcgcgcgaccctcgcgggccgtacctcgcgattcatcgaacgaggacatgacggcgtggccagctggtcatgggcgggctatgagggccgcgacgccatcgtgcatgtcaccgatgaccgccgcattgtggttgatgcaggcgggcatatcgccgtcggaccttctgccgaagctgtggatgtggaggtacaagtggactctgtggccgcacaacacgacctgcctgccaatgccgaactgctcggcgtggccagcgccaatcccatcaccgtcgatgaactcgccgacaatacctgcaccacctacttcggccgagcccaagctatttggcgaataccagccgaaacgtctggtattgcctgcagcacaaacgccctcatgccatcgtcatgacggtacgataggtacagtcgatgcccggaaaccgacccgggcatcctgcgggaaggatgtgccatggtcaatgcggatttcgctcagttgcgtcacgcctacgaatccgggtgtacgcggccattggcttggcggcgggcgcaattggatgcgctatgccgtctggtagcggacaatcgtgatgctttcgtggctgcggccatggccgatttgggcaaacccgcggcggaaaccatactgatggagctgaatctggtggccggcgaggcgcagttcgtccgcaaccggctcggactgtgggccgcgcgccatcccaaggcgatgcattggatgctgcaacccgccgccggctggacgatcgccgagcccaagggcgtggtactcatcatctcgccatggaattacccggtgctgttggctctggagccaatggccgacgcgctcgccgcaggcaacgccatctgcctgaagccctccgagctttcgcccaacacctcgcgcctcatcgccgaactcgtgccgcaatatcttgaccccgagtccgtgtgcgtggtcggaggcgggcccaaggaaaccggcgaactgctgaaatgtccgttcaaccatatcttctacaccggcggcgggcacgtcggcaaaatcgtcatgcgtgcggcggccgagcacctgacaccggtcacgttggaactcggcggcaaatcaccgtgcttcgtggaccgtacggtggatatcaatgtggccgcacgacgtatcgcatggggcaagttcaccaatgccggacagacctgcgtggcacccgactatgtgctcgccacgccggatgtggccgaggctctggccgagcgcatcgccgtagccatcaccgaattctatggcgaagatccgaaggcctcgcctgattttggtcgtattatcaacgatcgtcattttgaacgactgtgcaagctattgccggtcggcaccgtgccgtctgaggagccgagctcgccgctggtacaggtggcatcggcggtaggcgcggccatggatatggtcgggcggcgcttcaatgtcgtggctgccggacgcggaagcgcgggggagacagccggtggtggcaccggtagcgcgaacaatgcggcgaagccggcggccggttcgaatacggcagccgctgatagtgatgcgactgcctcggccgctgttgagccgagcgagattcacaaggtgcccggcgtattcgatccggccgggcgaatcgtttgcggaggcaaggtcgatcgcgccgcccgatatatcgcgcctaccgtgctatacggcacgtcaccggatgcgccggtaatgaaggaggagatcttcggcccgattctgccgatcctggtggttgaggatgccgagtccgcaatccgattcatcaacaagcggtcccggccgttggctgcatatgtgttctcgcgcgatcacgaggttcggctgactttcgaacgtcagaccagctccggagctttgggatattcgttgccgttgggtcacctgctgtccagccgactgccgttcggtggcgtgggcgcgtccggcatcgacgcctaccacggcaaagcaggcttcctcaccttcagccacgtcaaaaccgtggttaccaagccgcagttccccgacactctgcgcctcgtgtacccgcccttcaatgaagccaaggccaaactgttcaacatcatcgccaaattcagctagcgtgatatcgctcgctgatattgggtgatggcgttgtcatagtgacgttcgctgtcccggcagccacgtcaatcgattgattcgtataccgggccagatttttctgtcctggtatttgatttcgagtcattttctgcttaccgggacaaaactgacgccgaaagtatcgtccgcgtattacgaaaatggcggaatagtgcggttttgcatggaagggaattccaaatattcctatattcgaggtgttcaactgtcctggtttgcgaaaaagagccgaaatcggctaccgggacagaaaaatctggcccggtggccacgtcaatcgattgacatggccaccgggccaaaaatatgcggcagatgcgccgcttctgttacttcagggctttgaagccgatgtcgtggcggtagaacagtccgcgcagctcgagcttgtcgatgatcgcgtagaccttgtcctgagcggacttgatgtccggggcggaggtttcgacgagcaggacacggccggagttggcaatcagaccacccttgtcgtcggaggcgacgccggcatagtagacatgcgaatcctcgtcgacctcgatctcgggcacacgggcacccttgatgacgttctccgggtagccgttggaggcgatgaccacgccgagggtggcattggactcatcccagatgaattcgggggtttcgccgtcgagaatggcggagatgccggcaccgaggtcggaggtgagcttcgggagcacgacttcggtttccgggtcgccgaaacgagcgttgaattcgatgaccttcggtccgtcggcggtggcgatcaggccggcgtacaggatgccggtgaacggtgtgccttcctcggccatgccttcgacggtggggcgcacgattttctcgatggcctcgtcgaccacggactgcggaatctgcggcaccgggctgtaggcacccatgccaccggtgttcgggccttcgtcgccatcgtgggcgcgcttgtgatcctgggagatcggcatcggccagaaatcagtgccgttgacgaagctcatcagggagaattcctggccgtcaaggaagtcctcgataacgaccttggcaccggcggagccgaagcgatgatcgatgaagatgtcttcaagcgcacgctgggcggtgtgctcgtccatggccacggtcacgcccttgccggcggccagaccatcggccttgatgacgatcggcgcgccatgctcgtgtacgtaagcctgagccatgtccaagtctccgaacgtctgatatttggcggtcggaatgttgtgacggtccatgagctgcttggcgaagtccttggaaccctcgatctgggcggcggccttggacgggccgaacgccttgatgccggcggcggcgaaatcgtccacgatgccttcgatgagcgggacttccgggcccacgaacacccagtc

SEQ ID NO: 315 - DNA, 27344 bp, Unknown
  R42_10m  MAG No. k141_2634
ccgcggtgatgcacgtgtggcctttgcggtagccggtctcgtccacgccgatcgacgtgaggccgccgaacgaagacggcatcgacgccttcaaccgttcggcggccctatgggcggcgtcttccggcggtgcgccacgcgacgtgcgggaaaccgcttacggtcttctggttcgcgacgctcatcggccacgcgcgttccgattcgaaatcgcgtgtgaaccggctgcccggctcggcccacggcacggaagcgaccacgacgccgcacgccgccgtcctggtcatgcccgcggcgcctccttccgcatcgggagcatcggagcatgcccgcacgtggacgcacccggatctcgagcacgggttcggaacgcggcggcgaatccgtgatccgcgcatcctctgcaaccgtgcctttgacgttcggcaatccggtgaatgggcttttgcccagcgttcttcgtgattcatttctttggtcggaaaacagaatacgcgggaacgcccctcacgcttacgaaaccaacggctcgacgacgaaccgacatccacgaaaacagcaatagcgccatattttgcaatatggaagattcagggccttgaaatgacgaaccattacaatgagcggcgaacatacatcacacggcgtaggaaacgccaaggagggcatcatggccgagatcacatggaagtcgattctcaccaagctggtcgggggagaccaccttactgctgaggaatcggagtggttcgtggatgacctgatgcaaggtaacgccaatccggccgccgtgggtgccgcgctcgctatgcagcagcagctgggactgaccgccgacgaggtgcgtggtgccgccaaggccatggtctcccacgccgtgccgctgaacgtttccggtgggaccaccgacatcgtgggcaccggtggtgacggcttcgccaccgtgaacctgtccaccatgggctccgtggccgccgctgcagccggcgtgaagatcgtcaagcacggcaaccgcgctgcatcctcgaagtgcggtgccgccgatgtgctcgaagacctcggcctgccgctggatttgaagccggaggccgtcggcgaagtgggcgacgaggtgggcatcaccttcgcgttcgcccgcaccttccacccggccatgcgcttcgtgggcccgattcgtgccgcgctcggcattccgtgcgtcttcaacatcctgggaccgttgaccaaccccgccaacccggcacacgtggccatcggctgcgccaaccgcaaggtgagcccgatcatggctgccgtctacgccagccgtggtcagtccggcttggtctacacttcgcatgagggcatggatgagctcgcccccaccggcccggtttccgtctgggagattcgcgacggcaaggtcaccgaaaccgagttcgacccgaccgtggatctgggtctcgccaagattaccgtcgaccagctcaagggcggcgtgccggacgtcaacgccaacgcatttaaggacttcctggccggcaaggacattacgtcccgcaccaccgcgctgctcaacgctgcctccgccatcgtggctgacggcaatctggtcggcaacggcacactggccgagcgcttcgccgaggcctacaagctggccgaggatactgtcgactccggcaaggctgaagccctgttcaacaagtggatcgaaaccgccaagtccaaggcgtgatatggaatgggtttgctcgaatatgtttacctttccttcattatcaactatttcgagttgcaggagtccatcgacttcaattcgtgacctatcttggctcggccgcaattacggacgagctacgcctgcgatacattggttcgctatcgctcacacctcgcctacaaacagcccactgggctgtttgcttaacggctcggcctcagagaggggagccaaggactacacaacctacgcgaactacaccctcgcgccgtcgtcgtaatagccaccctgatcaccggggcggtctttgcggttgaggattttggccaccaatccgcccagacccaaaatgacgcccagtccgaagagaatattgagcagcacgcctaagagaggaatcgcgttcaagccgggaacgaatatcatcaccgtttcgcctgcgagaccgatgatgagcaacgccgtcagcagtaccgtagatgctttgaccggaccaagatcagggttcgggggagtgaagccgccatcatcataggcatccatcacattatcggtatccagccagctggagccggtgaaatcacgggggcctgactgcttgccttttttgccgccacggctcgggcgagcatcatcggtgaacgagccgatatccaagtcatctacggaaagcagtgcttccttctcgcgtttcttggcctgcttctcgaactttttggcctgcctggaggaagccacgtcatgcaagtcggcctgatgctcggcttcgaacgcggcccacgccgcatccaaatcgttcgcgtcatgcgattgcggtgtatcggcaccattcgtggccggtccggcggcaccgggagtcgacgacttggacgaagtatcggaatcctgtccgttgcccggcgtgggggttggccgctctccgtcggcattgctattctggttctcagtcataactgtcactctaatcaggcgaccggccaatggctagttcgtctgcgggaggaatgccaagtgctctactggttcttcgtcaaaggtctcggccctattgctcatcatcgtttgagccctgctgtcagtggactgaataacgtgcctcgagagggtggcgcgattatcgcagccaaccatctggcggtgattgacgatgctttgattccgattacctgcccgcgcatggtgcacttcatgggcaaagccgaatacttcgagggcaagggattgaagggcaagttcaagaagtggtggttcacgtccgtgggcgtgttcccggttgatcgttccggtggcagcaagtcgcttggcgcactcgagcatgcacgcgagattatcgaggatgggcacctgttcggtatccacattgaaggcacgcgcagtccggacggtcgactgtacaagggacacaccggtgccgcacgacttgcgctcgagaccggttgcccgattgtgccgaccgccatcatcggctcggacaagctgcagccgattggcacgtcgattcccaagaagggcaagaccaaggtgttgtatggcaagccgattgaggttgcgaagaagccggctgatgaaattacacatgatgatttgcgttcgctgaccgatcgtgtttccaccgcaatccagaaaatgagcggtcaggaattcgtgaacgaatacgcccagaaggtcaaggccgagctcaaggcccagcaggccgctgaagaagccgaaaagtaattaacaaatgaggctccctcgtctcaagacagagggagcctcattcaaatctcacacgatggtgagggtgatgacggtggggttgccgttggcatcgcgcaagcgaatcttgccgccgttggataggtccgtatcgccacttttcacggtacgtaccgtgccgaacaggccaccgagcaccttgtcggttttcacctcgaacccgagaccttcaagtgtcttggttacggcgctttcctgtttgccgacaaggccggacggtatcgtcgccatctccggacccttggaaatcaccacgtccacgctatcgccccacttcagctgggctccggcttcctgagacgcggaaatgacttgaccggcctcgaccttgtcatcgtactgttcggtgacattggccgtgagcttcaactcgccgagcgcggcttgcatctcatcctgggtcttaccgacgatgttaggcatggtcaccggcatcggtcccttgctcaaagtaaccgtcacctcatcgttgtgcttggccgtggtaccgggatcaggggagatcgtcaatgccacaccctgcggcgtgtccatcgaatactcatccttcgactcgtcatgcttgacattatcgaagccggccttcttgagcgcgttcaacgggtccttgccattggccgaattcgcgtcgagaatatccttcgggatgatggtcatccgcacgcccttggacaccaccaccgtaagctcctgattggctcgcttgcttatgcggctgttcacaacggccttggtcttgttcacggaagaagagatgatcttgccttccgccacgtcgtcgctgtattccttgtgcgtcttgtaggggatgccgagagccttcaacgtgctctcatacgtggcccaatccgcgccggccaacgagcattcggtgcctgcattcgcatcgcaggtcacgtcatccggcttgggcacactccaatagctgcccggtccggcaaaccaccaccagccggcggttccgccgattgcagccagtaccagcacgatcaccagtacgatgatgagcggttttttgctgcgctgcttctttggcccggtgccgttggaagcgacgtccggctcatcggaaagggcaagcgctcgggtgaaggcatcgccggcctgaggcagcacttgtgtctcgctgccggactgtgccatgatttgcgtcttatggggagccgaagcatcggctggcgtcgacgaatcaagtgccgtggtgggggcgaccggaggagccggaggattgacgtctgcggcgccaccggtatcggcggtattgcttgcgacatcatcggccaaaaacgccggtacggacggctcgaacgttgctgcaccggcaggtacgccggtcagcggggcctgctcggcgatattgcctaccagcgctgcagcggtggcatcggtatgatcacctccgatgggttcggcatgcaaacggtattgccacgcctccagcggcaatttggcggccaactggctcaattcctcagctgctgccgcgccatcggcggggcgggcatccacctgacgcgcggtcagatgggcgatgaacgccgccacggacggatcaatgccctgacagaccgtggccacggacggcacgtcctcatgaacatgcttgaagacaagcgtcaccggattatccgaatcgaacggcaccttgccggtcagcatctcccatgccatgatgcccacggaatacaggtcgccttgcgcggtggcctgattgttctcgatcatttcgggagccagataagcggcggtgcccaatagcatgccggtggagctcaatgtggcctggctggcggccttggccagaccgaaatcagtgatctgcacatggccgcgatcattgatcaaaatgttctcgggcttgatgtcacggtgaaccacgccggcgcgatgtgcggaagccagaccatccaacgtctccgcgaccacgcgcagcgtctcacgcacggagaatgtgccttgggcgttcatctcatgccgcagattgacgccatgcacatattccatgaccagaaaatcaagtccattgaactcgccggtgtcatacacctgaacgatgtgcgggttggcgatggacgcggccgaattggcctcgcggcggaaccgttcgacgaactgctcccgatgcgggcctttggcgagttgtgtgtgcatgaccttaatcgccacggtgcgccccagacgctcatcgatggcctcatacacggtggccataccaccctcggcgatattgcgcacgatgcggtagcgtccctcaatcatctgcgcgggctcgttctcactcatgttgtatcgtacggttcctttaatcacgactaaacatgttcagtgtacatggccccggttacgcggccggagcatcggcgcatagttgtcacgggttttcaccggtgttcatggtctcatgacccggcggctcgcattgtggactatcgcaaggattcggggacgaatcgcgcacaagcctcggtcagacggcgctgcgcttcggaattcagctcaagaccggcaatcgccttacgggactcaccccatagggcagcgatgcgctcgcgggatcgatcaagagcaccggtcgacgtgaacagttcaatggtgcgggctacctggtcgtcgttgcgacaatccgcttcgaagatggcaatcagatcggccttatcctccgtatctgccgcagacagagcatcagccaacagcactgtgcgtttgccttctcgaatgtctccgccaacgggtttcccggtattgcggcttgatccgacgacatccaacaggtcatcggccagttggaacgccagtccgagcggccggcctacggccaacgcgcaatgcctggcctgatccgggctctctcctgcggccagcagtgcaagcagcagtggggcgatggtggtgtaactggctgtcttccagcggaatacgttcaatgaggcgttcgccagagcttcgggatcagacaacggggtcatctcgacggccaagtccagtatctggccgatctccacctcgcgctgcatggtaagaaacgcctcgttcaaggcatcggtgttgggaagacggctggcggaccggtgtgtgatttcaatgcaggcggtggccagaatatcgccaagcatcaggcccaagccacggcctatggcaccgctgtgtacggcctgttccaaggcacggtgtgcggaaggcttgccccggcgcagatcggattcgtcgatgatgtcgtcatgcaccagtgcggccgtctgaaacacttcaatggcacaggctaggtcgatcatggcgtcacgccgatcaggagtcacgtcgccagcaagaatatcgaaggcgtccaatgcgagcaacgcacgcagtcgtttgcctccttggctggaggaggcggcttggcccacaacctgttccatcaccggtttcagggcgtcggcaacctcgtcggtggcgggggcggcagtcagttcccgcaccaactgaatgatgcgtggctcgatgatttcgcggttgttagcagttgtgcacatgcctaataacttatccacagggtctgaagaacacaagaacgttgggaatcaagggttttgaagctagaaccacaatggtcgttttttcctgcgtcatacggcgttttcagccatagtgggcacacaccccctcggcgcatgagctatccggctcggcgcgcaccacaacaccaatagattgcacaccattagtcaaggaggacatgatgaacaacaacacgccgcacaagccgcgtaagagccgacacgccaaacggcacgccgccgagcagacggagccctttggctttgatgagttggagacgagatcacaggaatttcgcaatgatcgccgacttcgaggcgcgcaacaggctaatgccgactgggtggccgaaccattggatgaatggctgtcttgtctcgatgccgggaacaccgacctagaccgagagacgatggccgcgtttgcggtgggcatgcgcgagaccttatcgattcgtgatgcgctgattctctcgttggttattgatgaaagccgttgccccaagtcatggctcatggaattcgcggcgcgaccgcatctggcacgtacgagaacacgaatgggcgagctgctgacctgcgcattcgaggatgaaggcatgatgccggataaggagcgttgccatgccggcatcggtatgttgctcgatatcgccgaagcctcaccggtgccgtactgcatacaaccattggccgtaatcgcctacaccttatggtggctgggcgatccgcgagcaatggtgttcgccttgcgatgcctgctgctcgatgaggattgttcgctggcggcgatgatattctcagccgccgatcgaggcgtggcaccggcatggtgctcgggctgaatgaacagaaacggcggatttccgaggttttatgcgcgatgcgcggaaggaaagcgtgtggtgatcggcaacacgtcgggcaacgatgtgggaataatcgtccgtggagggtggtttactcacatagttgacgatttgcccttgccagaagtgggcccgtgtggtatatgcacttcacggcgagagatcagaaggagcagttttggccacgaaggaaacgacggcaaccaagcagacagccgagtccagcgaggagaccgagaccaagaagaaggccagctctacgaccaccgcgcgcaagacttctgccaagaagtccaagtccgcagagccctcgaaaaagaccacgcgcaagtccgccgcgaagaaaaccgcgaagaaggccaaggacgatgagctcgtcaaagacgaggacactcaggtcgatgacgagcttgatgacgatgccgaggtcaacgacgacgatttggatgttgacgacctcggcgaggatcttgacgacgttgacgaaggcgatgccgacgacgaagacctcgatgaggacgatgccgacgacgacgatgtggaagacgacgaggacgaggaagaagccaagtccaaggcacccgagcagcccaaggaaaagggtgcctacgtggtctccgacacggatgatgaggaagagaacatcatcccttcgggcaatccgaagcgtcgtgtgatcgcggccggcgcaaccgccgacccggtcaaggactacctgaagcagatcggccgtgtgagcctgctgaacgccgaacaggaagttgacctgtccgagcgcatcgaggccggcctgtacgcccagcacctgctcgacaccgaaagtgaaggcatggagttcaagcgcaagcgtgaactcaagtgggccgccgccgacggcaagaaggctaaggaccatctgctggaagccaacctgcgacttgtggtctcgctcgccaagcgttacacgggtcgtggcatgctcttccttgatttgatccaggaaggcaaccttggtctgattcgtgccgtcgagaagttcgattggaagaagggcttcaagttctccacctacgccacgtggtggattcgtcaggccatcacccgtgccatggctgatcaggcccgcaccattcgcgtgcctgtgcacatggttgaagtgattaacaagctgtcccgtgtacagcgccagatgctgcaggatctggggcgtgaacctacgccggacgagctggcccgcgagctggacatgccggttgagaaggtgcaggaagtgcagaagtacggccgcgaaccgatttccctgcacaccccgcttggcgaggatggcgattctgagttcggcgaccttattgaggataccgacgccatcgctccgtccgacgccgtggccttctccctgctgcaggaacagttcaagcaggtgctggaaaccctgtctccgcgtgaggccggcgtcatcaagatgcgctatggccttgaagacggccagccgaagacgctggacgacatcggccgtgtgtatggcgtgacccgtgaacgcatccgtcagatcgagtccaagaccatgtccaagctgcgccacccgtcccgttcgcagaccctgcgcgacttcctggatcaatgatcatctggctcccctctgtgaggggagccaggcatttgaagagaaaaataggactgtatgcccaaagaagaatacggcgccaaggacctagctgttcttgagggcttggatgcggtgcgcaagcgtccgggcatgtacatcggcaccaccgactcgcagggtcttatgcactgcctgtgggagatcatcgataactccgtggatgaggccttggccggcttctgcaacgatatcgtggtcaccctgcacaccgacggttccgtggaagtcgcggacaatggccgaggcattccggtggataaggaaccgaaaaccggcctgtccggcgtggaggtcgtactgaccaaactgcatgccggtgccaagttcggcaactcgtcttataacgccgtcggtggcctgcacggcgtgggctcctccgtggtcaatgccctgagctcccgactggacgtcgaagtggatcgtgacggcaagacgcaccacatgaccttccaccaaggtcaccctggcgtatacacggatgccgacccggccaatccgtctcccgattccccgttcaagcgcactcgcaagaaccgacccaccgagctggaaatcatcggcaaggtatctcccaaaaccactggtacccgtattcgctactggtatgatccggagattttcaacaaaaccgccgaattctcatacgaacagctcatcgaccgcgtgcgccagaccagcttcctggtgcccggcctcaaaatcaccattgttgacgaaaacgtaccggaaacggcgactgacaccgccgaagccattgatgccgacgcagtcgaacctgcgcaagaccaggccccggctttggacgtctcgtccaacgatgccgaactcttcgacgactccaccgaggctcaagccgacagtaccgagagcctgtccgaggaggacttctcgctgacggccggcgaccaggtcgtcgatggcgcgttcggcgagcagcccgcgcacccgcgcgtcgtggaattcctgcacaccggcggcgtcaaggacttcgtcgacttcctatccaaaggcgagccgatctccgacatctggcgcatccaaggcgagggcacctataaggaggagacccaggccgtgggcgaaggcggtgaactgcacgcccaggaaatcgaacgcacctgcggcgtggacatcgccctgcgatgggtcaacggctacgacaccacaatcatgagcttcgtgaacatcgtggagacgcccggcggcggtactcacgtggacggtttcatgaacgccatcaccaagcagattcgcaaggcggtggaagacaacgcccgcaagctcaaggtgaacatgaagggctccgccatgaaggtggagcgcgacgacatccaagccggactcgtggccgtggtcaccgcacgcgtggccgaacctcagttccaaggccagaccaaggacgtgcttggcaccgcgcaggtcaagccgatcgtcacccggctcaccgacaagcaattcggcgagatgatcaccggctccaaacgcggatacaaggaacaatccggccgcgtgctggagaagatcgtcggcgaaatgcacgcacgcatccagtcgcgcaaggccaaggaggtcacgcgccgcaagaacgcgctcgaatccgcctcgatgccggccaaactctccgactgccagccgggcaatgacgacgtggccgaactgttcatcgtcgagggtgattccgcactcggtaccgccaaggccgcccgcaacgccggtttccaagcgctgctgccgattcgaggcaagattctgaacgtgcagaaggcgtcgattacgcagatgctctccaacaaggaatgcgcggccatcatccaggtggtgggcgccggctccggccagagctttgacatcgaacagtcgcgctaccacaagatcatcatgatgaccgatgccgatgtggacggcgcgcacatccgtatcctgttgctgacgctgttctaccggtacatgcggccgcttatcgaacacggctacgtgtatgccgcagtaccgccgctgcaccgcatcgcgttgaccggctcgcacaagggcgaatacatctacacgtattccgatgacgagctggccggcaaactggccgacctcgacaagaagcacatcggttacaacgacgacatccagcgatacaagggtctgggcgagatggatgccgaccagctggcggacaccaccatggatccgcgcacgcgtatgctgcgccgcatccgcatggaggacgccgcccaggcatccgagatcttcagcctgctgatgggcgacgacgtgccgccgcgcaagcagttcatcgtcgacaacgccgacgatttcgaccgctccaagatcgatacctgatcgaagacgtcgctgataatgacatcgtgcttaccgagaatttccgtaattggcgtttgaggtgagcacgttgtcatatgttttatgcgtgttgcccatgagtcattcgatagactgatgacatcgttatcacaaccggtgccgtactgtgaatgggagatggaacatggccagtctgttgcttgccgtcatctatgtggcgtttatcagtctggggttgccggattcgctactcgggtccgcatggcccaccatgagccaggatctgaacgtgccggtggcgtgggctggcggcatctccgcggtgatttccatgttcacgattgtctcggcgttgctttcggaccgaatgacattgaaattcggggcaggcaaggtcaccgccgtttcggtggcgttgactgcggcggccttggcaggtttctccgttgccccgaattactgggtgctgttggccatcgccataccgtacggccttggcgcgggtggcgtggatgcggcgctcaataactacgtagccattcactacgaaagccggcatatgagctggctgcactgcatgtggggcgtcggcgcatcggtcggcccctacatcatgggctatgcgctgtctcaagggcaaggctggccgtggggctatcggtacatcgcgatcctgcaggtgatgctgaccgtcatcctggtgctgagcctgccgctgtggaagaaacgtggcacgactgggggcggcgaatcgaccgatggtgccgcatcatctgacggcaatgccgagggatgtggtaatgctgaaggggcgtctgttgctgaacgcaaaccgctcggcgtggccggcgtgctcgccattcgcggtgccaaggaaatcctcgtgatgttcttctgctactgcgccatcgaatccacggcgggtctgtgggcctccagctacatggtgatgcacagcggcatcgacaagatcaccgccgccagctgggccagcctattctatgtaggcatcaccgtggggcgtgcgctttccggctttctgaccatgcgattcaaggacccggtcatgattcgcctcggccaagtgctggtgctcgccggcatcctcaccatgttcgtgccattgcctcaccaccttggcgtggtcgttgggccggtggtcatcggcttcgggtgcgcgccgatttatccgtgcgtcatccactcgacgccggcctacttcggcgaagacaaatcgcaggccgtcgtcggcgtgcagatggcctgtgcctatgtgggctcactgctcatgccgccactgttcggcatcatcgcgcaatatgtgacaatcagtctctacccgtggtatttgctggtgctcttggtgctgatggtggccatgcacgagcgtcttcgtaagttgcgcggctgatcatgcgcgcatttgggcccgccgcctactatgcttggagcccatggtgataagtgaagaagaacataaacagatgcccgagcccgtacgggaacgattggaagcgctgaaggatgcgccgggctcggtaatcgtggtcggctcgatgaacgccgattacaccgtgaccaccaaacgactgcccaagccaggcgaaaccgtcaatggtggtgccatgaaagtgttgccgggcggcaaaggcgcgaatcaggcgtctgccgctgctcgcctcggtgtcaatgtccagttgctgggcgcggtgggcgaggactccaacgcggacttcctattaggcaagctggatgaggccggcgtcgacaccgccgatatcctgcacgttgaaggccccagcggcaccacggtaatcaccgtgagcgctgagggcgagaataccatcgtctattcgccgggttccaatgccaaggcaagtgccggctatgtgcaatcacatcgcacgaccatcgccgaatgcgcggtattgggactgtgtttggagagcccgatctccaccgttatcgccgccgcacagaccgcgcatgacgctggcgtgaccgtgctgctcaacgactcgccatttatggacgagctgcctcacgaactggtggaagccacggatattctgctggtcaaccagcatgaagtggctcagttactgggtctgccggacggcgatgtggaatcactcgactggtatgaggtcgccgaacgattcaccgattacggattcgaccgggcgatagtgacgcttggtgcgtcggggtcggtggtgatcgagaacggacgttggcatcgcgtatccgccgcgcaagtcaatgcggtggacaccaccggttgcggcgactcgttcatgggaactgtgctggctggcttggccgctggccatacgctgctgcaatccgtgcaaatcggctcctatgtctccgcctatgcggccaccaagcttggtgcccaaagcgcctacggcaccgccgaagaagtcatcgcctacttcagctgacctataatcgtacatatgtacgaaaccctgagcctgttttccgaacccaccaaggtgtggttcgagcatgccttcggtcagccgaccgaggcacaggctcaggcatggccggcaatccattccggtcgtaatgtcttggtcatcgcacctaccggctccggcaaaacattggctgcgtttctctcggccattgaccggctgatgaccgtgccacgcacgcggcgtgccggtgtgcgtgtgctgtatatctcgccgttgaaggcgctcgcggccgatgtggccaagaacctagaacagcctttggagggcattgccgcacaatgcgaggcgcaagggctgcccgtgccgaagatcgcggtcgccactcgttcaggcgacaccaccgcacaggagcggcggcgcatagcctcccatccaccggatatcctcgttaccacgccagaatcgttgtatctgttgctcacttcgaaggcagggcggattctcggcactgtcgatacggtgatcgtcgatgagattcatgcagtggcgggcaccaagcgcggcgcacatctggcggtaagtctggaacggctggagaaccttgtcgcggaatcgcgcaagcgagatgcaatcgatgcggatgctgatgagggcagtgataccgccatcgatgctggcctcagtgaccttcatatgcagcgcattggtctatccgctacggtgaatccgcctgaagaggcggcgcgattcctgggcggcggacaaccggttaccatcgtgaatcccggtgggcggcctgcaatggatctgcgcatgattgagccgttggaaaacatgcgtgatttgcagtccgtgaatgccaagcagcgtgtcggtggcgtggaggctgaacggtccgctccgcatatcagcggtgtcacgccggccatgcagcgacttgccgaacgcaggggcattgtgccggtggatgatagagatgtttcttccacttctggggacgattctgatgcgagtgatgcgttcgattcctccgcgttggttggagcggcgggcgaccgtgcctccggttccatctggcccgtggtggaacgcggtattttggatgagattctcgcgcaccgcaccacattggtgttcgtcaattcgcgtggtgtggccgaaaagctcaccgcgcgcctcaatgatctctatgcgcagacccggcatggcaccaatcccgacactgtgcgggatccgggctctccggaaggccgcgaagggttctccacacattacgatgctgtggtcggttccaccaccatgcttgtcggctcgcatgagggcgatgatgtcatcgccatggctcatcatgggtcggtctccaaagaccgtcgcaaaatgattgaggaacggctcaagcgtggtgaattgcgctgcgtggtggccacctccagtttggagctaggcattgatatgggctcggtcaacttgatgattcaagtcgatacaccgttgtcggtctcctccggattgcagcgtgtaggtcgtgccgatcatcaggtcggtggcgtctctcacgcattgttctacccgctcacccgtcagcaaatcgtcacgggggccgcaagtctggaagccatgattgccggcgatatagaaccattggctgtgccgcgcaatccgctcgatattctcgcccagcagaccgtggccgctgcctcgatgcacgatttgaacgctgatgactggtatgccacggtgctccgtgctgcgccgtttgccgaactgccacgtgacatgttcgatgccgtaatcggcatgatgtccggcgaatacaacagagaggaattctcggccttccggccgcgactggtatggaatcgggataatggcctgatttccgcccgtcccggttcgcagaaagtggccgttacctctggcggtacgattcccgatcgagggctgtacaccgtggtcctgcctgaggcggacgccggcaaaggccagcgtcgcgtcggcgagttggatgaggagatggtctacgaatcgcgcgtgggcgatgtcattacgctcggcacctccacatggcagattcaggaaatcacccgtgatcgtgtggtcgtgactccggctccgggccgcaccgcccgtctgccgttctggcacggtgaaggcgctggccgtgactacggtttcagccgtaccatagcccgcttcacccgagaaatcgccgccggattagacgtgaagcggactggggggagttctgccgcagaaggtccagctgtcccaaccttcatcccaacaatcctcacccgtctccaccgagacggcctagaccccaacgctatcaccaacctggcccgcctactctccgagcaacaagccatcaccggcacagttcccagcgaccaaaccctcatcgtggaacggacccgcgatgaagacggcggctggcgcatcgtactgttaagccccttcggccgccgcgttcacgaaccgtggtccatggccatcagccgcagactgcgccaacgctacggtttcgatgggcaggtatatgccgccgatgacggtatcgtcattcagctaccggacggtgacggacatattcctgctcaagacctgttccttttcgacccagaagacctcaaagcagatgtagaacgtcaagtgggcgagtccgtgctattcgccgcacgattccgcgaatgcgccgcccgatcactgttcatgccgcgatccgacccgggccgtcgcgtgcccctatggcagcagcgactgcgagccgcacagctcctgcaagccgcacgtatggtcaagaacttcccgctgctgctggaaaccgcgcgcgaatgtttgcaagacgtatacgacatgcccgccctgaacgaggtgatgaccggattgcaagccggcaccattaccgtgaaggacgtggagaccgagccgccatcgccttttgccgagaacattctctttggcttcgtcggcgtggtgatgtaccagtatgaccaacctcaggccgagcgcagcgcgcaactgttatctctcgatccgcacgtgctcgaacgcttgctcggcaccaccgacatggcacaagtgctcaacccggacgtgattcgcgaagtcgaacaggaactgggggagcgcactttctggaatgaacttgccgacgatgatgtgactggtcgcgtgacccgttacgccaaaacccatggtcctttcaccgccgatcagctcatggccgatctgcacctcgatgctacggatgccgtgcatactttggatgtactggctgccaaaggcgagttgctgcaaggccattttgtagatgatgacaagcaaggccaacagtggctccataaggacgtattccgccgcattcggtctcgctcattggccaaggcgcgtaaagcagtcaagccagtagaaccagaggcgttccagatgtttcttatcgaccgacaaggtatcgggccggtcggcggcgaacgatatgaaggtgccgacgggctcatgcgcgttatcgagcagctggagggcatagcactgcccactgcactctgggagtcggcggtattccccgcacgagtacgagactaccaacctgcattgctggatgagttactgaccagcggcgatgtggtctgggtcggctcaaaaaccgggggaaccagtgcgatggaccccggtgaggttgctttctatccggcggattcaatattgctcagcggtgtggaacatggtacgacatcgaacgcttcagacgccaccatgccggaagcgattctgaccgcattggactcagggggagcgttccatgcccgtcaactggtggatgccgccaaacgtgtgtggaatgaggccgcggagccggacatcaatccaaacaccggtgaaatcattccgcaagagtggagcgaacagcagttcaaggatgccttgtggagcttggtctggcaaggtaaggtcaccaattccagcttcgcgccggtacgtgcattaaccgcaggcgcagcaagcccgcgtaaatccactacatcacgtcgtcgtgggcgtgtcgctccgattcaccgagccactacggatatgacgttaggaggtttgtggtctgccgtaatcgggcaagctgaagccgaagacactgatcagaccgagcaggcgctcgcactggtcgagacgttgctggacaggtatggcgtcatcgcgcagccggtgatcgacaaggaaaatatcccgggtggctactcagcgttgtatccgatattgcagcgcatggaggggcatggtcgactggtacgaggcatgttcgtccgtggtttcggcgcggcccaatttgccgagcgcgacaccgtggatgcgttgcgtcatccgtcagagcatcgcggccagtccgtggtggcattgagtgtgctcgaccccgcaaatctcagtggctccgccatcgcgtggccggacgcgcctgccggtgcgggtaaaccggcacgccgtatcggagccacggtcgtgctcaatgcgcaaggtgcgctactatacgcggctgccaaagccaagcacttgacggcgttcgatcaatcggtcggccatgaacccgccgccaatgattccgacgaacaaatgcgcaaggccgccacagaactggcctacgctctcaaacgcaatggcaccggttccgtgacgttcagcgacatcaatggcgaacccctcaacgcgcgtcaccccttcgcccgcatcctccaccagtccggcttcacccccgttccccgaggcatgcggctgtactgattgagcccagctatcgaatgcggtagttggagccgcgttgggtcatgatgaggccggcgtgggtgagcttcttatccagtgtgtagagggcgttcctgaggagcccttgttgctcgaagaatgggccaccgacgagcttgaccaattcgctggtgttgacaaactggccatcagccttgaccagtgcttcaagcaaactgtattccagacgggacagtgaaattgcggtgtgtgtggatgcgtagtaggctttgcgattcgtggtatccaacgtgagattgccacgaatgatcatggtgggggagtcggtggcaagcgagccgacgtatgagagcagttcgccatcggagaatggtttgctcagtacggcatccgggtgtcgtacattagctcgtgcgctagcggcagcattgtccgtgcactgttcggcttcggcatctgagttgtttgcgtgtgaatccgcgctgaaggagctgtagggcgtctcttcgatcggggcgtactcgtcaggcagcgctcgccagcggctgccttcgccgatggttttgctgagtggcgtcgaagtcagcagcaggattttaacggaggcacgggcattgtgaagggattcgatgagttgctcggtggagatgccgagcagggattcatcgagaatcactgcgtcaaatagctccttggtgaccgcggcgagcgcgatactgccggtgcttgccaaggacacctcatgacgacaggcaagcagcgcactacgaatggcgcgggccaacggttcattggatacggcaaccagtagtctcatcgccacctccttgatgcttagtgtaggtcgggtttagggtctcttctctatgtgtttggctcactatcgttcgctcctcgcctacaaacaccccactgggggtgtttgctttacggctcggcccatcagagggagcttaattgaggttacgcaatgaaggcgatgggggaggcgaggtccactccggagccgtctcggcgcatatcgggcttgggaagctcgaccggggagcctgcggatgtggaggcatgcaacgggtagagaccaatccaggcaagaatcagcgtgttctggcccttgaggaagcgctgggagcgtacgccaccggtagcgcggcccttggtggggtacatttccagcggggtgaccttggcggcgccgttttcggtgccgggtagtgcatcggagtcgccggccacggtgagcaccaccgcgccggagccggaagtcaaaccgttctcgccctcctcataggtccatgccaccttgccggcgggaaccacgttgaatgccgccacatgggcgccctcggccagcttgatgccggccataccgcccgcggtgcgaccctgcgggcgcacgttcttcgcctcaaaggtcagtagcgaggaatcggaggagatgaacaccagacggtcgtcatcctcggccacggcggcgaataccacttcgtcgccatctttcagatcaatgacgggccaggaatccatggtggtgggtgcctcacggttccaacgcttgatgacaccgttacgggtaccgatagccagcgacggcaacggcttggcctcggcggcaccatcctcgctctcatccttggcactggccttgccggatgtcggctgctccatggcgatcgccgtaatcacgcgctcgccacgaatcggatcggtggattcggtcatgccgatcagttcgtcggcttggaccccacccttcagcgacaacgtggcagaagcaggtagcgccggcaaatcaaccacatgcgcgagcaccaggcggccggccgacgtgaccagcccgtacgtggcgcgcgtggaggtctcgaagattgtggtgatttgatcgtctcgcagacgttcatcggatgtggaccgtacattgaacacgtccatcgcgcttggcgtggtacgggcaatcaaaccggtggcgctcatcatcaccacgcacggctcgtcttcgatcttcaaggctccggtcagcgcggaccgctcgccggtcttcttggcggcggcggcggctgcggccacatcggcttcggcggaggaaatcgtggtggcggccttcaccgcttcgagcgcggacttggacacacccgaagccccggcaccctgcgccacgaccggcgtcagcgtgccatccgggtcggcgtccagcagcacggtgcgacgcggcgagccccacttggcgaccgcctcgtccatctcgtcggtgaccacctggtcgagcgcttcggcggaggccagaatgcgggtcagctcctcgatgcgcttcttcaggtcatcgcgttcggcctcaagttcgatgcggttcatcttggtcagacggcgcagacgcaggtcgaggatgtactgggcctggacctcgtccaggtcgaacacaaccatcaaacggcttttcgcggcatccgcatcatctgaggtgcggattacctggatcacctcgtcgatgtccagcatggccagcagcaggccctcgaccaggtgcaggcgctccaacgccttcttcttgcgatattcgctgcgacggcggatcaccacacggcggtggtcaacccacacctgaagcatctccttcaggcccatcgtgtgcgggcggccctccaccagcgccacgttgttcatggcaaaattgtcctgcaacggcgtgtgcttgaacagctgcaccagcaccgcatgcgggtcgaaaccggtcttgatctcgatgacgatacgcgtgccgttatgacgatcggtcagatcgaacgcgccggaaatcccctccagcttgcggttcttcacgccgtcggaaatacgctcgatcaccttctccgggcccaccatgtacggcagctcggtgatcacgatggcctgcttgcgggccgtgacatgttcgatatgcgtggcggcgcgcgtggtgagcgtaccacggccgttggcataggcctcacggatgccgtcgcggccgatgatcgtgccgccggtgggccagtcggggccgggcacgtaacgcatcagttgttccagggtggcgtccgaatgcgccatgaggaacttggcggcgttcaccacctcgcccagattgtgggtggccaggttcgtggccatgcccacggcgatgcccgagccgccgttgaccagcagattcgggatggcggccggcagcacggtcggttccttgagcttgttgtcatagttcggcgtgaagtcgacggtgtcctcatcgatatccgcgttcatgccgagggccgccgggccaagcctggcctcggtgtaacgggaggccgcagggccgtcatccagcgagccgaagttgccgtggccatctaccagcggcagacgcatcgcgaacggctgtgccaaacgcaccatggcctcgtagatcgcggaatcgccgtgcggatggagcttgcccatcacctcgcccaccacgcgggcggacttcatatacgggcggtcgggagtcaggttcatctcgcccatctggtagacgatacggcgctgcaccggcttcaagccatcgcgcgcatcgggcagtgcgcgtgcgtaaatcaccgaatacgcatactcgaggaaggatttgctcatctcctcgttcagcggcgtctcgacgatatgctccttgaccgtgcgcggatcgtaggtttgcgcggacggtttgcggtgtgatgccatgaaactccctttcgaacgcccccatattagcgggagggcgcgaaacagtgcgcagagaacggttctcaataacaactgtgcgctggtttcggtgcgccaatcgcacatgtttgccgataaaatggcgtgattctagcgtttcagtcgatgtgcgtttgtttgattatgtgcgttggggcgcacagttgttattgagaaccgttctctgcgcactgagccaaggggaggggtgctacttgaatgggcaactatgagtgttgagacgccggatatggacgagttgctgcggctggtgcccactgtgggctatggggatgacgccccggccgatcggcgtgggggagcgctgcacctgtccgccgtgctgcccgccttgtccgccgcgattgggcatccgactcccaccaaggtccacgccgatcccaaggcctgccagcgcgcgttgggactgcccgacgccgaatcggccatcgtggtgctcgtggacggcctgggcttctggaacctcgccatgcgcctcggccacgcgccctatctgcgttcgctgatgaacgaacgcgccaatcagcgtcccatcgccacctgcgctccaagcaccactgtggcggccatggccgcattcggtaccggaacctgcccgggactgaccgcaatggcgggctatacgcagctcgaacccgccagccataagctcatccaactcatccagttcaaagacgcgctggcacccaaaccagccaatccgcacattcctgtgccacccatggtcgatccgctcgaccagcagcgcgaggagacggtgttcgagaaacttgcggctcaagaggtgcgcgtcacaagctcggggttgcccaagttctccaaatcgccattgaccgaagccgcattgcgaggcaccgactatcaaggcaacgtcaccccacgcgatcgtgtgctggccgcctcacgtgcctcccgtacccccggcctgacctacctgtacatccgtgacgccgacaaagtcggccacaattacgggtgggattccgaacactgggtggccgcattcgaacatatcgacgcccagctcgcgctcctgaaacgcagcgcacccaaaggcacgctgatcgtcatcgtggccgaccacggcatggtgcaaaccgacgtggaccagcggattgacatcgccgttgaaccgcagctcacccgaggcgtgtcactggtcgggggagagcctcgctcgctgatgctgtatgccgagccggatgaacgacctgaggatatagcttgccggtggcgcgattacctgcaagaccgagccttggtgcggaccagggatgaggccatcgcggacggattgtttggaccggtctgcgagcgagtccggccgatgctcggcgatgtggtcgtgcaggcagcgggagccgtgaccctcgtcgattcgcgtacgcaaggagacaaagccacccacctgccgagcgtgcatggctcccaaacggcattggaaatggatattccctgcctgatcgatatggcctgattcggaaattcagtctccgaacagaatctcgtcccagcttggtacggctgaacgtcctgatttacgcttggccggtttggctggtgcctcgtgtttggtggcggcggattcggccgcccgctcctgctcggtggctaccagctgtgcattggggccacgccgtacggtctcgtccgaaatattgtcagaaccctgctctggtgccgtggcagacgattgctgcaatcctgcggcagatgacgaaacagatccggcggtctgcgaagagaccgggctgggggccgtagcgtcatgagcctggttcgtggccggtgagatggacgtggataggtccaccgggggcatggaacctgtggaagtgacggagggccggatcgcggcaggccgtgcggccggaatcgaaggcgtaggcgccgcccaagcagacacggcgcgctcgatacgcgcggaacgtacggagtcgccgggcagttcaggaatcgtcggcttgagtttggaatccgtggctgattccggattctgctcgccgagcagttttcgagcggcattgttcaggctcatcacggaattgtcgtgcatattccacgtccattcggcatggatctcacggcccgcggaagtgaatatcgccacgatgcgccaaggctcaagtccgcgccgggtggatttccaggtcactgattccatgccgattccagcagaggccagcgtgcgttccaccagttcgctgatggtgcgcaccctgctgtctttgggtgccgccacggcaaggaactgttcgatggcatactgtttctcggtttccacagccatggagaaacgacgtaccagcgtttcgctcagatgatatttctccgcgacacgggccggatcggcgccggcgcgaatcagcgactgtatctgggaaatcggcaaagtggactgctgatgcggctggggggcctgtcgcgtctcgcttctgacctgcttggcctcaagaatcgcccgttcgagcgtgtcgtccacgctcacggccatttccctgccgccaatggagaatacgaggtcccccgtcttgctcacgcgtacgaaacgggctttttcaagccgatcatctggcatattcgcaccactttccgtcgcaaagacattacttcttttaagtatgccccacgtgtcgaactttacgagtatttcaaatcgtgtatcctatgggcgagtacggcgctgaccgtgctatatatatcgacttacgaaccaaagacgacgaaaggaccatgatggctcaggattatgattccccccgcaataaggatgaggacgaggaatcgctgcaggcgctggggaagtcctcgcagaacgcctcgagcgacatcgacgacgatgagaacgccatcgccgaagactacgaactgccgggcgccgatttgagcaacgaggattcctcggtgaccgtcatccccatgcagggtgacgagttcatctgctcgcagtgcttcctggtcaagcatcgcagccagctcgcctacacggacgaggatggccagccggtgtgtgaggagtgcgccgcctgatggcgttcgacgagacctacaacgagcccgaatccaccgaggtcctggtcaagagcctcgaccccgaacatccggcccagctgcactatgcccacgcgggcgatgccggtgccgacctcatcaccaccgtcgatgtgacgctgaagccttttgaacgggtactggtgcccaccggcgtggccatcgccctacctgcgggctacgtggcgttggtgcatccgcgttccgggctggccgccaagcagggcgtcaccgtgctcaacgcgcctggcaccgttgatgccggctaccgtggcgaaatcaaggtgccgctgatcaacctcgatccggaacgcaccgccgtcttccatccgggcgatcgcatcgctcaattggtgattcagcggtatgttgaggcccggttcatcccggccgaaaccctgcccggatccgatcgcgccgaacgtgggttcggttcgacgggagtggcgtcctgaccggattgggccggttgaatgaccaaggtgatgacggcaacgacggttgcggaaccaatgatggcgaacaggtgcatgcacaaggctccggttcgcggctacaatgaacttcatgacgagggaggtgactggcatggcagagattgatggcgagcagtacgccgcccgtaagttgggttgtgagatcagtgccgatccgctcaatccgctggatccaatcaagaaagtgtgcaagtcccaccatcccggtgaggatttgtccatcctcgaccgcgcgtaccggcgcgccgtcatccagcattgcacgcaacggcgcaagtcgggcgaaccatacatcatccatccgttggccgtttcccagattctcgcggatttgggcatggggccgatcgtggtggcggccggcctgttgcatgacacggtggaggacaccgactacacgttggatcaatgccgtgccgagttcggcgacaccgtggccggtctggtcgatggcgtcaccaagctcagccagcttgaagtgggcgactccgcccaagccgaaaccattcgcaaacttgtggtggccatgagccgcgacgtgcgcaccttggtggtcaagctcgccgaccgtgtacacaacgcccgcacctggcgctatgtgaagaccacgtccgcccagaagaaggcgcgtgaaaccctcgacgtgtacgcgcctttggccaaccgactcggtatgaacgccatcaagacggagcttgaggaactgagcttcaaagtgctctacccgaagatctacaacgagatcgtggtgctggtggctcgccgagccggccagcgcgatgtgtacctgaagcagattctggcggagatcaacgaggatctcgacgagcagaacatcaaggcatacgtcaccggacgcccgaaggactacttctccatctaccagaagatgatcgtgcgcggccatgatttcgcgaacatctacgatttggtcggtgtgcgcatcatcgtcgacaccattcaggactgctatgcggcgcttggtgccgtgcatgcgcggtggaacccggttcccggccggttcaaggattacatcgccatgccgaagctcaacatgtaccagtcg

SEQ ID NO: 316 - DNA, 67608 bp, Unknown
  R42_10m  MAG No. k141_2648
aagaaccccggcaagctgaccgacagacggtccgaggcgtccgggaacctgcgggacacggaccccaagggccggccctaccgttcatgacggctcagggaacccctccggacgatgcccaaacgaccggccgaccaggcccgggccgaactggaccaccgggtgctccgggcgtcccacagccgcatccccgagatcgtcgaactcgcccgaaagatccgccgtcatgggcccgacatcctcaagacaatcgaattgggctgttcaaacgccaggctcgaggcgtccgacaacaggatcaaggtcaccatccgcatggcctacggcttccaccacgcgaacaatcccatcgccctcgtcatgctccgccgcggcggactcgacatacgcccaccacaaccaagaacccaacccacgaaaacagcagaagcctcttttttgtgctatcccgtaaaactgcgggacggcagctcattttcgccgttttagccgtgccgtcccacatcaccctttgtggaccgtgacaccataacaccgagaatggcggaatttcaacgattccgtaattcgtactgcgggacgccacgctagtcaatcgattgacactcgtgccatcccgcaacagtgtgggatacgacgtcaaaatccgcgaaaatcgcgtgccgtcccgcgcgtacggcaccgcacgaatatatgctgatgaaccgcacaaaaaatggctccccgtgtggggagccatgagctagttactaactagcgatgcgtcacttctcgttctggccgtggcacatcttgtacttgcggccggaaccgcacgggcacggggcgttcttgccggtgccagggaaggtgcggccgtcggcccacggcgtcttgagctcttcgctcttcggacgcttggaaaccgggaccttgccttcggcgtggctgatcggagccggtccggcaacaggcagcgtggactcgccggccccggagacggctgcggattcggcgatcgcctgcttggcgtccgtatcctcgtcctcttcctcgacttcgccctcggcggcctcgaccacggattcgccgttctcgtcagggccggaggccacggcgatggtgtcggcgctttcggcggtctcctcgacctcgtcaacggcctcgtcggtggtggcgacctgcttgatgtcgatgtggaacagcagctggacggtctcctccttaatggcctcgatcatggagttgtacatctggtagccttcgcgctggtattcgaccagcgggtcgcgctggcccatgccacgcaggccgatgccgtccttgaggtaatccatctcgtaaaggtgctcgcgccacttgcggtcgagcacggcgagcaccacgcggcgttcgagatcgcgcaagccggtctcgccgatggtctcctccatttcgccgtactgctgcctggcgtcctcgacgatcaggtcgcgcacggcctcgacggccttcgcacccttgaggccgccgacgatcttcctgacctcgtcttcgtcgaccttggtggggatcacggtgttgagcgccttgaacaggccctcccaatcccagtccttcggtttctcggatcccttgttggcacccttgatgtaggactcgacggtgtcggaaatgaaacgcaggatgtccttgtggatgtcttcgcccttgagcacggcctgacgctcggagtagatgacggtgcgctgcttgttcatcacgtcatcgtacttcaacacgttcttgcgaatctcatagttacgggattcgacggccttctgcgcggtgcgcacgcccttggtgacggacttggcctcgatcggctggccttcctccatgcccttggccatgacctgggccaccagctgggtgttgaacagacgcatcaaatcgtcttccagcgacagatagaagcgggactcgcccggatcgccctggcggccggaacgaccgcgcaactggttgtcgattcgacgggactcgtggcgttcggtgccgagcacatacaggccgcccagctccttgacctcctcatgctcgtccttgacctgggccttgatctcgttcagggtgcccggccaacgcttctcatactcttccggggtgtcctccggagagtaaccttcggacttcagtttggcgtcggcaaggaactcgacgttgccgccgagcatgatgtcggtaccacggccggccatgttggtggccacggtgacggcgcccttgcggccggcgacggcgaccacggcggcttccttctcgtgctgcttggcgttcaggacctggtgcgggatcttcgccacgtcgagcagggcggagaccacttcggagctttccacggaggcggtgccgagcagcaccggctggccctcggcgtgtcgcttggccacgtccttgacgatggcggccagcttctccttcttggtgcggtagatgaggtcgtcctggtccttgcggatcatcggcttgttggtcttgatcggcagcacgcccagcttgtaggtgttcatgaattcggcggcttcggtttcggccgtaccggtcatgcccgcgagcttgtcgtacatacggaagtagttttgcaaggtgatggtggcgaaggtctggttctcggccttgacctccacgccttccttggcttcgatggcctggtgcagaccctcgttgtaccggcggcccggcaggatacggccggtgtgctcgtcgacgatgagcacctcgccttgggtgacgacgtagtccttgtcacgcaggaacagttccttggccttgatggcgttgttgaggtagccgatcagggcggtgttggccggctcgtacaggttgtcgatgccgaggaagtcctcgaccttggtgatgcccgggtccaggatgccgacgaccttcttcttctcgtcgacgtcgtagtcctcgtcgcgggtgagcttcagcaccagcttggcgaactgacggtaccagcgggtcacgtcgccttcggccgggccggagatgataagcggggtacgggcctcatcgatgaggatggagtcgacctcatcgacgatggcgtagtggtggccgcgttgcacgaggtcggccttctcccaggccatgttgtcacgcaggtagtcgaagccgaactcgttgttggtgccgtaggtgatgtcggcgttgtactgcttgcggcgctccggcggcttctgctcggtgatgatgcagccgacgttcatgccgaggaagcggtagatacggcccatcagctcgctctggtagctggcgaggtagtcgttgacggtgaccacgtgcacgcccttgccttcgagagcgttcagataggtgggcagggtggcgaccagggtcttgccttcaccggtcttcatttcggcgatgttgccccagtgcagggcggcaccgcccatgagctgcacgtcgaagtgacgctggccgagggtgcgcttggagacctcgcgcacggtggcgaacgcctcgggcatgatctcgtccagactcttgccgttttcgatttcctgcttgaacttcggggtttgggccttcaggtcctcgtcggagagggcggaaatctcgtcctccagggcgttcacggccttggccacgttctccagcttcttgagctggtggccttcacccattcgcagggctttgtcaacaatatcgaccactgggttctcccttgactgataagtggtggtgtccgcgtaccagaatagcgcctcgcaccgtcagcaatcgaatttttcgacctttttacgaaaaaatggaccgcttccatattggaagcggtccatgcggtatcagctgatcatgtcagcagcccttaccctcaggctttcttgacattctccggagtgtcgatttcgaacacgccgtagctccaaccgtgacggtgatagacgacggacgggcgtccggtctccttgttcacgaacaggaagaaatcgtgtccgatcagttccatctcgtacagcgcctcgtcgatgctcataggctcggcgatgtgcaacttgcgacggatgacaatcggcgtatccccaacctggacctccacggattcgccagggccaagatcggaggcgaccgcagcctgcgggctgttgttcggctcttcctccgacacctccggctcgggctccggggcgataacacccagatccaccgggaccgggtttgcgtaaccacgacggtgatccttgcgacggtcacgagtacgacgcagacgcagcgtcaacttatccagcgccatgtccagcgcgctgaattcatcggtgctggaagcctccgcacgcaccacggtacgtccggcgataacggtgatttccacgcgcttggcggtatcggcctgacgcgggttgccctcatgggtcagcacgatctgcgcgcgctgagcatccggggcgatagcggtcacacgattcatcttggtctcgaccacatcacggaacctttgcttgacctgcgtgtggcgtccggtaacgacgatttccatgttgacctcctctaactcaagcggtgtaacccgctatatgtgttccgaacggcatcatcaccgaccgggtatgtttcattgtagacgaacaatgggtgaacggccggaaactcgcccagagaatatatgtttattcccgggcttttctctgcaatgaaacgatgtatatactggggttttggcagcagtctcctataagaagatttgataccggtttatcaggctggctcgtttgttcgtcatggcaaatactgcaatggataggcaacgttttcttgctctttctcgcacataccaagctcttacagatttgattcgtctccatacgacacgccacaacacgcccgacacgccccatccgatattcggcgcgtcgttcacgaatcgcccaactatgcccaactatggagaaaacaggataactgggcaacgtcatggcctcaccgcagggcgggatgccgccttttccgcaccttatgtataattgcaggcttgagacctcttgatggccgcggccgtgatcttcattgggatcggctgaggaacttccgggctccatagagcacgatggcggataacgtccgcccagggtgacctgagagatagcgcaacagagaacagaccgcccgtcctcgacgggtaagggtgaaacggcggtgtaagagaccaccgggcctctggtaacagtaggtcgcatggcaagcctcatcgggagcaaggccaagcagatggcggtaagggctgctcgcccgtgtcatcgggtaggctgctagagcctggcggcaacgtcaggtcgagatggatggccatccgtgccgtgcgttcgtgcacggcacgacagaacccggggtataagaggtctcatttttttcttggctacaccaacaattcggcggcgactcggcggagggtttcggggctgtgtcctttgcggccgcctgcggaccaaaaccgacgctgacggacctgacgatcgaggccatgggttttgcgggctatttggcggcccaattcccatgcggcatcttcaaagatgccattttgctcagcttcgccacacacctgttcagccagtttgcggtccacgcctttgcgagcaagttccaggaccgcaccacgacgacccatcatgcgaccggcacaatagcgtacggccgattcggcataagcgcggtcgtcaatcagttgcacgcgaatcagccgttcgatgacctcgtccacaatcgcctcgccatagcctttgctgagcaatcgttcgcgcaacgcgccggatgcacgtggggccgcgtccagcaaacgcaatgcagcctcgcggcaagcgtccaaatcattgggatcttcgacaacggcagcgtctctcccccgtcgagaaaaacgtcccggcggtttcgactgaacacgctgctcggcaatgggcatgtcttgcgacgcaacaggattgcgccgcaagaatgcttcggcactaatcatgttcaggccttagctgcgccggccttggcacgggtcgttttggcagcaggcgccgctgcggccttgctgtccttggccacgtcggcagcggcggcctcgctgacagcggccgctgctgcggcttcgccatcttccgcgaactggtcggcggaaccgatcagaccgaactcggccttgaccttattctcaatctcctcggtgatggccgggttgtccttaaggaactgacggaccttctctcgtccctgaccgagctgatcaccctcataggtgaaccacgaaccggacttcttgaccacgccgacctgctgggccatgtcgatcaccgagccctcacgggaaatgccttcaccgtagagcatgtcgaattcggcggacttgaaaggcggggccatcttgttcttgaccaccttgacgcgcgtgcggttgcccaccgcttcgtcgccattcttcagggtttgaatacgacgaatgtcgagacgcacggaggcatagaacttcagggccttgccgccggtggtggtttcgggattgccgaagaacacgccgatcttttcacgcagctggttgatgaagatggcggtggtgccggcctgagccaacgcgccggtcatcttgcgcagcgcctggctcatgagtcgggcctgcaaaccaacatggctgtctcccatttcgccttcgatttcggccttcggcactagggcggcgaccgagtcgatgacgatgacgtcaagtgcaccggagcgaatcagcatgtcggcgatttcgagggcctgctcgccgttatccggctgggagacgatgagtgagtcggtgtccacgccgagcttgcgggcgtaggccgggtcgagtgcgtgttcggcatcgatgtaggccgccacgccgcccttcttctgggcattggccaccacatgcaatgcgagcgtggtcttaccggatgattcggggccgtagatctccacgatgcggcccttgggcaggccgccgatgccgagcgccatatcgagggccaacgaaccggtgggaatcacctcgacgttctgctcgggctggtcgcccagtcgcattgcggaacctttgccgaagctcttctcaacctgcgccagcgcggtgtccagcgccgccttgcgcttgggatcgagctcgtgcttgtcctcggctgccgggtccttggccggcttggtctcaagtgccatgatcttctccttgtcgaagtcgtgcgcgaatcggatgcctccaccgtatgacggacatgccatgtgaggcaatccaaaccaaccattgtggttccagcttgcccgagctcggccatctgacctccctaagacctactgcggtaaggcttatggcggatgacaagcaccctgtgcacacgtatgcggcttcttgtcactgtgaataactataaccacacacacgaacatttgttcgaatttggcgtgcaacacgccgaaatcgccaatttcacgattcagcgactccgtaatcccgcagtgtcagacggcgggcatgggcggcgcgttatgatcgtggccccaacgcttggagtccggaacctccatttggtcacagagcacattccagaccacgcgtggctcctcccccgcgtccagcgcctcgaccacggtcatattcgccaatttggacatccgttgatcacgcgacaacgaacgaccgtaggtccgaccgaacacctcttcaagtaattcccagaattcccgttcacgcatacacgccagtgtgccaccacccgcaggacagcaaaaacccgcatcgccacaagcgatacgggttcacagctagacatagattacgggatgcggcttcacaccgccaaccgatcagccctcgactgtgtcgagataatcggccaccatgcgcagcatgcgcgaagtggagactccgagcgcatcggcgatggagctcagcagttcggagctggcttccttctgcccacgttcgacttcggaaagatagcccagcgaaacgcccgccttctcggagacctcacgcaacgtgcggcgatcgcgcgtacgcagttcgcgcagcacgtagccgatagcaccacgcagcgaaacctcgcgaggctcctcctcaaccaccacgggctcggcggcggcagtcggcttgtacgacggcgaatcctcatcccacatacgttcacgaacggcttgacgctgatccttggccttcttggcagcctgcgccttgagcacctgctgctgggcgaacatcaccgcacggcgctgggccggagtcagttcacgcatacgggcgacacccggctgcacagccatcggcttcttggcggccacatccatctgttcgttcactcgggtcatcgtttccatcgccatcgccccttccaaggtcggttcagtgtttccactatgtacaacacgacggtcccgcggttttattccttaaaacttgctgtgaatagactcaagttttgcagaacgtggaatacggtgaggcgacgaacctcttcgcgcatgccatcaagatggagttcgacggctttgagcacttcggcatggtccgcggtgaggcttgcggggatgcgcaggcccacatacaccagtccggccggcttatcaccgtccggaccggggccggccacgccggtggtggaaaggccgatgattcggtcgccgtattccggctggctgtataggcgagcggcaccgatggccatctgccgggcgacttcggggtgtacggcgccttctcgatccaatagggccttgtccacgtgtaggatcgaggccttggcattgatgtcgtaggtgacagcggagcccagcaacacgttggaggcaccgggaatacgcacgaacgcatcggcgagcaggccaccggtcagggattcagcgcaggagattttcgtattgttcgcctcgcagatcttgaggatgccggccgcgagactgtcgcacaattcctgcattggaatatccgtcacttccgcttcggggcgacgaacgtgttgtacaggtacacggcacccgagtagaggcacaggaccaatgccacgtagatgatggcgtaggtcaggaagtagtaagcggtcatccagaacggcgtggcctgtccgttacccaatgaccagaacggcagcagcagcatggacagacccacgcactggaatacggtcttgagcttgccgggccatgcggcggcgatgaccttgccgcccggacgctccatgacgaagaagcgcataacggtgatgccgatttcgcgaatcaggaacaggatggtcacccaccagccgagctcgccgaacgcggagcatacaatcattgcgccgcaagtgagcagcttgtccgcgatcggatccatgagcttgcccatttcggtgacctgattgtatttgcgggccatccaaccgtcgattttatcggtggacgcggcgatgatgaacagtaccgcggcgacccaacgcatgatcaggttgtcctcaccccaggaaccggcgagaatgtcgagtgtcaggaaaatcaccacgagtacgatgcgcgagtaggtgaccaggttcggcggcgcgttccatccgtcgaacagcgatgatttgggcgatgactgcttgtccattgtgttctcatccatagtgttcacgttacccccatactcctaccttgagtgagtggtggctggatattgactgctattattcgggaatcaggtttcgtgctgatgctgtccgcgcttctctccctccgccccttcgggcacctccctcatcagagggaggtcgatgggtgaattattcgccgagttcgggttgttgcggggcgctggcttcgagcgagctggtttcgcctcggatgaaggcgagcacctgcggcaggtcctgcggctgaacaagcacctcgcgggccttcgagccttcggacggcccgaccacgccgcgcgattcgagcaagtccatgagtcggccggccttggcgaagccgaccctgagcttgcgctgcagcatggaggtggaaccgaactggctagtgaccacgagttcggcggcctgcagcagcacgtccatgtcgtcgccgatctcctcgtcaggctccatactgtctttcttctcagcttccttggccatctgttcgatgtcttcgcggtacttcggcttgcgctgggtgcgtacgaactccacggccttgcgaatctcggattcggacacccacgagccctgcacacgaatcggcttggcggaacccatcggcaggaacagcgcatcgccctgaccaatcagggtctcggcaccgaccgtgtcgagaatgactcgcgaatcggtggcggacgaggtggcgaacgccagtcgggatggaatgttggccttgatcagaccggtgaccacgtccacggacggacgctgggtggcgagcaccagatgcacaccggcggctcgtgccagctgggtgatgcgctggatggagctttccacatcgttcttggccaccatcataaggtcggccatctcgtcgaccaccacgaggatgtacggatagggggccaccttgcgctgggagccggcgggcgcatgtaccttgccggcgcgcacggcctcgttgaagtccttgacgtggcggaatccgaagaattcgaggtcggagtagcgtgcatccatctccttgaccacccattcgagggcctgtgcggccttcttcggatcggtgatgatcggggtcagcaggtgcgggatgcctgcgtaggcggacagttccacgcgcttgggatccaccatgatcagacgcacctgttcgggcgtggcacgcatgatgatcgaagtgagcatcgagttgataaaactcgacttaccggaaccggtggcacctgccaccagcaggtgcggcatcttggtcaggtcagcggtcacgaagtggccttcgacgtccttgccgatgccggagagcatcgggttcgggtcgcccacggccttgtcggagcgcaatacgtcgcccaagtgcacgatttcgcgatcctcgttcgggatttcgatgccgatagcggacttgccgggaatcggtgaaaggatgcgcacatccgaactggccaccgcgtaggcgatgttgcgctgcaggttggtgactttctccaccttgacgccggggccaagctcgacctcatattgggtgaccgaagggccacgcaggaagccgacgactttggcgtccacgttgaactgttcgaaggtggaagtcagtgcccggatcacgcgatcgttggccggggtgcgcatcgcatggggctgacctttggtcagcaggttcaggtcgggcaactgatacggcctattggcgtcgtcgtctgtaccgttgccggcggcggcattcggctgtccgtccgtattgggcacgccctggccgactccgctgccatccgcatcggcgcctgcgtaggctccggtcgcggctgccgcggccgcggcaccggcggccccggccgctcccatcgccccggctgcccctgcgagcgcgacagtaccggcctgggcggcactgggtgcccacggatcgtctaccgctcccccaccgggcatggcgatggtctggccactggtgatgacgcgggttcgggaagcgtcgccatcatccgcatcggcagcaggcgcagggctggataggtgcggacgaccgtcgtacgaagacgatgcaatggttcgcgcaccggtaatctcgccggtcatcggatcgaccaccggggtttcggcggtggcaccatgctggctggcggcacggtcgaacggatcgtcggcagcatacttgtcaagggttttgtcgtcttcggtcttggatttgcggccgaacagtcgtgcgaacaggctgggccgtgcatcgccggcctgatcgttgtcgttgccgtcgtcgttgccgtcatgcgagggaacaccgtcggcaaaggcgagtgtggtatctcccacacggacctcgttggggaactggctggcgcttccgtcggcctcctggcccatcggcacatacggtttgcgttggattttagctgcgattttgcgcgcatcctccggcaaatcggtgacgtgggtgccggtaatcatcagcaaggagaacaggccgacgaccacgaaaatgatgatggcgaacacgttggaaaggccccaggcgagcggtgagccgaggaagaagccgaacaggccgccggcggattgcagaatcgtgatgtcgaatccggtgtggtcggcggcgatcgccacgtcgatgatcgaacaaatcgaccacatgagcagcacccaaccggtgaccacacgcgggttattggaccctttaccggaattgcgcatgagtcggaaggccacggcggcgagcaacaccggcagcacgacgctcatcagaccaagcacaccggccgcgatggcgtgaagcagctggccgaatggaccgctgacacggaaccattcggacgcgcagaacagtacggcgagcacgagcagcaggaaacacaaaccgtcacgacggtaggctgggtcgtattcgccgacgccggtgacggcgcgtacgccggagccgaacgcgcgcggaatcgcgagcaggatcttcttccacaacggctcaggttcgaggtcaagctcgggctggaccttggtttcgccatcatgggtagacccgttgtctttggatttacggggtttggtgctgttggaggatgctgttcgtgccatatcgggtctgattctactagtacgggggtgcatggttggtgacgacaccgtgacgatatggtcgattgacgaatcccgacagccgattcgccgcggttcgtcgaggttcgtccgagtcgattccccgctggagcgcgaatatgccttatcatgggttgcatgacacccgcagagcgtgcgagcgcagtcgcatttgcactcaagaactgcgcactggaagcgatgacgccgggcgaggcaacgatgcgcgccgcggttgcctacgaacgtggcttggagcccgtgacccatctcatcgacgtggcggacgagcagaccgccatgcgtctgcgcgccgccgccgaccctgccggaaaggatcgtctggctgccggcagtctggatgatcatgccacggatcgcgcggatgcggtgttcgcacgtaccgtattgttggcggaacgtcggtggaatccgtctggcgacttggacgagttgaccgccattcataaggggctgttcgaaggcgtgttcgaggatgcgggcaagttgcgtacctcaaacaccacacgcgaggtgacgaacgaccgggctcgggccgcgaatccggaggcgttcttcccggctgggctcattgagaccggcgcgcacaacatcgcgatggagttggcggacaagcgcaacctgcatgcgttggatcgcgacgtgttcgttcacgcgttcgctcctatttatgatgagctcggttatctgcatccgttccgtggcggcaatgcgatggtgctgcgtatattcggttcacgcttggcgcatgacgccggctgggatctcgactggggctcagtgacgcgcgaggagtatcgctccgccaagcactcggcatatcggggcgacacgtctgcactggagacgatgttcgacgcgatactacgcccggcgaatccgacgcgcgtgttcttgatcgccggctggaatcaggggcctgcacactgattgcgggtgattgcaccggcctttggctgattcctacgccgtgatatcgcccagatgatgctgggtgtattcgtcggctcgggcgtcgatcgggtcgtagtcgccggcgtcggcgtgcgcgataatggccatcgcgttgtcgaccagtttcgggttcagggcctgcagccagtggatgcgcgggtcacggccgaaccatcccatctgtttgcgggcgagtcgcttggttttctgtgcgatgtccgtgaaggcgtcgttcacatcccagataccgtccagcaggtcgatgatctgctgatagccgagcgcgcgtacggcggtggcacccagatgcgggcgcagccgttcgacttcttcgatgaacccatcgtcatacatctgcttggtgcgcaggtcgatgcgatggtccaaatccgggcggtccaggtcgagtccgatctgtacggacggaatcacgtaccggtagcgcggcaggctggccgaatacggtttgccggtaagctcgatgacttccagcgcacggatggtgcggcgtgggttgcgtgggtccatgcgcgcggcggcctcggggtctttggcccgcagctcgtcaaacaaagcaccggcaccctcggttttctcgcgttcctcaagacgtgtgcgcacgtcgggatcggtgccggggaaggtgatgtcatcgatggccgctctggcgtacaagccggagccgccgacgagaatcggccggatgccacgtgattgcaggtcggcgatggtctcgcgcgcaagctgctggaatcgggccacgctcatcgtgtcttcggggtcgatgatgtcgatgagatgatgcggcacggccgcctgttcttcggcggtgggtttggcggtgccgatatccatgccacggtacatctggtaggcgtccgcgttcacgatttcggcccgctcccccgcttcggccagacgccgggcgatggcgatgcccaaccccgtcttgcctgacgcggtgggaccgacgatggagacgactcgttgcgtcatatacgccccctcagtgccgcacggaataggtctgtccagcggccacatcggggtcggcaagcagattatggcggccggcgtgtgtgacggtgaccgtgacgaaatcgccgatttcaggtaccggttcgccttcaggcacgccgatgtgcaccagcacgccggttttctcgcggccggtgacacggtgggtgtcggtgtccttcttgccgagtttgccggtgatcatcacttcgacgtcgcggccctcgaatgtggcgaggttctcttcggtgatctgctcctgcaacgccaccagtcggtcgaaccggtcctgcaccacgtcgcgcggaatctgttccattgcggcggccggcgtgccggggcgtggcgagtagatgaacgtgaacgccgaggagaagcgcgcctggcgcaccacgtccatggtctgctggaagtcctcctcggtttcaccggggaatccgacgatgatatcggtggaaatttgggcgtcgggcatggcctcgcggatacgaccgaggatatcgaggaacttggcggacctgtaggagcggcgcatcgcgcgcaggatgcggtcggaaccggactgcagcgggaagtgcagttgatgcatgatattcggcgtttcggccatggctgcaatcacatcatcggtgaaggcggccgggtgcggcgaagtgaagcgcacacgttcgagaccgtcgatggttccgcaggcgcgcaacagcttgctgaaagcgtatcgatcgccaataccataaccaaacgagttcacgttctggccgaggagcgtgacctccttggcaccatcggccacacattggcggatctcatcaagaatgtcaccggggcggcggtccttttccttgcctcgcgtggtgggcacaatacagaacgtgcaggtgttattgcagcccacggaaatcgccacccacgagctgatgcgggaggcgcgggcggcgggaagctggctcgggaactgccgcaattgttcagtgacctggacctgcgccttgccggtcgcacgattctgatccaatagcttgggcagatcttcgatgttcttggtaccgaacaccgcggaaacccatggcgcagtatccgcgatcttcttgcggtcaagctgggccatgcagccgccaacggcgatctgcaggttcggccgaaccagtttgacgcgattgaatcggccgatggtgccatacatgcgttcggctgcgttctcgcgtaccgcacaggtattgagcaccagcaaatcgaggtcattgtcattgatctggtcctcggttgcagggacgtagccattggcctccagcacgccggcgatgcgctcggaatcgtgcacgttcatctggcagccgagcgtgtggatatggaatacgcccttgccgcgctcccccaacaagctatcggttccatcggctgcaatcgaggcacgctccgcctcggtcatcatgtcttcattcataacgaccgattctatcggcggggttcgtcatgctccggtcacgtatgccattggttgtcacgatcttaaatatgggttcttggaaagattccccgcgaacatccagattgtctggaatccgccgagtatattggtggacgtgatacttgaccgacatagccgactcaaaacctccgatctacaggcccgtctcaaagcgttggatcttccgggaggcacctttactcccgaacaggtcgttaaattcgttgacctcatgcaggtgtatgaaggcgcgatgtacgagatcagcaccaagctggagattctcgacgacgagttccaggtgcggttcagccatgacccgatacatcatatggaacgccgtctgaagtcggtgagttcgatcattggcaagctggagcgcaagaatctgccaatcagtgtcaattcgattaaggacaatctgttcgatgtggccggcatccgcgtgatctgtaattaccgcgacgacgtgtattccgtgtccaactatctgtcgtcgcagtccgatattcaggtgctgcgcgtcaaggactacatcaagaacccgaaacagaacgggtatcgttcattgcacgtaatctacgcggtgcccgtgtttctctcctcgggcgcgcattacacgccggtggaggtgcagttccgtaccatcgccatggattattgggcgtcgctggagcatgcgctgcgctacaagaccgatttgccggacaacaagctcagcgagcattcacagacactgctcgactgcgcccgttcgctgcagaacatcgaagtgcaaatgcagaacatccaccgcgacatcaacggcgcgccgcaagtgggtgaagcgcctaagacctcggactgaggtgctatggaatcggcctgcgtccgattcattcaccgttgcagccacttcggcagcctggccggcgcttgggccagcagggtgccgaggaagatgagggcgcagccgaggtagccgcgcggggtcatcacttcaccgagaagcaacgcaccacctaccgccgagaagaacgattcgaggctcatcagcaggctggctcgcgtcggtggcacccattgctggccgaccacctgcaaggtgtacgcgatgcccaccgagccgatgccggcgtacaggatcggaatccaggaatgagcagcgccggcccagtcgaccgagccttcgatcagcgaacccgcccagctcagcacggcggtggtgcagaactggccgaatgaaagcttgatggcgtccacggtgccgcccaaagtatcgatcaccagaatatgcacggcgaacagcacggccgtgaacacgagcaggatatccgccaggccgatcgaaccgaaaccatcggtgatgcacagcagatagaagccggcgatggacagcaccacggccacgaacaccagcatgccgatgcgccggcgcaggaacacgcaggccagcaacggcaccatcacgatgtacatggcggtcaggaatcccgcgcggccggccgatttgccgtacagaatgccatactgctgcagggtgctggcggtgaacagcacgatgccgcagatcacggaaatgaccaccgggttggcgagcaatcgcgccacggccgaatcgggcttgttcgcattcagcttggcaccggtgatggtaacgacgtcggatgcgccgttcgatgcggcatctgtggagacggccctgggggcctcggtcccaacgacatcgaccccggctgtatcgcccttatccgcgctcccccggccacgctgccacagcagaatcggcaccaaagacagtgctcccagcgtgaagcgcgtggcgttgaagaacatcggcgacatcaaatccatgccctggacctgcgccacgaacgcaaaaccccagatcagcgcggtcaacaacaggctcagcatgcctacgagttcttgtcttttcacggggagacagcctaacgtgcgaatgtgacagacatgaaaaagcccggccacaatgtggtcgggctgtgacgtttgacgagcaggctacatgccgcccaccaatcggctggcgaggctagtccctgttgccgagcagctgcaggatgtacaggaacatgttcacgaagtcgaggtacaggttcagggcacacaggatggagatcttcttgaccatttccgggccctgggcctcgtattcggtcagcagcgcgcgcgtggactgcgcgtcgtagatggccatgccggcgaacaggatcaggccgatggcgcagacgatcttggtcatgccgtcgacctgcacgaaggcgagcacgatctgcgagatgatgagcacgatcaggccgatcatcaggatcgggccggccttgagcatgtcgaacttggtagtcatgccgaacatggtcagcgcgaagaagaacgctgcggtgacaccgagcgccacgccgatcgagccgaggtcgtagaccatgaagatcgagctcaaggtgaagcccatcaatgcggcgtacacatagaacatgacgcgcgcagtggccgacttcatcttggtgacgcgcatgccgagcaccacggccagggcaatctgcaccacgcacaggccgatgaggcccaccatgccggtggccatgaggaagctgtagtaggctccggtgatctggccgagcacggcgaccacggcggtgacgaggatgccgatggtcatctcgccgtacaccttggctacggagacgcggcgggcctcctcatagttgtaggtcatcgtcgtgttgatggtggcggcacccgcgccggcaccggccgcatcctgcggcgcgtactggtaggtgggggcgccctgcgactgggcatagtagttctggccgtaaccggactgtgcgtattgctggccatatccagactgttgggcggcgttgtaatcaggcgtgttgtattgcgggttgtattgcccgttgttctggggctgctgaccgaatgtcataatcgctcctttagcgtttgttccagtaccaatcttagaggaacaaagctgaacattccatgaataggatcgatcggctcgttctgctcatcgcaaagcgtaacgggcgtttccaccatgcgcagtgacatacaccgtaatcggcgaatcgtcttgcagtacatagcccaacgccgaaatcgcctcccgtatgtttatctcggagcgtacggccaaggcgcatctctcctccgcggcggacaagctcaatatgggccgcgtacagatggcgaggctggtggagcgggccgatttgccggcgcgactgtaacacgtccggttatcgagccatatcagtcataatggagaacatgagtgaagcgattattcgaacgttacgtaaagacgattatccggcgctgatcgacctggtgcgccgcacttggtacgccgaatatgatgagcggaccggcttgctggcagccgaggccgattgggagaactgtctggcacgtgtgaccacggcctttgtcgcggagctggaagataaacccgtcgcattgattgtggggcgtatcgacgagctcgaccatcgcagcccgctgaacatgcaccggcgtcattcgttgcgcaagctattgcaactggcgtttgcccacgacggcatggcagctgcgagcgagattctcgggactcttcatgtcgataggcaactgcgtaagcaggcggcgaacattggccatgagtattcggctgaagtggtgctgttcgtacttgatccggcggcgcgcggtcacggtctgggccggcgcatgttcgagacgatgatgagcgcattccacgcagccggcatacgtcagtacttcctattcacggataccacgtgcgatgtcggattctatgtacatcgcggcctgacgcaggtgtgcgagcagtcactgcccgcatccgggccgggagaaaacccgtcttcgttctacttgtacgaggggtcggtgcccgagccggcgtgatgtgcccgccgtcgggcgaacactggtaggcttgagcacagtcggcacgtcggcataccgtccaaaggccggcgacgaagggattgacatggcaatcagcgcgaaggaactaccactcgggaaagtgttcaccccggatttccggttcacaatcccctcattccagcgggcctacatatggaaggccgagaacatcctgcaactggtaagcgacttggacgacgcctgcaagtcacccggtaccccgtacttcctcggctcgctgattctggtacgcgagggcgacaaccgttatgacgtgatcgacgggcagcagcggctggtatccctgtcgatcatcatcgccgtgctgcgcgatctggagcgagacccggacctcatgcgccaactcgacgcgctgctggtggagcccggcgacaagctgcgcggcatcgtcaccgagcctcgcctcacgttgcgcgagcgcgacgcggcgttcttccgcgaacacgtgcaggaggacaacctcgaatccgtgttcgacatgaacgacgacgatctggcgaccgctgcgcaacgcaacatcgtcgccaacatccgcaagacgtacgacgagatctccaattggtcggcatccgaacgccagcaattcgcgcagtatctggtcaacgaggtgacgctcgtcatcgtgaccaccgacgatctcgacggcgcgcatcgcatcttcgacgtgatgaacatgcgcggcctgccgctcaccccgtccgacgtgttcaaggcgcgcgccacggccagcctgtcgaccgccgaacttgacgtgtacgcagcccgttgggatgacatcattgacccgcttggcgacgatccgcatgactgtgaggaattcttcgcctatctgcatctcgtactcacgcacaagccggccaccgacaagctcatcgaggatttcctggccgacgtgctgcaaccgtacatcgacaaaggcacggtgcccacgttcatcaaccaggtgctggcaccctacgcgatggcgtggcggatcatcgcgcgccccagcgataccgtactgcccgccgaggtgcgtagccggcttgagggattggacgattaccgcagccacgagtggaagcccgtggccatgtgggcgttggtcaattcgtatcgcgggctgggcgacgccgatttgtcgccgttcgtggttcgtgcctcacgtatcgccagaaccacggccacgttggaatcgttgggcgcccatgacgagcgtcggctgctggaaattctgaccgcattggaacaggtgaccggcatccgcacgctgaatcgcactggagcgttggagcggcgcggttatgcgaacgccgccatccgtgatcttgacaagggctatttggtccagcgcgtgaacgggttgcatgtctcggacggcgaccgtgaaggcgcattggtccgtttgcatggcgagatgcagggtgacggcgatttggtccgtctgctgctgattcgcgccaacgagcagaaggccggcatgcagttggatcgaccacgccggttcagtgcgctgccgattatgccgttggatatcgaacggtcgaaatcgtttgcggactggccgcaggatcagcatgatttctggatgtaccgactcggcaatatggcgctggtgcagggccctgaggatcagttggacaggttgagtgaatatccggcacgtcgcgaccgcatgctgttgcgcgcggattcacgtcgtttcccgctgaccaatcagttgaaggatttcgctgactgcacacctgccctgctggaggcgcggcaggaagagtcggtccgactcatcgtggaatactggggcatccggtatgacaaggacgcccgtgatctgaccaagcagaatgtcgatgagttgtcgaagacctctccacggccgtctcatagttcgcggcgcgtcacgatccggcaggtgattgacgctggtctgctggtgccgggcgagcgtctggtgtgggagcggccgcgcaagggcgagcgctggttcgccacggtcaccgaaaacggtcgtctccgtctggatgacggctccgaatatccgactccgaccgccgcggcccgtgccgccgccggaggacgtcgcggcggcggtctggacgtgtggaagcgcacgcgcaacggtcagaagctcagcgacatctggaagcagttccgtctacaggcgcagtaggctacagtagccggcacatcattggtggctcccctccgtgaggggagccacacgctcatttattccagcgccgccacgatttcagccggtgttttgcaatattcgggaaaatgactgattaattcggcatccgatgtgaccacacagttggcaccggattgttgcgcggcaacgatgatcagatcatcttcaaaatcccgatgccgtttttgcagggaaaaagccctatcacatgtcgactcatcgacagcgacgatgtcacacacctccttcacctgctcgatacaacgccatggcacccgtgacgacagaaagccgcgagtgaaattctccacttccgattcattcggtttgaattccctacgaatcgccgatgatgataggtatgcgatatccttcagcgacaatgacgcgcacaacaacgtaacgttgttcttcgcgccaagttccataaccgcttccgccatcttggcgtgatcatcgcgatggagcaaatagtccaacagtacgttggtatcaagcaaaatacgctgcatggaaacgtcggtcatcaatcggccctcttcatgttgtaatacgcatcaagttgctcgtcgtacattttgtcgcggaactgcttgtaggtaaggccttccatgaggtcggtgtcttctgagatcagtccggccttgaccagttccttgtgtacgtatccggcaccttctcgaatcagtttcagcttgcgctgcttttcctcctcgcgggcttgctcttcggcggtcgtttccaatgccggcacttccttgcggtcggcgatgtataaccacagcgaccggattacgtcactcaccgatacgcctttgcccttgaggacttcttcgacctcgttcttcagtttcgcatcaatgcgaacgttcatttggaccatggtcatggcaacctccatttcgaagatgctatacagtatagcattttggcatgcatggaaaaggccggtatccgttggcggataccggccttgctcccctcagtcagcttcgctgacagctcccctcaagagaggggagccaagaaggtggttacttcatgaggttgcgcagcacgtactggaggatgccgccattacggtagtagtcggcctcaccgggcgtgtcgatgcggaccaccgcgtcgaactcggtcttggagccgtcctcgtgggtggcggtgacgtggaccgtcttgggggtcacgccctcgttgagcttctcgacgccggcgatatcgtaggtctcggtgccgttgaggcccagggactcataggattcgcctgccgggaactgcagcggcagcacgcccatgccgatcaggttggagcggtggatgcgctcgaagctttcggtgatcacggccttgacgccgagcatcaccgtgcccttggcggcccagtcgcgcgaggagccggtgccgtattccttgccggcgagcaccacgagcggcaccttgttgtcgatgtagtcgcgggaggcttcgaagatcgtggtcggcttcttggcgaggaagtcgtaggtgaagccgccaggcgtcacctcctcgcccacggaggcgagcagctggttgcgcagacggatgttgccgaacgtgccgcgcaccatgatctcgtggttgcctcggcgagaaccgtaagagttgaagttcttcggctccacgccgcgctcggtcaggtacttgccggccgggctggaggccttgaacgcgcctgccggggagatgtggtcggtggtgaccgagtcgcccaggagggccagcacacgggcgccgtggatatcggcgaccgggtccggcgtggccttcatgccgtcgaagaaggtctgcttgcgcacataggtggacttgtcgttccacgcgaacagctcgccttccggcacgtcgaggcccttccagcggtggtcgccgtcgaacacggaggcgtagtccttgaggaacatctcgcggctcacgctgccgtcgaccacggcggcgacctcggagttggtgggccagatgtccttcaagtacacgtcgttgccgtccgcgtcggtgccgagcggctgggtctcgaagtcgaagtccatcgtgccggcgagcgcgtaggcgatgaccagcggcggggaggccaggtagttcatcttgacgtccgggctgatgcggccttcgaagttgcggttgccggaaagcacggcggtgacggtcaggtcgttggcgttgatcgcctcggaaatctcgggcagcagcgggccggagttgccgatgcaggtggcgcagccgaagccgacgagctggtagccgagtgcatcgaggtcgtcctgcagccccgcggccttgaggtagtcggccacgacctgcgagccgggagccagcgaggtcttgacccagggcttgggcttaaggcccctggcatgtgcgttgcgggcgatcaggccggcggcgatcatcacggacgggttggaggtgttggtgcatgaggtgatcgaggcgatggccacgtcgccgttttcgatgtcgaaatcgccacggaagtcggtggacacggccaccggatccttgacggtcttctcggtctcgtaggagggggcggtcttctcgaacatgctcttggcttcggacagcagaatgcggtcctgcgggcgcttcgggccagcgatggacggcaccacggtaccgaggtcgagttcctcgtattcggagtactgcggttccacgtaatccgggtcggaagcgtcgccccacagcttgttggccttggcgtaggcttcgaccaacgcgacctgctcttcggagcggccggtcaggcgcaggtagtcgagcgtgacattgtcaatcgggaagatgccgcaggtggagccgaactcggggcccatgttgccgatggtggcgcggttggccagcggcacggaggcgatgccttcgccgtagaattccacgaacttaccgaccacgccgtgcttgcggagcatgtcggtgatggtcaggaccacatcggtggcggtaacgccctccgggatggagccggtgagcttgaagccgaccacgcgcggcacgagcatggagatcggctggccgagcatggcggcctcggcttcaatgccgccgacgccccagccgagcacgcccagaccgttttcggtggtggtgtgcgagtcggtgcccacgcaggagtcgaggtaggcgagcgcgttgccgttggcctcggccttgctcatgaccaccttggccaagtattcgatgttgacctggtggataatgccggttcccggcggcaccacgcggaagttcttgaatgcctgctgaccccagcgcaggaactggtagcgttcaccgttgcgctggtattcgatgtccatgttttgctggaccgcgtcggcgatgccgtacttgtcgatctgcacggaatggtcgatgaccatatcggactggacctgcgggttgatgacctccgggtcgccgccgaggtccttgaccgcgtcacgcatggtggcgaggtccacgatgcagggcacgccggtgaagtcctgcatgatcacgcgggacggcgtgaactggatttcgtggctgggttcggcgttcggatcccagtcgagcagggtcttgacgtgctcgtcggtgatgttggcaccgtcgatgttgcgcaccagattctcgaccagtaccttcagcgagtacggcagatgatcgatgccgtcgagattggcgatgttgtagtaatcgaagtccttgccggctgccttgagggtagccagctggtcgtcgcgtaaggacatgcttcctccgaaatcatgaatcggcttatgatgccgctgattatccgctacacatggtacgggcacgttaccgaggctctggcgtgtcggcttgaagtatgagacaatcgcgccgccgtctcaatgccgacgcgagagcttgcccgtcagtccgcgcacgaacggcgccagccacaggcacagcgcgaagatcagcgcggaaccggccaacgcgatcagcgtggccaccatcgtggcgccggtcggcagaatcagggcgaagaagttcgccacgaacgggacgaacgcgccgatcacgcccgccgccgcgaacaccgccaccagcacgccacgccaaccgttgagtggtctggccacgcgggccagcacgaacacgcccatcgcgaacaggatgatggcgctggtggcgcgcagggcggacaggtccgcggcatcgccggtcacgttccagcccatgaccggcggcagcacccaagcggccagcagcaccgacagcgcagtggcgatgccgcccggcagcgcgaacgtgaccacgcgcttgaggaatcccggaatatagcggcgcgtgttcggcgcgagcgccaggatgaacgcgggcatgccgatggtgagagcgccgatataggtgatatggcgcggcaggtatgggtatgggatttgcgtcagcactacgccgagcgagatcagcgcggagtacacggttttgacgaggaacaggctggccacgcgctccatattggccatgacctgacggccccgcgccacgacgtccggcaggtgcgagaacttggaatccaccagcaccacctgggccacggctttggtggcgggtgccgcgttgcccatggcgatgccgaggtccgcctccttgatggcgagcgcgtcgttgacgccgtcgccggtcatggccaccacgtggttctgcgtgtgcaacgcctgcacgatggccttcttctggtcaggcagcacgcggccgagcacatcgacgttttcgagcacgcgggccagttcgttcacgtcctcgggcagttcgcgcgcgtccatcgccaccggctcatggtcgcctgtcagtttcactctgcgggcgatggcacccacggtcactggattgtcaccggaaatcacacgacagcgcacaccctgctcacggaaccaagcgagcgtccgctcggcgtcctcgcgaatcttctcagagcacaacaccaacgccaccggctcagcctgcacatccagttgcgggccgtccgagacattggctccctcaactgcgtccctcagtccgcttcgcggactgaggggagctgtagaccgcgcaacaagcaacacacggttgccgtcattggcatactcgttaacctgctgcaacaccgacgaatagtcaccctcaagcgcagaaataatcacctccggcgctcccatgtaccaggtctcgccggatttacgcaccgcactccatttgcgcgccgaagagaacgggacacgagactcaaccgcacctgccccatatccttgggccttgagcccggcgagtacggcttggccggtgccgttgggctgctcttcgttgcagcagtcgtagagggcctgcgtggctgcctgttccgcagccgcattggcggaatcgagcatcacgagccggttgaaggcgataccgccatcggtgatcgtgccggttttatcgaggttcagcgcgtccacgcgagccagtgtctccacggattcaagctcctgcaccagcgtattgtgacgggcgagacgcatggcggccaccgcgaagttcagcgaagtcagcagcaccaagccttcgggaatcatgcctactacgccggcgaccgcggaaaccacggcttgccgccattcgccggtggagagtgccgtgccccaaccgccgaccgtatgaatctgcgaaagaatcagcagaatacacagcggtaccacgaggaaggtcatgaatttcagaatcgtgttgatgcccttgttcaggtcggacacggttttcttgtataccttggcctgcgcggtgagcgtggcggcgtaggaatggctgccgaccgcattgaccttgaccaatgccatgccggagaccgcggtggcaccggaatacacctgctcccccaccttgtggcgcacggtacgagattcgccggtgagcatggattcgtcgagttccagtccccaggtctggatgatctgcccgtcggccggcacctgttcgccggcacggatccacagcaggtcgtcgagcacgatctcgttgtggggcacctccacgtccctgccgtcacgatgcacgaggaattcggaggccacaaggatggaaagcttatccaacgtgcgcttggccctgagttcggtgacgatgccgatgcccgtgttgatgatgatgacgaaaccgaacaccgcgtccctccaggaaccggtgatcagcaccagtaccatcgcggcgaagatgatgccgttgaacagcgtgaacacgttggctcgcacgatatcttgaaccgaacgcgaggtggatgttttcaccgcattcgattggccactttcgatacgctgcaccacttctttgggggtaagaccggttgctccgatttcaggcatttccacggctgttgttgcactcatattccccagcctaccgcgtcttgtttcgcaatccgctaaggctcagggatgattcagggtgctttctcagcttcaagggcctgattcggctcaggaaacggtgactttgatctcgcgttcgtggggttcgtcgcgcgtgatggtgagcacggcgtcagtaatagtcattggcttggtatcggcagtgtcgccagaatcggcactgttggtgttgaggtgaaggatgacggcgtacagcagttcatcttcgggcgcatgctttggatcaatgagagcgactggaataccggcttcacgcgcattggtcaacgtctggttccagctctcccggttggcgtcggtaacgtcgatgccgctgataaccacgattttgaccgcgcgagctacgaaatcggcaacaccctgctgtgcggtggccgcattcttgtcgacgccagtatgagcatccatactatcggcaccgttttcgctggtagtgccggcgtcagaagattcggtttcaccggatacaccatcagttgcgtttgccgagcttgcggatgtttcgagcgaggcatagtagacattgagtttgtcatcagacagcgcattgatggcggacttgtctgcggcggtgtcagtcgaccccacaaagccgactgtgacatccgtgggatgtgtggaatcgtgggcgacttccggcatgctgtcttgggtatcgccgaccgccctaccggccggcgtgcaggcggccagggacaacacagccgccatgcaggccagcaatccgagaattcgtcgtgtcatatgctcacctgtcagcgggtaaacagggccaccgtctcaacatggtgggtcatcgggtagatatcgaaggcacggatgtctttgagctcgtagccttcgccgatgagtgtcgcggtgtcgcgtgcgaggctggtgggatcacaggcgatgtagaccacgctgggtgcgccggccgcggcaatctggcggcagaccttggcacgagcaccggcacgcggcggatcaagcactacgacattcggcttggccagatgcgccggcacatggtccagcgtgcgcgagacgtcacccgcgcgggcgtccacgtcgttcaggttcatggcgcgcagattgcgctgggcgttcttgacggccacacgcgcgccttcaacgctgagcatgcgggtgcgttcaccggtcattgtggccagcggcagggtgaacaggccggaaccggaatacaaatcccagattacggcgtccgccgctgactgcagctgcccgttgaccaggttgatcacgtgcgtaccgagggcgatcggcgcttggcgatgcacttgccagaaaccgttggcgtcaacctgatagtcgaaggtcgtgccgttgatggtcacctgttcggtgagtagctgggagccggcgcgcagttcgccgtccacaagtacggcgtaattgtcgtctgctgccgcggtatcgacgatctcgccgcgcggttcgggcacggaaagacgaatctgggagccgggttcaaagccgccttcccacacgtgttcgcgcttggcgacgtccagcagcgtgcgcgtggcaagcggcatggtgtcgatggccacgcggttgtgtgtgccgcgccggcgcatggatggcatgccgttgtcgtcggcaatcatttcgatgcgggtacgccaattgaggccgccggctgccttgtcgccgggcatgcgctcgatgggaacggccacgtcgatatggccgagtcggctcatctgttcggagacggtgatggccttccacttgagctggccgggcaaagagacgtgcacgagatccgcgccgcccactcccccgcccatcgccaagggaccggcaagtggccatgccggggtgactcggtcttcggacggctcgagaacctcgacgacttcgccggtccagaaccggtcgtcccggtcgtggggctcgtcaagttcgactcgcacgagttcgtcgggcaaggcgaagcggacgaacaccacacgaccgtcgatatgggccacgcagcggccttggtcggcgtatcgttcgatacgaacttcagcttgcatcatcgtcctttccggttgcgctcggttcaagttcggcatcaacagcgacttcagtctgtatcttcctagccgcgaccttatgccggtgcatcggcgtggcaataatgaggtaactcacccaaatcgccaatgcccagaacggaatgcccatgagcaggcgggtcacgccgagtgcagctacatggttggtcagatacagcggcacctgcaccaccagccgcagcaggaacagaccgacccacaggccggtgacaatcatataggcgcgtttcagggccttgtcgtccatccagtcatggaaccatgccttgaaatgctcggtgggcaggctacggatgaattcgacgaccaaacccagtccgggcacgcgcgcaatcagcgacacggcaagcaacgcggcatagccggcattggtaatgaatccgaagatgtagtaattgcgggcctcatgagtctgccatgcccaaatcaggcagatgcctaccgccaccagaccagagaccgcgcccattaccgactggcgctgaatcagtcgcacaataacctgcaataccgccaacacggccgaaaccgcaatggtgagattcagattgctcgtggccacgaacagtacgacgaacaccacgccaggcagcatggattcgatgacgccacgcgggccaccgatggcgtcgatgacggagaaatcctcgccttcattgccggcgtcggctagagcggacaggccggtgcgtttgttgtctgccaagtctcttcctataaatcagcgaacttcggagaacatcgggccgcgagacagcgtggtcttcacttcggtctgctggtcctggctcagcggacccttcggcttgttgtccggaatgtccttgaagtgttccttgccgttctcctcgccggcttcggccgcggccttggcggccttacgctcagcgggggcgaccggcggatgcatcgggatcagatcgcgcggcgccaaaggctcctcgccacgctcgacgacgatgtcggcgaagaacttgttcagcgcctcggtctccgggctgtccggatcgatagcagccttgccggagaagatgccacgcagcatccagcgcgggccgtccacaccaacgatgcgcgtgttcacggttttgccgcccttgacattgaccggcagcttcagttcggtgccgaacacaccgtccacttcagaagcggccttgttggcttcaagcaggtcaccgcgaacgtcatcccacagtcccagggtcttgggtgcggcaaaggcttcgatctccaggctggaggagccgaaggtgatggtggagccaagcacttgctgggtggcgcggttggccttgatgcgcagctggatgccctggaggaagggcaggtagtaggcgccgagatccagataatcgtcataatcgggcacgtcctcatcgttgacatcccacgggcctcgctcttcgccgcggccctggtattcgctggccggctcggcgagcacggtctccgcgctctcggcctttgcggcagcgttcgcttctgcggcggccaccttgtcctcatcgacaggctcaacggccggctcggcttccttcttgctcttcttcttgccgaatccgaacagtcccataattcctcgtttcatgtaacggttgcaaccttgctaacactagcactcaggcttagagaaagctgagcatcgcggccgccgatgtccggttcgattcgtagggaggccaaaatagtatggccgcatgaccatcaccattaccacgtctaacgtcaacggcattcgtgcggccaagcgcaagggcatcgaggattgggccggcaagcatgcgccggatgtctggtgcatacaggaggttcgcgcgcctcaggacgatgtcgattctattttcgatgaatttggttttgaatacgccaccgccggcaaaatcgaggcaccggccaacctccataccatgaacgaggtctgccgggtgaaaggccgcgcgggagtcgggctgctcaccgacttggaagtgcttgacaagcgatatggtctgccaggtctgagcgaggatgtggattcggggcgttggatcgaaaccgatgtcaaaacgcctgagggctatacgatcaccgtggcatccgtgtacatacatgccggcaacaccgatgatccgaccaaaatggaacagaagtaccgttttctggacacgatgctgaagcgcatgggcgcgttgcgggacgaggctgcgcatggcggcaaacaggccgtgctctgcggcgatttcaacatcgcgcacacgccgcttgatatcaagaacgccaaggccaatgagaagcacgccggatttctgcccgaagaacgtgcctacgtggacaaatggctggacgaatacgagttcgtggatgtgatgcgttcgttggccggtgatattcaggggccgtacacatggtggagccaacgagggcgcgccttcgacaacaatgtcggctggagaatcgactaccagttcgccacgcccgagctggcggagaccgcacgcggattcgtcatcgacaaggctcccacgtatgacaaacgctggtccgatcacgccccactcacgatcacatacgaggtatgacatattccgtgggacaacatccgaaaatcgacgattttcgcgggtcgtcccacgccccacagcatgagtaattatcaaccacactaagaatggcgtaattccgggcttcgtgagaaatctgctgtgggacaacactcatgtccatcgattgatgttgatgttgtcccacaaattgtgggacaacatcgggaaaacaccgatttttgcctttcgtcccacgcgaaccataatgcaaacctgcacatacgaatattgggttctttccacggatggaaagaacccaatacaatgcgctcaaacgcagattatcagtccagaccgagttggagcttgccgccggggatggcgtcgagcaggtctcgggtgtactgcttctgcgggtggtcgaagacctcgtcggtggtggcgtgctccacgagcttgccgtgctgcatcaccacgacctcgtcggcgatctggcgaaccacggccagatcgtgggtgatgaacagatagctcaggcccttctcggcctgcaggtcgttgagcagacgcagcacctgatcctgcaccagcacgtccaaggcggagacggcctcatcgcacacgatgacgtccggatccagagccatggctcgtgcgatggcgatgcgctgacgctggccgccggaaagctcgttcgggtaacgacccatcacggaagccggcatctcgaccatgtccagcagttccttgacacgattggcacgcgacttcttatcgccaatcttgtggatgcgcagcggctcctcgatggaacggaagatggagtacatcgggtcgagcgaaccgtacgggttctggaacaccggctgcacatggcggcggaaaccgagcagatccttggccttgaacgtggaggtgtcgcgtccttcgtagaacactttgccggaagtgggcttcagcaggtgaagcaccatgttcgccacggtggacttgccggaaccggattcgcccacgatggccagggtggtgccgcgcttgacggagaaggacacgtcatcgacggccttgaacatctccttcttgcgaggcagcttgaattccttggtcaggtggtcgacggtgatgatgtgctcgcttttctcaagcgtgctttcgccggcgatgtggtggtcaagcagggcgtccgcgttctcaccgcgctccttggcggagatgatgcgctgggaggccagcgacggggcggcggccacgagtcgcttggtgtacgggtgctgcgggtgctgcagcacctcgagggacggaccggattcgacgacctgacccttgtacatcacgacaatgtgctgggcgcgctcggcggcaagacccagatcgtgggtgatgaacagcacggcggtgcccagtgagtcggtaagcatgtgcagatggtcgaggatcttcttctgcacggtcacgtcgagggcggaggtcggctcgtcggcgatcagcaggtcagggcggcaggccagaccgatggcgatgagcgcacgctggcgcataccaccggagaactcgtgcgggaactgacgggcacgggtagcggcgtcgggcagaccggcctcggacagcagacccgcgatgcggtcatccattgtggagccgatgacgtacttcttggcgaggtaccaggcctgatcgtcggccacgccggccttgatgaggtcgtcggccacgcgccaacgggtttcggagcccggaacccattcgttggtgaagcgggcgacggccttgtcgaaggcctcgccggacacgccggcttcggtcaaagccttcttggcctcggtcatgagctcgggcagttccttggcgccgaggaaggtctcgtcgtcgttacccttgacttcgacctcgtcgccggccagggccttggcgagggcggagcgcttctcgtgggccacgtccatgttgttggccttcagtgcttccttgacctgggtgccgatgcgccacaccgggttgaggttgctcatcgggtcctgaggcacgagacccatcttggtgccgcgcagcttgtcgaactcgctctgcttggcgccggcgatttcctcgccgtcgagcttgatggagccgttgaccacgtgaccggtgccgggcagcaggcccagcacagccatggcggaggtggacttgccggagccggattcgcccacgatggccacccactggccggggtagacggtgaagttggcatcgcgcaccgcatgcaccggcttgccggtgtcagtggtgaagtcgatggccagatccttgacctcgagcagcggaccatgctctttctgcatagccagcatcttggcgttggtattgtcagtcataatgattctccactcccctcgctcaggccgtacggctcttcggatcgagggcgtccttgacggcgtcgcccatcatgatgaacgcgagcacggtgatggccagtgcggcggacgggtagaacagcaccatcggatcggtctgcaggttggtctgcgcgctggagatgtcgccgccccagctcaccgtggtggtgggcaggccgacgccgaggaagctcagcgtggcttcggccacgatgtaggaggccagcgaggtggtggcgatgacgatgatcggggccagggagttcggcaggatgtgacggaacaggtttctggcaggcgtggagccgagggccgtggaagcggtgttgaattcgaggttcttcgattccagcacggcgcttcgggcgatacggcatacgccgacccagccgaagagcgtcagcaccagcacgatcttccagatggacttggaggtcttgaacatctggagcaccacgatggcgccaagcagcataggcagcgcgaagaagatgtcggtgatacggctcagcaccgcgtcgacccaaccgccgaagaagccggcgacggcaccgatcagggtaccgacgatcacgaccagtagcgtggagagcacgccgacggacagtgaggtacgggtgccgtagaccacgcgggtgtacacgtcacagccctgcaggtcgtagccgaaggggtgtccggtggaggcggggctcaaggagttgcccagatcgcaggcgttcggatcctgcttggtgaacagaccgggggcgatggccaccacgatgatgaacaggatcagcaagccggagatgatgaacagcgggttgcggcgcagggttcgccatgcgtcggcccacatgctggtggccggtgcggattcgtcgacggaatcgacgtcctgcaacggggtctcgtcgagaggagctacgtaacggtcctgaccgggcagggtttccatgaagtattcggttcctggctcgccggtctggttgagctcgttttcagtggtttcgtttgccatgtgactcactcctccctatcacgcgtaacggatacgcggatcgagggccgcgtacagcatgtcgacgacgaggttgcacactacgaaaatcagcatgagcaacgtgacgatggacaccaccaggtttgcctcgcccttcagaatggactggtaggtgaggaagccgatgccgtggatgttgaagatctgctcggtgatcatggcaccacccatcagggcgccgatgtcctggccgaggtaagtgacgactggaatcagggagttgcgcagtacgtggcgcagcatgacctggccgttcgacatacctttggcacgtgcggtgcgcacgtaatcctcggcgatgttggaggagatttcggagcgggtcagtcggatgatataggccatcgacaccgaaccgagcaccatggccggcatgagcagatcaaggaagccggggtcggcgcctgccgtcaccggcaatatcgcccactgaataccaaagacatattgcatgacgaagccggtgacgaaggtcggcacggaaataagcagcagggagacgatcaggataacggtgtcgtaccacttgcccttcttgaggcccgagataatgccgaagaccacaccgaaaatcgcctcgaacacgaacgccatcaaaccgagcctgatggtgaccgggaaggcgcgggtgatttcgtcgagaacgggctggccggcgaaggtatcgccgaagttcagggtcagtgcattcttcaggtagatgaagtactgaacgatgaacggctggtcgagatggtattctgcgcggatctgggctgcgacggcctcattgacaggcttgtctccgaacatggccttgacggggtcgcccggcagggcgaatacaagggcatataccagaagagtcgtaccgagaaccacgggaatcatctgcagaatgcgtcgcagaagatacttacccatacggttgctccttatttcctagaccggccagaaagggtatagtacgcccccgccggtcgataaatactccgacagtttaccgcatgcccggactgtgatatgtaaatttgcgttaacgcaaggtttgagattgggcaatgctggtggatatgtccatggttgcggtcggatagtggatactttaacttggttcccgatggcgtgagcaagcacccctcacacaacaaaaagggcggggatcttgcgatcctcgccctttatttccgaactgcctaacggtatccgttcagtgagtcagactcacttcttggacatctcggtgtaggtcgggaggttctgccaatcgaaggcgtagccggacttcacgctgagggaagccgcgccggaggcgttggagtagtacagcgggatggccggaaggtcgttgaggaggatttcctcagcctgctggtacagcttgttggcgtcatcgacggacttggcggcggcggcctgcttgcacatgtcgtcgaaggccgggttcttgtagtcaccgtcgttggagccgttgccgtcagcagcagcggtggagtacagctgccacaggtagttctcggcggacgggtagtcaggctgccagccggtacggaaggcgcccttcatctgacggttggtgacggcgtcacggaactcctggaaggtcgggatcgggttggtggccgcgtcgatgcccaagttgttcttgagctggttcacgacggcgtcgtaaagcggcttggcaccaccatcggcgttgtaggagaaggtgagctggccgtcgtacttggagatggcgtcagccttggcccacagttccttggccttggaggcgttgaacttcaggttgtcggcacccttgagggagtcggagtagcccggggtcttcggggaggtgaactcggtggcggcggcggcgttgccgttgagcaccttgtcgatgagctggtcacggttgatggccatggagatggcctgacgacgcagctgaccttcctcgtcgttcttgaagtgatcaagggaggacgggatggtgaaggtctggatgacggagccgacctcggagtaagcctgaaccttcttgtcggtcttgaaggtcttggtgaaggcggccgggacggattccatcacgtcgaggttgccggcctgaatgtcacggtaagcggcggagtcgtcggtgtagaccttgaaggtcacgccgtcgttcttgggctgctcgttacccttgtagtcagggttcttgacgagggcgatttccttgttgtgatcccagtggtccagcttgtacgggccgttggagacaggcttctcgccgaaggccttcggatccttgtagaaggactcgggcagcggggcgaaggccgagtagccgaccttaatcgggaacacggagtcggactggctcaggtcgacggtgaaggtggtgtcgtccacgaccttgaggccggagagctgctcgtcacccttgaggccatccttctgcagatcgtcatagccggcgatggtggagaagaaggaggagcacttctgggcgttcttggcgttggccacgtaggaccaggccttggtgaaggactcagcggtcaccggagtgccgtcggtgaacttccagccagacttgatcttgatggtgtactgggtggcgtcatcgttcggggtgatggactcggccacttcgttggaagccttgccgtccttgtcgaaggagaccagacgggagaacagcaggtcgaccggcttgccgccgccggtttcgttggtgttgcccgggatcagcgggttctgcggttcggagttgtacgcagtgatgatgttggagccagcggtgttaccggaggcagcgttgctgttggagccgccgcaggcgctcagcagcatggccacggagcaagccatggcagcgaaagcaagagctttcttcttcatatgatttctcctattcattaggttgcaggacgtctcagccccgcctcatgcaaacggggctggattccccgtcaccgtgagacttgcatctcacgatgtctcgaacaatccacccccgttgctgattacctgtcatttttgcgcacttgggagacaagcagtgtattttttgttacacccatgtaaaattcaggggttcttgccggctaggttcagtctttgctgagtttgttaaccaatgtccacatagtggtcacgcccgcggaaaggcctgtccgtaacggttcttgagctgctcgatggagacgtgcgtatagcgttgtgtagttttcaaggaggaatgcccgagcatctcctgcacctccctcaaatcggcaccgccgtccagtatgtgcgtggcggcggaatgacgcaacgcatgggggctgatgtccggcacgccggcctctcgggccgctctgtgcacgatgtcacgggctatgcgttggtcgatacggccgcctcgtgcgccgaggaacagggcgttggcagcacgggacttgactgcatccgttgccgtacgggccagtaccggccgcccctgttccagccaagtctccagcgcacgctgggcgggtagtccgaacggcaccacgcgttgcttgttgcctttgccggtgactttgatggtgcgagtggagaagtcgatgtcggcgatatccatcgacaccagttcggcgacacggatgccggtggcatacagcagttcgagaatcgcggcgttgcgctgcgattcggcggtgactcgggcgttgtcgcgcttgtctgcacgggcgggtgcctcactgcggtttacggtatcggccgacttatcagctgtcttgccgctgccggacgcggctgccgctcccccatcgtccttgtactggtttgttgcaacggcatgttcagcgacatccaataattgcttggcctgggattcggtgagcaccgcgggcagcgtgctgggaatcgagggagtcatcagtgtggcggccgggtcggtggtggtcagcccatgctcataggcccacgcgaagaacccgcgcacggccacggttttgcgggccatgctgctgcgggcgtgatcgcgcgattccaccgccatccagctgcgcagatcatccagcgtgatctcgttcagatcggtcacgccgcgcagctcgaacagatgcaggcatgccgtgagatccgcgcgatacgctttgagcgtattcgctgacaggccgcggttggacttcagataggagacgaaggagtcgatatcgccgtcgagctgcgtagatgacactctcgttctcctccgaattctttatggccttgggttacggccggggtggcgtgttgcgccgctccggcacgggtttcaatgtggcaatctgttcctgatggatggtcacgttctgggccgggcgcgaaccattggcggcggcgtcacgcaccatctccaacgtgtatccatcccaggaaaccacatgccccacatagtcgcggaacttcatacggtggtcgaccgggtcaatgccgtcggtgatgcgcaccaccacgcgggcaccggccggaatctgccttggtaacgtcatacgtcatcatccccttaaccatccgccgcattcacttcgatgcgtttcccgaaaaacggtacagactaccttactcctttgggtctttcgaacagcggagccacacggtcttctcacgaaaacaagcgggaacttcatccccctcgcgcagccttcttcgtgacaggcggcgaggggaacctgcacacgggctgcatggcggggcgcagttacatggcggggcgcagttggacgatggcctgacgcggatggatgaaaccggtgatggcttctccccggcgtgcggagaacagcaaggtctgctgccagccggcttcggggacggcgagctcgcgttccgggaatccggcggcagttgtgtcggcttgctgcgcggtggccgtaccagcttgtgcagcggtgatgccggctcgcgtcacggcggccttgtaccggcggaaggggtcgccttcggcgaagaatcccatcacatcctgctcgccgtcggcaccagcgtgcagttggtcggccatatcggtcagacgtgccgccatgcggcgcagcagcacttcgacgttcagcgagtcttcctcgaccatcgcgcgcgtgcggtccgggtcggtcagggacacgcgggtcatgtccctccagcagccggcagccagcgcggcggcgatgttgcggtccgggttggcgaccagttcgttgatcagcgcggtggacaccacatgcggcatgtgggagatcatcgccgcggccttgtcatgcgtttcgtcgtccacgacgatgacgcggttgccgacgtccttggtgatcatcgcggcgacgtcgaggaagcggcggtagtccgtggactcgtccacggtgatggcccatagggcaccgtcgtacagatgcgggtcggcggcctgccagccggacagttcgttgccggccatcggatgggcgccgacgtagcacttccccagcgcggcagccttgacctgatcgcggaccatgcccttgactgagcccacgtcggtgagcgtggtgttcggatggtcgcccataagcggggctagggcggcgaggattgagggcatcgccttgagcggattgcacagcacgaccacatccggctcggcatccatgagttcggagagcgtgctcttgcagaaaatgccatcggcttcggcctgggcgtaggggtgcgagcgatggttccacgcgatgacgcgtacgccgcgctcggtcaggcggcgtgcgagcgagccgccaatcaatccgagtccgacgattccgactgtgtctaccacagcagttccttccttgctccctcggcgtactgccagccttccgacgcgcgattggtgatgtggacgccgccctcgggcagcatccaggcgtcgaccggcgggttcgggcgttcgcggcgtgggtagacggccaaggtttttgcccagtcgccgtgtccggcgatctcttccagtgcggtgcggaatcttggctcccagggggcggcgtcaagggtggcgatgaagctgtaggttccgtcgtggcctttgatcgggcgcgagatgaagctggtcatgttcagccccgcatcacgcaggacgtccagcaggtcggcgagcacgccggggccggtgaccagcgggatgaaggtgatgatggtttcgaagtcgccggcgtcattgcggtgggcgcgggcgttgaattcctggaccacatcacgcggggcgatgacaaggaattcggtgtgcgcgccatcgaaatcctgcacatgttcggcgagggtgtcgagatcgtagagttcgccgcagatgctggggccgagcgccacgcggccgggcttcaggtcgcggcaggcggcggcgttggaggatgcgggttcgggctgcaaatggtgttcggtgatgaaccgggtgcattgggccaggccgtgcgggtgggcgctgacggggttgccggtgcagtcgcagatgctgtggccgcgcacggtgaaggcgttgaaggccacgtccacactgatccgggcgaagccggccgcgtcgggggcgtcgatcagcgcatcgagattcgggaccacatagccttcgacgttgttttcccatgcgatgacgccccagccttggcgcgactgtacggcctgcatgatcgcgggcacgtcgggcagggcggtgaggtcgaagtcgccgagtgtggcgaactggtcggcggccgtcattgccgcctgatgggtgaaggtgccttccgggcccaagtaaaacagtttcatgcgtgccataaggttctatggtagcggccgtaatcccctacgcccgccgatacgcgacgcattcgcggaaatgtgccgccatatatagttacgcgcgcgattcagaatgagtgggaataacgaaccagcgggcgggaagaatgagcaggacgacttggaccagtatcaggccgtacagccagatgtagccggcatgctgggagaagaacggcatgtcgccttggaatccggcgacgatgaccgccttgccggatgtggtggtcagtgccatgccccatgcggtcagcgaggaggcgatgaggtgcagggccagtccgaccgcgcccatgcgcgaacgggcgcaccatgtcgataggccgatcagcagaaatgccagcgccagaccatacggaatactcagttctgcacccatacggtgggcgaacgtgcccacaaaggcggaagccacgcccgccgcaatcgtgatcaacgatttgaccagcgcgttctggcgatacgaccacggacgcagttcagtagtgctcttcacagtcatgcgtttcagtataggtggggatatgacttggcgaggaataaacttggctcccctcagagaggggagccagagagaatggtcggctacagtcgcaccagatcacttaccctgctgggcggcgttctggcggcgctgcttggcgcgccacttgtaccagtcctcacggccgaggatgatcttgcgcacgcggatggactccggggtgacttccacgcactcgtcctcgttggcgaagtccagggactcctcaaggctcatcttgatcggcggggtcagggtttcgagcacgtcagcggtggaggaacgcatgttggtcatgtgcttggccagcgtgatgttcacatccagctcgtcgggcttgttgttcacgcccacgacctgaccctcgtacaccggggactgcggttcgacgaagaagttgccacgggcctgcagacgctgcatggcatacggagtggccacaccctgacgatcggaaaccatggaaccgttctgacgaatggtgatggcaccagcccacggagcatagccagcggagatggaggaggaaatgccggtgccgcgagtggcggacagcagagcagtgcggaagccgatcagaccacgggacggcacggtgaactgcaggcggacccagccggagccgtggttggtcatgccgtccatacggcccttacggtcggccatgagctgggtgacggtacccatgtactcttccggcacgtcgatggtggtgttttccatcggctcgttgaccacaccgtcgatcttcttggtgaccacctgcgggcggccgacggtcagctcgtagccttcgcggcgcatctgctcggcgagcacggccagcgccagctcgccacggccctggacttcccaagcgtcggggcggtcggtgggcagcaccttgatggacacgttaccgatgagctcgcggtccagacgatccttgatcatgcgggcggtgagcttgtggtccttgccctcggtgccggccagcggggagtcgttggtgccgaaggtcatggagatggccggatcgtccacgtggatgagcggcagcggcttcgggtcgttggggtcgacgatggtctcgccgatcatgatgtcgttgacgccggcgacggccacgatgtcgccggggcccgcggactcgaccggggtgcgctcgaggccctgcgtgcgcagcagttcggagacgcggaagttctcgagggagccgtccacacgggacaggccgtaggtcttgcccttctcaagggtgccgttgtagatacggaccagaccgagtcggccgaggaagtcggaggagtcgatgttggccacgtgagcctgcagcggggcgccttcctcgtattcgggggccgggatggtggagatgatggcctcgaacagcggctcgaggttgtcgttgtccggcaggccaccgtcggcgggctggttcacggaggcgtagccagccttggcggcgcagtagatgaccggcatctccagcagctggtcgaggttcaggtcgacgccctcgtgctgcacgtcgtcggccaggccgagcagcaggtcggaggtttcgccgacgacctcttcgatacgggcgtcggggcggtcgaccttgttcacgcacaggatgaccggcagcttggcttcgagggccttacgcagcacgaagcgggtctgcggcagcgggccttcggaggcgtccacgagcagcacgacgccgtcgaccatggagatgccgcgctcgacctcgccgccgaaatcggcgtggccgggggtatcgatgatgttgagggtgatgccctccgggtggccgtacttggcggccagcggaccggtgtattccacggccgtgttcttggcgaggatggtgatacccttctcgcgttccagatcgttggaatccatcacacgatccggcacttcctcacgctcggaaaacacgtgcgactgctgaagcatggcattgaccagggtggtcttgccgtgatcgacgtgagccacaatcgccacattacggatatctccacgaaccgccatcgaaacctctcttaatactgattttcttgcgtaatcgttcggtacttgcgttctcgagtacttgctcttggatatcaacctgtacctacacacaaaccgtcacgatgttactggcacaccttgacacacaacgggcccggctttctgagaattagtcacatgtcatctggcttgcgagactttttgtattccacactctcgactcccctccctgaggggagctgtcgccgtgggcaactgaggggcgccaagtgtatcccctgaatctcccctgaatcatccctgagtacagcaccgtcatgggtagttactgagtaacctgatatccaacgatagttactcagtaaccttcgcccaaggcaaaccgtctatgcaaaggggatgcggtatggcaatcagagaagcgctattagcactgttggagcgaggcccggccagcgcctatcagcttaagaaggacttcgaccgcaccatcggtctgacttggccgctcaatatggggcaagtttccactacgctgcagcggttgaaccgcgacggactgattgaagagaccgcgccgactactagcggatccaatgatgtcggcaccgcagcggccgcaccattatggcgattgaccaattccggcgcccaagagcttgaccgatggtggcgctcccccattaccccggaacaacgcggacgcgacgaactggtgatgaagctggccgtcgccgtggaaatacccggcctcgatgtttccgaactcatccaacaccaacgccacgctttgcagcaactgctgcacgacatcacccgactgcgccggcaaacaccgcccaccgaactcgccacacgtctagtactcgaccaccatattttcatcactgaagcggaattgcgctggctcgataccgtggatgagacccagctgcgagcacaactggcgcagcaccccgtttcggcacctctcacggcaagctcagccgcactcaccgccaccattcaatagtgcataggagcacatcatgacttctcccgttctttcttctctcccgcaatcctccccatgcgcgctggaattacacgacgtcactcgcgttcacggcaaagatgcacgtcgtgtcaccgcgctcagtcacgccaatctcacgcttcgcccgggtgaattcgtggccatcatgggccccagtggttccggcaaatccactttgctcaatcttgcgggcgggctcgatgtgcccacgcaggggcacgtgctggtcgaaggccgcgatctggccacactgtcagtggccgaacgcgcggccatccgccgcaaatcgataggctacgtgtttcaggatttcaatctgctgccttccctgagcgcagccgagaacgtgtcgttccccttggaattggatggctggaatccccgcaaggcacgtgaggccgcgatgcaatccctcaatgaagtgggagtagccgatatggctgatcgccgacctgaagacatgtccggcggccaggcgcaacgtgtggcgattgcccgcgcactggtcggcccacaccgtctactactggccgacgagccgaccggagctctggattccaatgccggcatgacgattctcgaagtgttgcgcacccgcgcagatcgcggcgcggccgtactgctggtcactcatgagcctcgcttcgccgcctgggccgaccgcacggtgtttttgaaggacggccgtatcatcgatgaaaccggctccagcaatatggatgatttgctcaaccttgaggaaaggggagcatgatggcacgcgcagccctcaataatcttgccaatgccaccgtcggtcgctctgcccaaattccccatgccgctaggccaagccttggcgcacgttgcaaccggtatcgggccgcgctgcgactcggctggcgcgacgcactacggcacaaggcccgcaccctactgtccttgctgctggtaatgctgccaatcgccgcaatggtggcctccatcggtatgaccaccaccataccgcccaccagatcgcgtgcgctggcgacaatcccggctgatacgcaggcggtcatcaccgccaccgccaggccccgcaccggccaaccgttccggcagtcacccgaaagcggcggcacgtggcaggacgatccctcccagcagccggcctcggccgccgagcttgcgaagattctgccgcaacaggatcggctgctcccgtattggcagtcgcccgaactcatcgccatcaccggcaccgcgttgcaacccggcgaacagaccaaggctgggatcgacgtgaaaagcgggaacgacattgatctgaacgcggcctccaccgcgaccatgaccgaggcttcacctgaggcattgcaacgaatgttgccgaagctggtcaagggttcggcgccgcagaataatacgcagattgtcatcagccgcacattggcggataatctcggcgcttctctcggtagcacggtgacgttcgtcgctccgccgttcgatggctggatgagcctggacgggcgcatcggcgaggcggtggccgacactcagcgtgcttggacagtcagcgggctgaccgatgaatccgaagccgcggcatggggcttggaaggctggatgtcagccatattggaatctgatggcgtcggtgtggatggccattatttggtggtcggtccagagccggtcacgtgggcgcacacccgcagcatgaacctgttgcaggccatcgtcatttcccgccatgtgctgactgacggctatccgcccgcatcgcagctctacccgatgcagatcgatgcggctaccatgttgaaccacatggtcaccgtggtcatcaccatgctggtgggtatgttgctggtactgtttctggtcacgcccgcgtttacggtgtcggcagatcagtcacgtcgtgtgcttgggctcgcggccgcatccggtgctgcaccacgtgacctcagtcgaatcatttcctcgcaaggtctcgttatcggcgccatcggtggcgcgctgggctcggcattgggattcgcgcttaccttggcggccggccctgcgataggcgcattgcgtggatccacgccgctggagatcctgcacggattctcgtggggctcgctgccgatgggtattgtcacggcaatcatcattggatttgccgcgacgattgcgccggctcggcatgtggcgcgtatgcatccagtcgatgcgttgaaggattgcccgacaagagaggaaatcggctacggtgaatccgcgaatggcgtggatacgaagcttcgccgtaatcctttgagactgctccgtgttgcggttggtccgattctggtcttggtctccatcgtatgcgccgcgctcagtctgacattgccattacccacgctggccgatcacaatccgggcgcggttccggccggaaccgaaacgcatatggctctgcttgttgccacgattttgttggctgtcatagggcttgcgttgtcgattcgcacttttgcacggtggtgcggcaaagcgggttcccaactgaacatcggcgcacgcctggcactcagggatgcagccgagcatcatcgacggttcgttccggcggcatgcgcggtgctgattaccatgtgcatcgcctcgtacacactggtaatcaccggctccatggtggcggaccagcgaaattccacgatgacgatgacgtatggaccgtcggggatggccattggggccgacgtgcatgtcagcaatgagttcgaccgtgctgtggtgtcggatgcgatacgccggcttggcaaagagacgccgatacgcgctcattacccggtgtacaccgaggatgtcaagcgatggtcaaaactcaatgatacgaccgaagtcgattccgacaagttgaacgccgaacacggctacatgtatgccgctgcattgctcccggccggtcacacttgtgataacccaacgatccaagagcaaccggacacgtccacatgggtgggccaggatgccgcttcggccctgtatccaaacgttccgatacgttgtgtgccgatagaccgatcccatcagccaacgtattcgaatatactgccgagtttccgcggcgtgaatctcattatggatggcaatgcgatgcgtttgtccggcttcccgaacgcggatgaggcggcacaggtgcttgatgcgggcggtgtggtggtcggcgatgccggcacaatcgacgcgggaggtatggtgcgtgtggccatttcgccgaatccggcaattgcaaacgaatctcaggccacacatatcgagaagcgcaaggccatctacgtgcgcggcgcgtacccgctggtgatgagcccggcaacagcacaggcgctcggcatcaaacaattgcagtatctgggtgagtatctagacttcgccggtggcaactcccccgttaccgtaaagaaggcctcagcttatgcaatcgaaaatctgccgctggcatccacgagcactgacgggaatcgcctgccgtggggtgacaatatggcattggtgcccattggcctgttggcattgctggcactgatggccacgctcgtttcactgctgctggcccgcacgcaggcccagcgcgacatggccacgatggtcgccgtgggcgcgccaccccgattcctcagacgttacggcctgacgcaggctgcggtgattctgctggccggcgcgccagtgggcgtggtatccggcgtggcgttgggatggctgcatgtggcatggaaccgcaggatcggtgtggacggtcattggctggaaaccgtgccgatctggggattgcaggcggcgctggcattcggcgtagtggtaaccggactgctggtggcgtggctggtcacaaaaccaccgcgcaatctcacccgtcgttccctcgattgatcagtgacatacggcaacccttgccgtgtcattcgggagctataagacaaaaagtggcccacacattggtgtgggccactttagtagcgaaggctgaagtgtaatcagtcttcgagattgaggcctttgcgctcgggcaagcagagggctgctatgcaggcgaggatgaaggcggcggcgaagatgatgaaggccacggccttgttgccgccggacagggtcaggaaccacggcatgaggagcggcgcgatgatggcggcgatgcggcccaccgcggcggcggcaccggcggccgcgccacgcaggcgggtcgggtagatttccggggtcacggcgtacaacacgccccacgcaccgaggttggaggcggacagcagcatgccgaacacgagcacgagggccgctgatccggcctgcgagaacgcgaaggcggccacggcggagacggccaggaagatgctcagcgtcttgcggcggccccagacctccaccagccaggcggccaggaagtaaccgggcagctgggcgatggagatggcgagcgtgtagccgaatgacttggtcagggagccgaactggtcggcgagcagcgacggcatccatgtgaacgcgccgtagtaggagaagttcacgaagaaccacgtggcccagatggcgatggtgcgggccaggtacttggagccgaacagctcgcgcgtcttgatcttcggcagcggcttgcccttgggagaggttaccggggccactcccccggcttcctcgaagtagcgcacggccttttcggcttcgtcttcgcgacccttggcttcgaggaatcgcacggattctgggatgtgtacacgggtgacaatcgcgtagagcagtggcagcgcgccgatggccagcgcccagcgccagccccagtcaccggtgttcgggatcacgaagtagccgattatggcggcgatgatccagccgacggcccagaacgattccagcagcacggtcatgcggccgcgctgtttggtcggcgaaaactcggagaccagcgtggaggcgaccggtagttccgcgcccaagcccagtccgatgatcagtcgggcgccgagcagcatgccgagcgaccaggacagcgccatggcgccgttggcgatgccgaagatgatcagcgtggcggtgaacacggttttgcggcccacgcggtcggcgatgaagccgcccaccgccgcgccgatggccatgccgacgaagccgatggacagcacccacgacttttcggtcggggtgaggttgaagtgcgggtcggctgcgatggcggcgaccacgaaggaaacgaggccgacgtccatggcgtcgaatgcccagccgatgccggaggcgacgaggagtttacggtgcgccttgttgaagggcagccggtcgaggcgctcgttgcgggtgagctgcgcgggttgcgctggagtggtggtgctcacgtcgtttcctttctggtaagtggcgtcagatttagtgtcgggtcaggtcggtgtaggactcttcgatggccaagctgatgcgttcgacttgttcgcgggtcagcggcttgcggaaggtcatgcgtaatgccgatttggcgatggacggttcgaggcccatcgccagcaacgtggcaggaatctcgtggcgcccgatggcgcaggccgagccggatgaggcagcgatgccacgcgcgtccaggtcgacgagcagcgcttccccggtgacgccggggaagatgaaggaggcgtgaccgggcagacggcgttcggggtcgccggtcaggtcggcgcgaggcgcgacccggcgaaccgcgtcgatgagcgtgtctcgggacgcgaccaattcacggcactgcgcctgcatgcgcgcattcgattcgttgagtccgatggcgagcgccacggcgccggccacgttctgtgtgccggagcgcaggccgcgttcctgccctccgccggacagcaccggttcgatgggtgtgcggccgcgtaccagcagtgcgcccagtcctttgggcgtgccgaatttgtgtccggatacggacagggcgtccacatcccagtcacgaaaacgaatcggaatctggccggcggcctgtacggcgtccacatggatgggcacgccgtgcgcgtgggcgatgcggaccagttcctccacgggttccacggtgccgacctcgttgttggcaagtatggtggagaccagcgtggtacgttcgccggcctcgccgtcaagctcgcgttcaagtgcgtcgagatcgagatgtgcttgcgcatccacgggaatgcgcacgacttcgaagccgaaccattcgtgcagccatgccgccgattgggccacggccgggtgctcgatagcggaaatgatgatgcgcgggcggctgcttgccagttgtttgccatcggtttcgtcgagtccgtagaccggccgcaggcccagtttgcgcatgcgcgccatggcgatgcctttgatggccagattgtccgattcggtgccgcctgaggtgaagatcacgtcatccggccggccgcccaatgccgcggcgaatgatgcgcgggccgcgtccagcgcgcgggccgcggttttaccgggctggtgcacactggccggattggcgtaggcctcagtcaggaacggggtcatggcctcgatgactgccgggctcactggttcggtggcggcggcgtccaggtacagttcaccgggttcaccggatgcgttgggggtatcggccatgactagttccaatccaatccaaggtcgatgctgcgcaccgagtgggtgagcgcgcccacggagatcacgtccacgccggtggcggccacggctggcactcgctccaggctcatgttgccgctggcttccacgatggccttgccgtcgatgagctccacgccgcgacgggtgtcgtcgagcgagaaattgtccagcatgatggtgtccgctccgccggcgagcacggcgggaatctggtcaaggcggtcgacttccacttcgatatgcgtggtgtggcccacctgttcgcgcacgtggcggatcgcgccggccaggtcgatgccgcgcgcggcgagcgccgccagatggttgtccttcatcatgaccgcgtcggacagtccgtagcgatggttgtggccgccgccgcagaccacggcgtatttttcgaacgggcgcaggccgggcgtggttttgcgcgtatcgacgatgcgggtgcgctcgtagcggcgcggccgggtgacgggtccgtcataatcgtcgccgtagatggcgttcaccgcgtccacgaaggcggcggtcatggtggcgatgccgctcatgcgctgggtgaagttgagggcgatgcgctcggcggtgagcaggtcgcgtaccggaccttccacggtggcgagtacctggccacgctggaatcgttcgccgtccttgatggcggcggtgacggtgacggccgggttctgcgcggcgaaggctgcggcgaacacgtcgatgccgctcatcacgccgttttcgcgcgcggtgaggtgggccgagccggtttcgtccgcggggatggtggtctcgcaggtgatgtcgccgtagggcgcgtcttcggcgagcgccgcttcgacggcggtgcggatgatgtgtgatgtgagcatgggtcagtccttgatgtaggcgacggagtgggcccagttgtcgactggctcgctgtagtcggtgcgggcgtgggcgcctctcgactcggtgcgggcgagcgcggcgatggcggccacatagcctacggtgagcatgttgcggttctccaaagcctcaacgctgcttgcagcaccatcggcgtttacatcagcctgggcgtttgcggcggcgaggccttggccgagttcggcgatggcggttttcagtccggcctcgtcgcgcagcacgccgacgccatgccacatggtgttctggatgcgggtacggtcccagaccttgtcggcggcggtatcgtcagcagcagccgtagtggcaggagcggccagcgcgatcggcgcatggtcgaacacggcaccggtggcggagttcaggaacggttcgggtgcccagaccgcgtcgtcaccgtccgcgacggcggcaagaccggcgcggcgtccgtagacaagtccttcgagcagcgagttggaggcaaggcggttggagcccatgacaccggtgcgggcgcattcgccggccgcgtacaggccggggatggaggtccgggcgttcagatcggtgcgaatgcctcccatgtagtagtgcgcggcgggcgccaccgggatcggctccttgctccagtcgaagccaagcgaacgcgtataggcatcgatggtcgggaatcggtgggccaggaagctggccaggtcggggttctcgcgggtcatcggcgagacgtcgagcatcacgggcttgccgccttgcgcctgcatcacgcggaagttctcgcgggccacgacgtcgcgcggtgcgagttcggcgcgcggatcgatgtccttcatgtaccggtggccgtgttcgtccagcagcaccgcgccttcgccgcgcacggcttcggagacgaggaagtgctcgcccacggccatggcggtgggatggaactggtagaactccagatcggcgacctgggctcccgcacgccatgcggcggcgaggccgtccgcggtggcgaccggcggattggtggtgtatgggtacatacggcctgctccaccggcggccaagatcacccggtcggcggccagatccttgtcctgcccgtcgatcagcaggcggacgccggcgatgtggccgtcccgcacgatgaggtctttgaggaatgcgttctcgatgatgtggatgcgcgggttcttgcgcaccatggcggagacgtccagttcgagcactttgccggtggcgtctcccccggcatgcaccacgcgggcgcgcgaatgagccgcttccaggccgcgcagcatgtgtccctgcgcgtcgcggtcgaagtggacgccggccgcggcgaactcgcggacgcgctccgcaccctcacgggtgaggatgtccacggccttcgggtcgcacaggccgtggcccgcggccatggtgtcggcggcgtgcagcttcgggtcgtcgtcggagaagatggccgcagcgatgccgccctgcgcatgataggtgttcgattccaccagttcggccttggttaccaaggtcacgtcgtgtccggtgccggccacggccagtgccgcggacagtccggcgacgcctgcgcccacgacgacgatttcagtgttgctcattgtgttgctttcctctgtttttgcgtcatctgcccccctcagtcacctacggtgacagctcccctcagggaggggagctagaagcatgtcacgggtgaacgcgcagcatgcgctccagtgccaccttggcttcgcgggcggtgtcttcgtccacggtgatgcgattgaccacgttgccggcttcgaggttctccaaagcccaagccaggtaagccgggtggatgcggtacatcgtggagcacgggcagaccaccgggtccaggcagaacacggtcttgtccgggtactgcgcggccagacggttcaccaggttgatttcggtgcccacggcaatggcggatccggcgggtgcgttggcgatctccttgacgatgtacgcggtggagccagtgccgtcggcggcgtcgaccacctgcatcgagcactcggggtgcacgatcaccttgacgcccgggtatgccttacgggcacgttcgacctgttcgacggtgaagcgctggtgcacggagcagaagcccttccacagaatcatcctggcgcgggcgtagtcggccggatcggcggcgccgccctgtgccttgaacgggtcccacagcggcatctcgctcagcggaatgcccatcgcgcgggcggtgttgcggcccagatgctggtccgggaagaacagcacgcgcttgccgcgggcgaacgcccattccagcacggcgtgcgcattggacgaggtgcatacgatgccgccgttgcgtccgcagaacgccttcagcgcggcggatgagttcatgtaggtgaccgggatgatctgctgcaagccatcggcgtccggctgggtgccgcagatctcgccgagctggtcccagcattcctggacctggtcgatgttggccatgtcggccatcgagcatcctgcggacaggttgggcagggtcacgctctgttcgggggtggagaggatgtcggcggtttcggccatgaagtgcacgccgcagaacacgatgtgatcggcgtccgggcgctcggtggcgttcttggccagctggaaggagtcgcccacgaaatcggcgtgcttgatgatctcgtcacgctggtagaagtggcccagaatcaacagtttggagccaagacgctgcttggcgtcggagatgcgctgctgcagttcctcgtcggaggccttgcggtattcgtctggcagcacctgctggcgcggcgcgttggctggcagacggtcgagcatcgaggcaccgggaccgtagctgggtgtggtggtgtcgaagtgccatgggtcctgggtcagtcctgcatcgcaggtgctttgcgcgcccagcttggcgatgatctcgtcaacggacggcgcagtggatagtgcggtcatagtggttcctttccctatatacgtctgtgatgccggcccgaagcgggtcggcgggaaaaatcagatgcgcgcggatgggatcagcgcgtcgagagcgtcttcacgctcgccttgtctggacagttccacgatgtcgtcgccatcggattcgtggggcatgccattctcgacaagtcgtttggggatgtagcggtagacggtggccggtcgttggcggccttcgcgcaccttctccccggtgtcttcaagatcgcccgaggcaagcattttgcggcggaagttcgccaagtcgagggtttcgccgccaatcgcctcatagacgccgtgcagttggcgcagggtgaacgtggggccgagcagtcgggtggccacgtcggagtattcgattttggagcgcaggcggagcagcgcgtagtcgatgatctggcgatggtcgaacgccagctcgggcagttcgtcttcggggaaccatcgtacgttgtcaccatcctcgaaacccgcggcctcggtctggccgacgagcgcccaatacacgacggataccatgggcaatccgccatgggaccgggtcgggcctccaaaggtgtacagctgttcgaggtatcgcgggtgcaggtctgtggtcgattcgagggccgcgtaggcggactgttccaacgaccggtcggagcgcaggtcgccgccgggcaatgcccagcagcccaggaacggctgacggacgcgcttgaccaggggcagccagagacgggaatgggccgagttcgcggcgttgccggaatcggcggcactgttgccggtatcgcctttcgggccgagtgccagaatcaccactgacacgccgacctgtggcggtgcgctgcggcgctcggacacattgccgaatcccatgccatgcctctttccataccggttgttctccccgcattgagagcatagcactacttatagtcacaatgaccataaatcacatattggatggtctagcgcacgaatattggtcaggtagcgggccccaatcgctacgaaatcacgtccgtgtcttccgatttcgactgtgtcatttcggcgacgggcgggaggaacggcgctagggagggtagttcgtcgagactcttcaggcccatttggtcgaggaaggattcggaggtgaccaaaagggccgcgcgggattcggggtccacgccgtcttccttgataaggccgcgtaccgtgagcgagcgaatcacgccatcggagttgacaccgcggatcgcggccacttgggctcgggtgacgggctggcgataggccacgatggcaagcgcctccagtgcggcctgactgagtctcgcagtctggccgtcggtgacgaatgatgagacgaccggctcgaacgcggcgcgactggcgaactgccagccacgagcggtgcggcgtagttcgaagccgcgcgggcggatgccacgggattcatcgccctcatagtcatcgtgcagggcttgcaatgcctcttcgactgtgttgcggtccaatgccaaaatgcgggccagctcggtggcggtctgcggctggtcggcgaccatcagaatcgcttccagacatgcgggcagcccgccgggaaaatcgtctaccgtgaaatccacgtattcggggcgcgtctcctccactcccctcacctcggcttttgcggattcagccgtcgattcggcatccgccatgtgctcggttgcattcgttgcgtcaatccgttcagtcaccagtcgccgtccttacgcaaaatcgccttcggaaatgttcacgtcgttcatcgtttcgtctacgccggatacccacctcaggtgcagttcggcaaacggaccatcttgctgatactgcagcacaccttgtttgaagaacacgagcacggccatgaaccgagccaccacctcaatacgagaagtgcagtcccgggtcaattcgctgaacgacatcgactggtctcccttgaattccagtgccgcgatcagccggtcgcgcaccaccagcgattgggcccgcagatcgaccagcggcacgtgcagctggtggatcgatacttcggaggcgggcgcgttggcgatgacctgggcggccagttgggcgagttcgagcggggtcagcgtccataccagctcaggcaacatggcggcaatgccctcgtccatggccgccggatgcgggaatcggccggcattggcggcgatacgcgcccggaaatcaccggcgacctgcttgtaggcgcggtattggaggagtcgggcgaacagcaaatcgcgttcgcgcagtgcttcaaggctttgctcgtcgtgctggctgtcttcgccgccgggcagaatcgccacgcttttggcctcgaccaaaatagaggcgatgtcgagaaaggcgctggcctcatccatgtttttcgtgaagtcgagcccgcgcacgtatgtcaggaattcctcggtgatcgaggagagggaaacttcggtcagctcgagtttgttgttggcgatcatgccgagcaaggcatcgaacggaccggaatagacctcgaggttgacccggaagccggaagtggcggattcctccgtgctgatttcggcttccgcggagctcccctcagtctcgctacgcgagccagcttccctcagagaggggagccgagaaagggaagtctcattcatcgtttatcgaaacaatcgttacgccacgatgccgtgagcaatgagctcacgtgccacctcacggtattcctttgatgtcttgtgctcaggggcataaaccaccacgggcgcggcggcaaccgtggaatcgggcagtttgatggagcgggagatgaacgtgtggaacaccttttcgctgaacgcctcgtaaatgcgctggcagacctcttcgcagtgcagtgtcttggtgtacatggtgatgagcacgccatccacttccaatgcgggattgatgcgggactgcactttttcgatggactgcataagtagggccacgccacgcaaggcgaagaattcggcggccacgggaatgatcacgccatcagctgcggcaagcgcgttcacggtgagcaggccgagcgatggctggcagtcgacgatgatgagatcgtattccgacttgagcttgcgcagcacactgttcaggatctgctcccggcccacttctgtgaccagttggacctcggcggcggacaaatcgatgttcgccggaatcacatcgatgttctcgaatgcggtgtgctgcaccacatcatgtgggtccacggaaatatcgaacagcgcggtgtaaatcgtgttctccacggtattcgcgttgacgcccagtcccacagtggcggcgccctgcggatcgaaatcgacgataagcacgcggcggccatactgggccaacgcaccggcgatattgatggagctggtggtcttacctacgccgcccttctggttgcacatggcaatgacacgcgccggaccgtgctgttgcagcggttcgggtgcggggaaggtttcgtattcacgtccaagcaaatcggtaggcatactgtctaccttatcaacatccgggttcgctgggggtgcaacgacatacgttcccgccataggcagcgttccttgacggaatgcgctgtctttatcgcgggtgtctcgccagtcgtccatcgttgccctcgccccctttgccgggaatacctgctcgcctatcctaatgtactcgccgggctcgcctcggaacaccgttttgcagcgggcattccagtgttccgaggtttatggatctcgtctcgtactatgtcgatgcgcttactcggtgcgcagtgcggtggccgggtcttgcttggctgccttgcgcgagggaatcaggccgccgatcagcgtgagcaccacgcttaggatcaccagcaccacgccgccggtcaccggcagggcggcattgacgtccgcattgccgatgaagtgatgcaacacggcgttgatcggaatatcgagcagcacggtcaagcccacgcccaacaggccggagcataggccgatgatgccggtctccgcattgaacacctgggacacgttgtgcttcgaggcacccattgcgcgtaggatgccgatttccttggtgcgctccagcaccgaaatgtaggtgatgatgccgatcatgatcgaggaaacaatcaacgagacggacacgaacgcgataagcacgtaggaaatcacgttgacgatggtggtcaccgagctcatcatgagccccacataatccgtgtaggtgatcttgtctttcttcgagacggtgttgttgtagtcggtaatcgcgtcggcgatgtggtccttgtcttcgaagctgtcggcgtagacgttgatcgagctgggcgcgtcacgactcaccacaccgaatgcggcgaggttgtcgtcgtaggtgccggtcgacacgtactggtcgtagatcgcgacaagcacgtcgttcgaagccgtggcgatatacgagtcgaaactgtcggcgagctgctgttcgctcatcgcggccatcgcgtcggcctgatcgccggcacccgccgcgccagcgccagcgccagcaccagcaccagcaccagcaccagcaccagcggcatccgatgcgcccgtaccggaccgctgcccggcactcatcatcgacttggccatgttcgccttctgcgtcacgcccagcgaaaccacgtaggtgcgcgcgtcggccgccttggtggcgtcgtccgagggcgagaacgtcatgccgttgagcacgttcgtgttcgggttggccttctgatcggtgacgatggcgctggaggccgcacggtcgatcagatcattggtcagagcgcgcgtgtatcccacgccagcggccaacggtgtggccgaagcatccttcttcgccttgacgacgcccaccaccttgagtttggtggccgtttcgaggcgctgttcgattacatccttgtcgttgccgatgaatcggtagtggccgtcatcgcccttgacgtactggtcggatgccggaatcatgtacagcgtctggtcgagcgccttagcatagtcgatcttgtcttgtggagtgctgaccttgtcgccggcgttgagcttggacatcatctcgtggtagtcggaggcgggcagcaggccgagctcgtacagcgtggtcagcggcacgctgttgttgtcgtcgagcaccagcaccacctcgtccttggacttcggccatgaaccgttgaccacttggtagttgtcggtgatgaccttgcctacgagcttgctgtcgtccgctccaggcatgatctcattgaacgagtcgggcgcggcgttctcatcggttttgccggtcagcatcgacatctgctgcgaggtgatcgacgaggtgccggacatgccggacgagcttgtggacgccatctgcgaggccattgaagtggagtcgctggcaccgatcgtcacgccgtccgcattgaccagcgtgccatcggggtcgtggtcgaacacggagaatttcacgtcatacgtgtactggataccggcggaacccacatactggtgaatctcgctcttggaattatccaggtatttcttgaagcgggtcaggttgttttcggtaatcgaactggtcaggctggatgcctgcttgacgctgcggtcgtccgggtagatgccgtcggttctgtgcgtcttgccgccgtatccgtcatcgccgcccatctggccgcccatcatgctgctcaggtcgaaggtctgggagtcgatggtgatcgggtaggcggtcatcgtgtcacgctggatgtcgctgatgtatgcgttcacgccagtcgacaccgatagaatcagcgcaatgccgatgatgccgattgagccggcgaacgaggtcagcagggtacgcgccttcttggttttcagattgttgaagctcaacgccagcgacgtgacgaacgacatcgacgcgcggcccatcgtcttgtgcacggccggctgttcggccgtctcatccacgacaaacgggtcggagtcggagcggatcacgccgtcgcgcaggttgacgatgcgcgtggcatattgttccgcaagttcggggttgtgggtgaccatgaccacgaggcggtccttggccacgtccttgagcaggttcatgatctgcacggacgtgtccgaatcgagcgcgccggtcggctcgtcggccaggacgatgtccgggtcgttgaccagtgcgcgggcgatcgccacgcgctgcatctggccgccggacagctggttcggctttttattgatgtgttcgccgagtccgaccttctccagcgccttgcgcgcacgttcgcgacggtcggccttgccgatgccggaaatcgtcagcgcgagttcgacgttcgacagaatcgtctgatgaggaatcagattgtagctctggaacacgaagccgatggtgtggttgcggtacgaatcccaatcgcgatccttgtattggcgcgtcgagatgccgttgatcaccaaatcgccgtcgtcataccggtcgaggccgccgatgatgttgagcaaggtggtcttgccggaacccgagggacccagaatcgcgacgaattcgctgtcgcgtaggttcaggctgactttgtcaagcgcctgttgaacgaaatcaccggttttatagcgcttcgagatcgatttgatctgcagcatgaatacctcttcctggctgacggttcgctgttatgtactgtattgtcacgccttgaatttccggccgactttggtgctcccccccccgccgcgattccgctatgggcggacgcgtcgcaaaatggtgtgtctcaccgcgctctggggtgtgaggtcagatacgtttcgatcagggtttcggggcttacgtgcgtgtagatctgcgtggtggtcacgctggcgtgcccaagcagttcctgcacggtgcgcacgtccgcgccgccttggatcaggtgcgtggcgaaggaatggcgcaaggtgtgcggatggagtggtttggtgatgccggcccgctccccggttgctttgacgatttcccataccgattgccgcgagatgcgcttgccgcgtttgttgagaaacagtgcgcgtctctcgggaatcttggcgctggagcgccgttccagctcgccacgccccgcattgaggtatgcggtgatggcccggcatgcgtagctgcccaatggcacaagccgctgcttggagcccttgcccatgagtcgcgcgatgtgctcgtccaggtcgatgtcgtccagattcacaccggtggcttccgagacgcggcagccggtggcgtacatgaattcgagcagggccttgtcccgcaataccaccggatcggttgagccgccggctgccgccgcgtcgagcagacgggttacctcgtccacggtgagtacgtcaggcagggtgctggcacctttgggtgccttgactgcggcagaaacgtcggcagtcaccgcgtgctggccgagcgcgaagcgatggaattcatggatcgaggccagtcttcgggctttggagcgggcggactcccccgcctggtcaagggcggcgatgtagtcttcgacgtcttgtttggttatggcgtccggttcggggatgccgcgggtttcgagccaatcaatgtatttggcgatatcggattcgtaggcggtgacggtggccgtggcgagtcctcgctccacgccgatgtggacgaggaactgctctgtgagtttggtgaatccgttggtcatgtgtttgttctcttccccacccgctgcgcgggagcccccctcgtcagaggggggctaataataggaaaccccgctcggaagcggggtttctagtgtgaagtcacgacttcaagcaatcaggcctcaaccggagcgttgacgtcctcaggcagggcggccttggcggcgtccacgatggtcttgaaggtgttcgggtcggagacggcgatctcagccagagcgcgacgatccagctcgatgccggcgagacgcaggccctggatgaagcggttgtaggtgatgccctcagcgcggacggcagcgttgatgcgctggatccacagcttgcggaaatcgcccttgcgagccttgcggtcgcggaagttgtagttaaaggagtgcagcagctgttccttggccttgcggtacaggcgggagcgctggccacggtagccggaagccctctcgagaacaacgcgacgcttcttgtgggcgttcactgcgcgcttgacacgtgccataatctattcctcagctttctaaagtcttattatttccgggtaagccctatgctcacttctgcagaagctggtgcagcttcttggcctggccgccgcgcagcacatcgtcggcggacagttcacgacgcttgcgagcggacttgtgctcgaggttgtgacgcatggcggaaccgacatgcttcaccttgccggtgccggtgatcttggcgcgcttggaagcggcggaattagttttcatcttcggcattgctgccctccttgctggtttgcttcttgtcggaagtcttctgagaaatcgcggactgcgcgtcggccgcggcctgagcctgagactcctgcttggccgcgagacgagccgcctggcgagcctgacgctcggcgcgggactcggcgccacgacgacgctgctcggactgggtgtggaccttcttgcccttcggcgcaagggtcatgatgatgttgcggccctcctgcttcggcttggactcgacggtgccgtattcctcgacatcgtcggccagacgctgcagcagttccacgccaccaatcgggcgggagatctcacgaccgcgcaacatgatggtgaccttgaccttgtcgcctccgttaaggaagcgggtcacatggcccttcttcacgtcgaaatcgtggtcgtcgatcttcaggcggaaacgaatctccttgatttccgcggtgctctggttgcggcgagcttcacgagccttgatcttctcgttgtacttgaacttgccgtaatcgatgagcttggcgaccggaggcttcgcgttcggggccacctcgacgagatcgaggtttgcctccttggccaggttcagcgcgacggaagtcgcgatgacgcccacctgctcgcccttcgggccgatcaggcgtacctgcgggacgcgaatctcgtcgttaatacgtggttcgtcgctgatgatgactccaatcctctacttcaattccgtggcggggcctttgctggagtcctgttcaatgctttgggttcatggcaagccaaaaccagcgccaatatgcgctcagcttctgcagacgcatatcagttctttgcgtcattcctgattgcgcgttgtatatcgcaatcgctaggctgtttgccttgaacccgaggccttgaaaggcttccaggtggggttgccccgctttcttgatttctcaagccaaataggaatcttaccacatgcccggacattcgcggaccgtgtgtcgatgggtggataccggctacagtaggcataatgactcaggtatgcgtgatttttggtgcgggcgaatactatgcgggcacgcccgtggttcccaccggtgcgtatgtgattgcggccgatggcggactcgaccatacgcgcgagttgggcatcgtgcccgatgtggtggtgggcgacttcgattcgctggagggccggccgccccgcaccgatgtgcgcaccatcgcgctgcccgcgttgaaggacgccccggacatgctttccgcgctgaaggtcggctggtcggcgggttgccgcgagtttcacgtgtacggcgggcttggcggccgtattgaccatacgatttccggcattcaactgatggcgctgctggcccgacacggggcaagcgggtatctgtatggcgacgggctcatcgtcacggccatcaccgatggtaggctttcgttccccgcgcatccggtgcccgaggacggccgcatggtgtcggcgttctcccactccgatgtttcgcttggcgtgaacgaaccggggctgaaatatgagctcaagaacggcacgctgaccaatacggtggtgcagggggtcagcaacgagttccgcgacggcgtggacgcggccatcagcgtgaaacgcggcacactgatcgtcaccttccccatcgaagtggcgttgccacaggtgagcagattccatgaattcggcggcgatatcggcgagctggacaccg

SEQ ID NO: 317 - DNA, 18130 bp, Unknown
  R42_10m  MAG No. k141_3411
gccccagtccggcccctgccgtatagttttcatttggcgtaatttcgcccgcggatagagagcgtttcgagcgaacctgcacgaaacaccgcgcaacgacacaataaggaggacgccgtggcactgacggctgacgagaagacccagattatcaacgagtacgcgacgcacgaaggtgacaccggttcccctgaggtccaggtggctctgctgtccaagcgtatcgccgacctgaccgagcacctcaaggagcacaagcacgaccaccactcccgtcgtggtatgcagctgatgatcggtgaccgtcgtcgcctgcttgactacctcaagcgcgtcgacatcgagcgttaccgttccctcatcgagcgtctgggtctgcgtcgataattgaagacttccgcccgagtacctaggatggtgctcgggcgttttacatatcgccagccaacggcaacaacggcaagagggttagaggataggccagcaggtaaggccgacaagagaacccgaatgaaggggttgacacgaggaacggcggccaaggggccagtcgaaacaaggtatgtgacgtccgctgaagaggacagttgcggttcaagcgagtcgccgaaccgcagcacagtatgtaggaataattagaaaattaaagaaggaggaaccctatggagggtcccgaaatcaaggccgttgaggccgtaatcgacaatggatcgtttggcaagcgcacgctgcgcttcgagaccggccgcctcgcccagcaggccgatggcgctgtggccgcctacctcgacgacgattccatgattctgtccaccaccaccgccggttccagcccgaaggagaactacgacttcttcccgctgaccgtcgatgttgaagagaagatgtacgccgccggcaagattccaggctcgttcttccgccgtgaaggccgtccgagctccgaggccatcctcgcctgccgcatcatcgaccgcccgctgcgcccgctgttcccgcacaccctgcgcaacgaagtgcaggtcgtcgagaccgtgctcgccgtgaaccctgatgacgcttacgatgtcatcgccctgaacgccgcttccgcctccaccatgatctccggcctgccgttcgaaggcccggtctccggtgtgcgtctggcgctgatcgacggccagtgggtcgccttcccgcgttggagtgagcgtgagcgcgccgtgttcgagatcgtggtcgccggccgcgtgatcgagaacggtgacgtcgccatcgccatgatcgaggccggtgccggcaagaacgcctggcacctcatctatgacgagggtcagaccaagcccgatgaggaggtcgtggccggtggtcttgaagccgccaagccgttcatcaaggtgatctgcgaggctcaggacgagctcaagaagatcgccgccaaggagaccaaggaattccagctcttcccggagtacaccgacgagctgtacgcccgcatcgacgagatcgctcacaaggatctggacgaggccctctccatcgccgagaagctgccgcgccaggaccgcatccacgagatcaaggagcacgtgcgcgaggtgctcgcggacgagttcaccgatatggacgatgccgagaaggacaaggaactcggtaacgccttcaaggagctgcagcgccagatcgtgcgtcgccgcatcctgaccgaggactaccgcatcgacggccgtggcctgcgcgacatccgcaccctgtccgccgaggtggacattgtgcctcgcgtgcacggttccgccctgttccagcgtggcgagacccagattctgggcgtcaccaccctgaacatgctcaagatggagcagcagatcgacgcgctgtccggtccgcagtccaagcgctacatgcacaactacgagatgccgccgtactccactggtgagaccggccgcgtcggctccccgaagcgccgcgaaatcggccacggcgccctcgccgagaaggctctcgtgccggtgctgccgagccgtgaagagttcccctacgccatccgccaggtctccgaggccatcggttccaacggttccacttcgatgggttccgtgtgcgcctccacgctgagccttttggctgccggcgtgccgctgaaggccccggttgccggcatcgccatgggcctcgtgtccggcgacgttgatggcaagcacatcttcaagaccctcaccgatatcctgggtgccgaggatgccttcggcgacatggacttcaaggtggccggtacttccgagttcatcactgccctgcagctcgacaccaagctcgacggcatccccgccgacatcctggccgccgctttgcagcaggccaaggaagcccgcgccacgattctcgaggtcattaacgagtgcatcgacggcccggctgagatgagcgagttcgctccgcgcatcatcaccaccaccgtcccggtcgagaagatcggcgaagtcatcgggccgaagggcaagatgatcaaccagattcaggaagataccggcgctgaaatcgccatcgaggatgacggtaccgtcttcatctcctccgagggtggcgaggccgctaagaaggccaagtccatcatcgattccatcgccaacccgcacgtgcccgaggccggcgaaacctacaacggcaaggtcgtcaagaccacgtcgttcggcgctttcgtgaacctcacccccggcaccgacggcctgctgcacatctcccagatccgcaacctggccaacggcgagcgtattgacgccgtcgaagacgtgctcaaggaaggcgacaccgttgaggtgatcgttcagggtgtcgatgatcgcggcaagatctccctggccatccctggtttcgaggatcaggagaacaacgcccgaccgagccgtggcgatcgcgatgaccgccgtggcggccgtggccgtggtgaccgtgacgatcgccgtggcggccgtggccgtcgctccgatcgcgatgaccgtgacttcgacgatcgtgacgaccgtccgcgtcgccgtcgctccgatgacttcgaggatgattacgacgaccgtccgcgtcgccgtcgctccgatgaccgtgacttcgatcgcgatgatcgcgatgatgatcgtccgcgtcgccgtcgttctgccgaccgtgacttcgacgatcgcgatgaccgtgatgctcgcgactcccgtgatgatgatcgtccgcgtcgccgtcgctcttccgatcgcgatgaccgtggcgatcgtgatgaccgccgtggcggtttccgtggcggccgtggccgtggctcggaccgcaacccgcgctatgccaccgacgacaactacgacgactaccgcgccgaccgcgaagagcgcactgagcgcccgcgtcgccgcgtccgtcgcgactttgatccgttcgaggactaaagccctctcacggatcggtcgcggcatagccgccccccccacctacgggaagcccgcagggcttcccgcttaacggttcggcattcgaggactgatcgttctctagcttctctcgggtgagaagagcttaatcgcaaaccaaaaggcttctataccgtttcattcggtatagaagccttttggtttttcggcttcttcgcgctacatatttcgatgttgaatagggcactcgtgctgctgccatgtacattcagttgtcagttgacaactattctcatgcatcaagaatggcggaaaacagccattaagatgattggagccacgctaaaaagcgttgacaactgacaacagtttgtacacggcaccgcatggcacctatcctgttgctcacgaccggatctattctctcgtctgttgttatgcccaacagcaaaatccgcttgccgtgccgcgccatgtccgagtcatggccagccgttgattgaatggcggatgatcatcgaaggtactcatgggcgttgatcactgtggcaacaacaaaggccgggcccttgtgagagcccggcctttatgccgtatggcggcggattaatccttaaaggctaatccgttgtcaatcagcgttacagaatcgccatgcacacgaagtccagaatgaacagcgcggccacaatccagatgatcgggtgaacctccttggccttgcccttgcaggtcttcacgatgcagtacatgatgaagccgccggcgatgccgtaggagatggagtaggagaaggccatgaacacggctgcgaagaacgccgggatggcttcggcgatgtcgtcccacttgacttccttcagggaagcggccatcatgcagccgacgatcaccagcacgccggcggttgcggcggacggcacggcggagacgaccggggccaggaacgcggacagggcgaagcagatcgccacaaccacggaggtcaggccggtgcggccgcctgcggcgatgccggcggaagactcgacgtaggtggtggtgttcgaggtgccgcagatagcgccaatggaggtggcgatggagtcggcgaacagggccttgtccatcttggaggagaagccgtggccgttctccagagccttctcatcctcggcggagaagatgccggtgcgacggccggtgccgatgaaagtgcccagggtgtcgaacgtatcggacatggagaaggcgaagatggtcacgatgaccagaggcagcttggagacgtcggagaacagcgccgggaagccctcagcggagaagatcgcgccgaaggtctgcggcagctgggagaaggtttcgctgatggactgcgagttggaccaggtggtaacgccgaacgggatgccgatcacggtggtgatggcgatggccagcagcatgccgcccttaaccttcatcacggtgaacacaatggccagtacgaggccgatcaggaagacccatagcaccttgtcgttgaagtcggccagactcggggtcgccgccacggcgcctcccttggctgcggctttcgggtcgccgggggtgaacttgatcagtccgacgttcagcatgcccacataggccacgaacaggccgatgccgccgccgatggcgtgttgcagggactccgggatggccatgatgatcatcttgcggatcttggtgacggtgatgaggatgttgatcaggccgcacaggaacaccatgcacatggtctgctgccagctgaagccgaggccgaagcacacggtgtaggtgaagaacgcgttgaggcccatgccggcggcctgggcgtacggcacattggcgaacaggcccatgaccagggtgccgatgatggccgcgatgatggtggccaggaacacgccgccccacggcatacccgtctgcgacaggatctgcgggttgacgacgatgatgtaggccatcgcgaagaacgtggtcaggccggccagaatctcagtcgagacggtcgtgccgttttccttcaaatggaagaacttctccatttactctctacttccttggttttatgcggggctgcgcaccgcgcgcataatgctgcggctggccccggcgagaattgcgactcgccctgatcggcctgcccaacgcgcgtcaggcgctgcgcatccaatcagaaccgtggccgattatagcttgtggaggtaacgtgaacgggtccgggagtagactgactgccagaataattcggaacaactcagggacacgcagggcacacccgtggaaggaaggcgcgcgatgaaaccggccgtcgaagtcagcatcacctcttggaagaagaatgtcgtcaagcccggtcaggagtacggccgcgtactgctgatgcctggcaccggctacaactgcgaccgtccgctgctctactggtcggcccaggctctggtcgaggccggctggcgaatcgaccgcatgaacgtacgcaacgcttccgacgacctgtccacggtgattccggtcctcaatcaggcgattgacggctggatggccgccgcgcgcgagtccggcgcgggtaaagccggtgattccggggatggcgttgccgccgatgattctgctaccgtgctggccgatggcgcagctggctcgccgaaccgtgattccgacaccccgtccggccctcgcctgttgctgatcggcaagtcgctgacgacgatgacctacccacatgtggcctcacactacggtctgccgttcgtgctgctgaccccggtgctgcatcacgccgacttcgatccatccgcccgggtgattccggtgccggctgtcggcgatgatatcgtcgccgaatccgaggctccgagcgtggccgaagcaagggcgatcatccgcgcagaactgtccgaccagtcgcacgccgccagctcccgatactccggcccggcaccgctgatctgcgccggcaccgccgacccgttctacgatcgagcccgcgccaacgcgctcaccccgcacgtgcacgaatacccggatgccaaccattcgatcgaggtgcccggccactggcgtcgctcgctcgactatctgaaggaagtcaccgcgtccgtagcccagtacgccgccacgttgtaatgccttgcgacacgcccgaattctgcaatgtcgctgaccatccgtaatctaatcatccgtaaaccacagaccgttggttgaagtgcgcgcgagtgcatttccgaagtttggttcgccaagccagcgcaggttgagagatataagcccgtcaagggccggcgaaggtcacttcgcgagattatattgctctgcctgtgcgcagggcttttttgttgcccggccgaaagttccgaactccaagtcaacggccgacttaggaaggaacgccatgaagaggcccgaaaaggaagcggtagtcgctcagcttacggaagaattccgtaacgctgacgccgtctacctgaccgagtaccgcgggcttaccgttccgcagatttccgatctgcgtgaaaagctaggccgcgatacttcctacaccgtggcaaagaacacgctggcacgcatcgccgccaaggaagcgggcatcgagggtctcgacgagattctctccggcccgaccgccatcaccttcgtgaagggcgacttcatcgaggctgcgaaggtcatccgtgacttcgccaaggacaacaaggctcttgtcatcaagggtgccgccgctgacggcactgtctacgatgccgagggcgccaagaagctggcagacctcaagtcccgcccgcagctgcttgccgaattcgccggcgacgtcaaggcatcgatggccaaggccgcgtacctgttcaacgccctgcctaccaaggctgtgcgtacgatcgacgccctgcgcgagaagcaggagaaggctgcctgatttacgccctcacggcatgaatcagtcgcttcgataatttaaacaataaggtttattaggcagcggatctaccacttcgtccgccgccaagattgaaaggaagccataatggctaagtacaccaacgatgagctgctggaagccttcggcgagatgaccctggtcgagctctccgagttcgtgaaggccttcgaggagaagttcgacgtcgaggctgccgctccggttgccgctgttgccgctgttgctggcgctgctgctccggctgaggaagagaaggatgagttcgacgtcatcctctccgccgtcggcgacaagaagatccaggtcatcaaggctgtccgcgccatcacctccctcggcctggccgaggccaaggctctcgtcgacggcgctccgaaggccgtcctcgagaaggccaagaaggaagatgccgagaaggccaaggctcagctggaagaggctggtgcctccgtcgagctcaagtgatttgtgcggcataagccgtaatcacagcttttcgaggaaccccgcacctgtgtttcaggctgcggggtttccgcatactgagtagactagttgacgagggcgaggcggagaacgcgatccggcgtggaatcacaaagctggcaatgagcgaaagttgtcaattctgtgcccagtaatccgccaaaagccggtaaaagatgacacaatggcacgtagtgtggtcaaatagtgtgtccaggaaggcggtcacggtgagcgagtggacggtgaagatcaacggtgtcgaccggatcagcgtcaagccgggggagtgcgtggaaatcggccgtaagccgttacgcccccttgccgatgatggcaacacccgccttgacgtcgccgatcagaccaaatcgatgtccaaacggcacgccatgttcacggtaaaaagcaatggtacggcttcggtccgcgatcttggatcgaccaatggatcgtatgtggtgcgggaaaatggtgatttgttgcgcttgccggccaatgtcgagttcctgttgccgacgtctcccatgcgcatgcagttcggtgatgtgcctgcggacttcattcgtatcgacgatccagtggcaaagccactcgaccttaaggtgcctgatttgtttggctatgcggttcacgaagcaccgcaggagccggatgcggcggatatgtctgtcgacgatattcttgatttgcgggccggcgagccgaccgccatcttcagcgcggataatgtgcgacgcaaggttgacgaacttgaacttggctcactgaatatcacgcagcccgtgacgaaaaacgatgagccggccataccccgtgacctgttcgcggatgcgttggcccagcatgccgagcaggagaccgaacgcaaaaaccagcaggccatggactccgtggtactgccgaagcagcagaccgaacctgagtcgacgactgtaacgcccgcatccaagcacagcaggatctccggtattgtcccggtagatgccatcgcccatgccgttgttaagcacgctcccagcacaagcgagccggcagtggcgtcggcggcggttgttgaatccgatgtggtggctggcgcaagcaagtcagccgaaaacgttcagtccgctccgaataccgacgattctcagccggtggacgctgttgcacagcattctgaaggcactcagtccgaagccgcccagtctgaaaacactcagtctgagaccgcccagccgacaaccacccagcctgaaaccgctcaaccggcaaccgacgcacccgaggatcagcagctggcgaccgaaaccgaaaccgcccagcagtcggtctccgaagcgtatgaagcgtctgatatctactccacgggcgtacacactccggtcttcgagcccggctcggtgttcgagcgtgtggccaagggcgagctgaaagcacaggagccggcagtcgaagtcgatggcctgacctctgacgaggcaaaaaccacgcaagatttcaacgttcagttcgaagtcgcccgtcatcccgaattactggcgttcctcgccatgaatccgtacctgtacgacgacatgtattcttggctcgccgcccgtggcgaggccgatattgacgaagccctgtctcacaacaagggctatcaggaataccgcgaagcggttggaaagtgagtcgagagatgacccagagccagactcagaaccagaatctcacggaaggtctgaatcgcatccgtcgctggcgtgaccaataccgcagcatgcagccgccatcgccgctcgaggatgtgaatcaactggccgcgaagctggagatgacccatgcccatccctccggcatcgcccagctgttcgcttccggccatgttcggttggattcgttgttccgtgacacgggtgtgcttaaggccgccgaacgccatatcgggcgcgtactggatgaccaggccgccaagcgcaggatttccggcgtggcggagttgtcgctcgtggttggtgtggccacgtggaggggcaacgcgctgccggtgctgttgtacccggtgagcgtcacgatcgaggatgatggcttgtcgaccaccattcgattcaccggtcgcgtgaccctgaacgccgcgttcgtcaatgcattgcgtgagcagggggtgttcctggatgaggattccctgtttgacggtgccagctatgacagtggcactcccgaaacttccgcgatgttcgcccgtatttcgtccgaagcatcggagcgtatctccggcttcgccatcgagcgccagattgtgctcggatgcttcatggacccctcgtcgcagatgatcagcgaaagccgacagttcatcgaccagctggagaatggccccaccggcaatgtgctgttggacgcgcttgccggcgacaaatccgcccgcaccgcgctcaaagatgccaatattccgcaatacagtcctttcgacgtagacccgcatgctgagtacgaagtcggcgatgtggacaatacggtgcgatatgccgcgtcacttgctgccaatggccatagcatcgtggtcgacggcaccttcccgaagggcaccgcggagcaggctgtggccatcgcatcgcgctgcctgatgaatggtcgttccgtgctgtacgtgcccggcgtggccgagcagaagcgtctgttcatccagacggcctccgccaatgagatgaaggcgcaggtactggatgtatccgatgaacacgccaacgccgcgcttgataagcagctgattgccgcagtcggattccagcccggagtcgccacccagcgattcgaccagctggccgacgaactcgtgggcgtgcgctcgcgcttgacccgctatctgggcgacctgcacgggagcaacgataagtggaatgtgtccgcatacgagaccattcagaacctggcccgtatctccgtgctcccgacacaccccgccacccacgttcgacttgacgagtcaagtgccctgagcatcgccaacgatattgacacatggatcagcaagatggaacgtgccggcgagctcggcgaatacaccatcggcccggaagacaccgcatggtacaaggcgtccatcaccactgaagaacaggcagtaaccgcctaccagcgcgtggacgatttgctgcgtcgcttcctgcccgccacccgtgagcaggtggcacgcaccgtgcagacctgcggattcccggttcctcccaccactcgcgagtgggagcgtcaggttacggttttgaagaatctgcgacgagtgcttgacgtgttccagccagagattttcgagcgagacatcagctccatgatcgaggccaccaagccgaagagccagcgcaaggccgagggcacgtcgatgggattctgggagcgccgccgccacgtcaaggaagccaaggatctgctgcgcgtcggcgcgcaggtcgaggacttgcacgaagcgttgaaggtagtcgccaagcaaggggagcagtggcatcagttcgtgcctcacggcggttggccggtgctgcccagcaagctcgacgagatcatctccacccaagaggcgctggtcagcaatatgaccgcgctggataccgtgctttccaccacacccgctggtggcaatctggaaaccgccgatttcgagaaggtggaagcacgcctgaaagcactgctggatgatcgcaaggcactggacaccttgccggagcgttgcctgctggagcaggaattcgcttctgccggtctgaacgagttggtcgccgatctcaacgctcgccgggtgggcgtggagcaggtgcgtggcgaagtgcagctggcatggtggaccaccgtgttcgaggacattgtgcgttcttccgccatcatctccaaccaggatggtgccgcgctgcagaccgcatccgaccgcttcgcacaggtcgatgtggagcacgtgcgctccatcggaccgatggtgtcgcaggaatccatgcgccgcctgtgcgacatgctgttctcccgcactcaggaagccaaccagatgcacaccgtgctggcagggcgcgccagtgtgtcgctgagcaggattcgccgtgatcatccggagattctggccgcggccaagccgattctggtggcctcgccgggtacgctcgccgcactcaccgagccgggtgtgctggctgatgtggcgattctcgatgcgtgcgcgcacattcccgctatcgagttgctgtccatcatcggccgcgtgcagcaggtggtggtgatcgcccactgcgcgacggtaaccagcgaaagcgtcaagcagctgatcgacacgttgcctcatatcgaggtggatgctgccccgtctcgccgtgcgccgcgcctgtccgcattccttgaatccgagggatatggtcctgttcgctatgatgtggccaccgagccggctgccggtgaggtgcgattccaccgtgtggaagcgagcggtgtgccggttatgtcttctggtctggtggaatccagccagtcggagattgatgaagtggtgcgtctgattacgcaacgtgccgccggttttgctgtggttccttccagctatcgacttgtggtcgtgatgttgaccgacgcattccgcacacgcttgggtgccgaattgaaatcgttggcaggcaaatccaaggcgatgggccgattcctgcgccatgtgcggctggtttccttgcgtgacgtggccggaggtcgtgccactgacgtgattctgacgatgtgctatgcgaaaaccacgcacggacgtctgcttcagcagttcggcccgctcgaaagcacaggcggtcgcggactgttgctggatgccctggcattggcggaccacagcttggatattgtgtcggcctttggttccgaagatttggatgaagaacgactgcaccagtccggtcctcggttcctgaagaccatgttgacgtgggccgaacagcttgacgaccgtccggtgcttccgttgcgtggtgcggcaggcggcaacgtgctgttcgacgatatcgccgacaggttgcgcgcgcgaggactgaacgctgctgttgattatggattcgacaagggcgtgaagattccgctcgtggtgggattgaaggacaagccgtttgccttggccgtgcagaccgatgacgcgaactttatgtccgtgcaatccacgcgcaggcgtcatcgtttgtcggcacaggatctcatttccttgggctggaatgtgatgaccgtctggagtgtcgccgccttcgtgaaccccgataaggaagtcgaccgtatcgtcagccgtatcggcgagatctaccgcgaggttgaataatcatggcggaatactcggctacacggcgcacaccgcgcaagcacaagcgcgtggtgatgaaaggcactgagcagtttgacgctgacggcgtcaaactcgagcccggagacatgcagaccgaccaacaacggcaatccgacgacgacaaacgcatcctcggcgaactgcctccacactgggctgttttcaacgagcgcgagtaggagttgaggcgcactctgtgcgctctgatgttgtgttttccgcagccgtacggctgcggaaaacacaacatcggccgaaggccgattccgcttcctaccgcacaacggccataatcgctccggcctgttgcagctccataaccttggccgcggcctccggcggcatcgcgaacgacaccagtcggtcgttgcttcccaatgcgccagtcgtatccggtttgtcgacattcatcaccgtggcgttctcggccagcgtgcaatcggcaccttcgcaaccgacggcggaaaccagtctcacctgatcgccggccaatacatcgtcgacgctactggccaagcggacttcaatcaccgtagtgccggtcggtgctacgggcgcatctctggccatatgcgtggaaatgggatcggctgcttcgatatcgatttgcgccaccttgcccaccacatcctcaatattgcacgcccaagatgggcctatcgcagataccggcatatcagccaactgaacgtcggcggccagaataatgtcaccccgtcgaatcgagcgagcggccaccaccatcggctcggtctccaccacggccaatacggcttcaagcccaaacaacactgcgagtcccacgcacaacgcagcagtgagtcggcgcaaggcatccgccatgcgccgtcgccgcaatgagccgcgcgcaggcggcttaataaacgaaaaggtcaccatgcaaccatggtgacctgaagtttttcgtaagcgcaagctgaatcgacctatgtggttctagcttgccaagttatccacaacgcttcaaacccgtgcaacagacagtgcccgtagtgccaatatccgcggcataccgccgtcgacaccgtcgtttacagaggaaaaacggggagccgaccttacttgccggatttgtcggtgcggtagaatccgtgacccttgaactcaatcggcacggcggaatacaccttgcgcacctgctcctgcgagcacttggggcacacggtaatcgggtcgtcattgaacgactgctgttcggtgaagtcatagccgcagttcttgcaacggtaatgataggtaggcaacggattcctccaacaaagtcatatttctcgcgcatggcgtgcaacaccatgccgtgcaaccgttcatatcctagtcgccgccctgacacattggcgttacggtcttactggccagcctgcttttgccactctggttccatcggccagtgtgcgtggctggttggtcagtctggcttgcgccgagtatcttggccggccggtcaactcagccggcccgattcgccaagccgccggtatccccccggcgtcagcactccgtcggccggcacatcatgtggttcggccggcaaatcggtgtccaacacctcccacggccagcacaccgcaatcagggggcacgcgggcttgcgtcgagccaaggcccggtcataccagccggctccacgccccagacgattgccttgcgggtccactgccaaagccggggcgatgaccagatcggccttctccaacgcttcgggcggtagaactgcgccagttggctcatcgggtctgtgatggacggtgctgggagagctgcagctaccggcattgttcgcgccacccactgcatccatcgagcgcaaggattccaatgaatccagcacactccagccaatttccaacccagatcccaatcgtggcaccaacacgtggcagccatgagccaacagccatcgcaacagtggccgggtttcgatttccgaacccatcgacacatatgccgccactgtggaaccatcctgaatcatgtgtgccgggaaccgtcgcaccagcaattcaccggccgctccacgttcttccgctggaatgcgcttgcgccgagacagtatatggtggcgcagcgtcgctttatccatcttttctgttttctccgtgccgctggggtcgctgccgatattcatgccattgtccgcttcgctcataccgcacaatctagtgtttccaccgtaaaacgaaagtggccgaggcgaaggcgcaagcccttcatatggctacaataaaggccgtgtcagttttccagtcgattaaagaggcgttcaagctggaccaccagatccgtccgccgcgcctcacccatcccggtttcccgataatcctgcgccccctgaccatggacgatgaggacggctggaacgaagtgcgctggcgcaacaacgactggctggcgccttgggaatccggcgacccgatgcatggcggctccatcaccttcaatcaatgggtgcagcgacagcgccggaatgagcagcatggcgtcggcgtgattttcgccatcgaataccagatgcgtatcgtcggccagatttcgttgggagccatcgcgtatggtgccatgcgcaccggtgtggtcggatattgggttgaccaacggtacgccggccacggatttgcgccgatggcactggccatgcttgccgattgggcactcggagacccattcgggcccgcgttgcatcggctggaaatcgccattcttccggataacgcgcgctctttggctgtagtgcgtaaggtcggagcccatcatgagggactgcgcgagcggtatatgtatgtcaatggccagtggcgcgaccacgtaacatttgcgctgttggctgaagatatggggcaagggttctctgccagactcgccgccaccggttccagataagcgtcgaccggaagaattccgctccgacacgcccggacggaaagccccagttcgtcggtacgtctcctatccttgactctatgggttatgagtcactgagcactgtcgtcgtgctggtgattgtggcgattattatcgttgtatggctgcccgtacgtacggccaacggcatgaaacgtgtggacgagcaccggcaggatcgttattcgccttccctgcatatcgttgatgcagagaacggcagacgattcggagacatcaagccgcataaggcgaaaggggcagcaatgccagcatcaacaccgtcagcgaggctgacacctgagcacatcgcccatgtgcgggaactgcgccgcgcggccatccgccgccggcagattctcgccgtatgcctgcttgccataaccgtgttggtgtttgccgtatcgttccccctgcatttcagcccgctgcttgctcttattccgttcgtgctgttactgctggtgctggtgctgggagccaatgcctcacgccaggcccggcaatgggagcgcaaggtggtccgctacgagcggactcatagcggtacgggctggtccaagaaaccgtctgccgagtccaaggacagcaagcgtgtgaacaaggccgaaccggttgcggccgtaactgcgcctgccaaggagctttccgagcatgttgaggatgctgccaccgaggtcatggaacagcggcagattcgccgcgcgttacgcgatgccgagattgagcaggccaaggccaaggcgttgcgtcagtccgccgccgcatatcaggctgcggcggagcacgccaaacagtctgagaagtctgatactgcacagtccgccgccgataagcctgccgccgaaccgtctgctatggtcgatgaatccgctgaccgtaagtccgctgccgaaaccagtgaatcttccgccgcgcccgatgcctccgctcgcacggataagtcgactaagtcggataagtccgtcgcccctcgagttgaaccatcgcttacggtgcgtgacgagcgtgatgagcgcgacgatgccgctgccgacgctacgtcggaactggccagcgtacgccctgcccgagcactggatgtcttcgatatggccacctcgcaggatctcatctccttcactttgggcggggaacataacgccgacaacgctccggaaagcttggagatcaagtcgacccgtcaggtgtccaaggcggaacctgtcgaacccgcagtggcggaaaagttgattgacgaggcccgagccgtcaaggccgcggacgatgccaaggccgccgatgcgggcaaggctgtcagtgccggaaacgctgtagacactgagtcggagcagcgcgatgatgccgatacgaacgccgctacggacgccgatgacgaggctgcaaacgccgcccagcgagccgcattccacgaatccgaggagcgtgccgacgtcgaagcgccagcggcgaccaccgattcgttgggcgcaggcttggactccattcttgcccgccgtggcaactgagcgttgcgattcgccgattttctctcacagcgttagcactcgagttggcagagtgctaataatcgcgctacgatgtgtcctagcgcaaagggacaacgcaagtgatcgtcagcctcttgaggcgttctggcgcggcattatcgaactacaagtagatacgaggtgacccacagtgtcgattaagctcacaccgttggaagacaagatcatcgtcaagcaggccgaggcccagacccagaccgcttccggtctgtatattccggacaacgccaaggagaagccgcagcagggtgaagtcctggccgttggcccgggccgtcgtgacgacaagggcgagcgcatcccgatggatgtcaaggtcggcgacaaggtgttgtactccaagtacggcggcaccgaagtccactacgagggtgaggactacctcatcgtcggcgcgcgcgacattctcgccatcctcggctgattagtcgcctagcgaacttcatcaaccccgactgttcccacgaacagtcggggttttctcttgtcaggcggaaaggggctcccctcagagaggggagccgaaaaccgctcccgc

SEQ ID NO: 318 - DNA, 19427 bp, Unknown
  R42_10m  MAG No. k141_3755
gaacggtagggccggcccttggggtccgtgtcccgcaggttcccggacgcctcggaccgtctgtcggtcagcttgccggggttcttcaggacggtgtatctgacgccgcgcatgcgcttgacggatttctcgtccccgtcgaggcgctgcgcttcgacggctacacggacgggtcggacctgtggcagtacgtcatcgcgaacttcggcaccctctgctgggtgccatcatgctcggctgtctcgtcatggtgtcctcggccaccgcgaaggcggtgttcgaggagtggggggggggctgcgttccggggcatttgccggccgtccggcgtcacatcgtcaggctgtccgggtcgaggaggaaatcgtagacgctcatcgtgaggatgccgtgttcgtcgcggacgggtttgaccacgtcgcgtacgaggacgatcttctggaagctgtcgtcgatctcgagcagcgaggccttctcctgcgcgaccttctccggtgtgggcagttggtatgcggattgaatgtagcagcgccggttgccgattcgtgaggggcggcattgtgtgccgcttgttgtccgccgttgtgcaagaatgacttgcatgccttatcgccgtcgtcaatccaccgctccgaagtccggtgcgccgaaatccgttcggtccgctgccgccgggcagtcgttggacattgacggcatccatctgcacctgacgcgcaaacccatcaaaaacctgtatttgcgcatcaaaccgccgagcggccgcgtcgaaatctccgcaccgatgcggatgagcgagagtcgtatcgcggatttcgtcaaagagcgacattcgtggattctcgcccagcagcagcgcatggctgaggcgcaacggcgctccatcatggcattgaacgagggtgcaggcttcgagaacggaggtcgtggcgtagctggtgccagcggccatgatggagacgttgccggccgtccgaaaaccggtgatatcagtcgtccgagaatcggcgacgccgggccgggccaagccggtacgaacgtccagccgtattttgaccgctcccaaatctggaccgacgaacgcaaacgacaagcggcggccgcgatcaacgccgcgttgccacagctgctggccaagtgggggccggtcatcggccggcagcccacacatatcacgctacgggtcatggcctcgcgctggggatcgtgtacgccgcgaaccggccgcatccgtctgaaccttcaattgggagtgatggaaccgcaattcctggaatacgtcttggtccatgagatgacgcatctgtgggaaagcggccacggcgccggattccaacgccgcatgaccgcctacctacccggctggaagacgctgcgtcgcgacctcaaccgccgcgtggtgctgtgacgatgacgggtcaggcttcagtgccggcgatgtggctgatggcctgatcggattcgttcgcatggttcgaatgcgccaccatctcgatggccgccggacacccgctcaccgacgaagaccgctggccttggctcgacaccatcgccgcgtggatcgacgagcgcgtggccgccggcgagcccgccgtggtcacctgctcggcgttgaagaagatctaccgcgacaagctgcgccgtcaaggcgtggtgttcgtctacatgcagggcacattcgacgaggtgatggaacgcctttcccaccgccaaggccacttcatgaagccgagcatgttgcaatcccagtccgacattctcgaagagccgggcgatgacgaaattcacgtcaacgtacacatcggccaggccgatcccgaacacgaggccatggccgtgaccggtgccctcggcctgtgagcattttgtaggctcccctcagtctcacttcgccacaagtacggcgcatcgacgaactcgaacggcgcatcagcgaacttcagctggagctgaagcagtgtgaaggccagcaagggcgaaccggatcggtccaaacgggctactcaggccgaccagcccagccagtccgttcagaccgacctaactgatcagagcgggccctctgaccagtccgaaccatctgaccgacatgtacttgttgactaagtgtgcggcccgtcattcgttatggaacatgccggccatgtatacaggcaggtaggttacattcccttcgactgagacgttgcacgggccaagcacatagcctgtattgagatggtattcagggtgggcgagcacgttgtccattgcgcgatggcgtttgtaggatttgccggacttcacctcaatcggcagcacgtgatcgttgcggtcttggatgaggaaatcgagctcgccaagcttcttactgttgtagtagtacaggtcaaatccgtgagcgcgtagctcttgggccaccgcattttcatagattgaaccgtagttgatatcagggttgccgtcgagtacgtcgagcgcggttttcttgagaaacgagccggtaagcagacccacgtcgttgtaaaagagtttgaagaggttacgttccttgctcatctccaacggtgtgcacggttcgtccacgttgtacgcggcgacggctacatccgcattgaccagccaatcgaaatcggaagcaaccgattggaatctcatgttcttttcgattttggcgaaggtaaagcgcttgtttgggttatttaactcgctgggcaccaaatcgtagatagcgcggatatgcagccggtcttctttgcgcgcgtattggctgatatcgcggcgatattcacgctttatgttctcttgtatagtgcgcacgtccgcaacgctgccgtttgccacgaacgagtcgactgcggcaggcatgccgccgatgaccagatatttggagtatagctccatgagcctttgatgaatgaactcatccacttcctggtgcttggcaaagcattcggcaagcatatcgaatacgtcgttgccgatatgctgcgaccagcagaactcttggaaatccagtggatacatatccagctcggtcaggtacccgaccggtaccgatcgtatatcttcgagctcgactccaagtagcgagccggaaagcgcgtaatcgaaccgaccatcatctacaaggaacttaattgcggtgaccatttccttgcaacgctggacctcgtcaaagaaaatcagggttttgccgggtactaatggcgtatttacggccagttccagcctcatcagtaggtttttggcatcgcggggccgatcgaataatgcaacgaggtcggggttctcgatgaaattgagctcggcgatatggtcgtaatgctgttgggcaaagtgcctgatgatataggttttgccaatctgacgggctccggtgaccagcagtgcagtgcgtttcggcgcggatctccaagcttccagctgtgtctcgatttttcttcgcagcatgagaatctccagtcatttgtaggccttgcatctatgttgggcacgttttccaactgtttatagcgcatattttacacttttccaaccataagaatgcggttttggctacgttttccaacctcaaaatggggagttttatacacttttccaacttatgtatgtggagactctctatttcacgtgagacgaaagtggctcccctctttgaggggagccacggaatactgcttttacttatgccaggtgagagcgcatgaaccactggaacttttcgagttcctgcacgtggtcctggatgatgttggagctgatcacatccagctcgtccagctcggcgatggccttgcggtcgtcggcgatgaaggcgtcatagtactcgatcagcgccttgagatactcctcggtgcccacgcggccctcggcgtcgaacgacttccacgtgcggttgcgcacgatggcgtccgcgcggccgtccggggtgccgcccagagtggcgatgcgctcggcggtctcgtcggcctgagccagcacggcctcgacctcggggtcaagcatctcgtgaacggcgatgaagttcgggccggtcacgttccagtgcgcgtgcttgaggaccagagcggcctcctgctcctggctcagtcggttctgcaggatggcgatggccttctcactggccgcttcatcaaggcccggcacaacaaatgcaagtgtcataatgttccttctttcagtaggtggaacctgtccatataattctacgatttttggttatgccccgggccgaacgaataggtggtgaatatcacgtggctagttggcatcgtcgctttgtgattcggctggcagtggcgcatggtccggggcaccggctttgcggacttcgatggtttcgatgcggcggccatccaccttggtgacgaccatgttgtagccgtcgtcggaatgcagcacgtcgcccaccgcacccatcttgccggtcttggacaggaagtagccggcgaccgtctcgtacgggccgtcctccaattcgatgccggtcagatcggcgaagtcctcaatggtcatgctggcctcgatcgtggccacaccattgacgaacgcggtgcgggtggtgcgttcgccgcccttctcgctgggcagatcgtactcatcgcgaatatcgcccacaagctcctcggtcatatcctcaagcgtcacgatgccgtccgtgcctccgtactcgtcgatgaccacggccagatggatgccgcgcttacgcagcagttccaggctcggcagcagcttggaggtgccgggcagggagatgccttcgcgcaccacatcgcgcacgatcttggcgttcggatcgcgcacgtccagtagatcgcgcacatgcacgaagccgatcacgtcgtcgaaatccttgccggtcaccgggtaacgggagtacggctggtcgcgtacgaacgcggcggcctcggccaagggctggtcgccctcgatgaagaccacgtcggcacgcgggcgcatcacctcggcgacgatggtttcggacgcgtcgaacacatcgtccagaatcgtgcgttcgtccttggaaaggttggtgttggagctgaccagcacgcgcagctcgtcgtcggacacctcggactcggtctgctgcgggtcgaagccgagcaggcggacgatgccgttcgtgttcttgccgatgagccagatgatcgggcggcagacggcggcgaaggcgtcgatggcgggcaccacggcgcgcgcgatctgctcggtgcgctgcatggcgatgcgcttgggcaccatctcggagatcacgatggagcagtaggagatgatgagggtcaggatgatgttcaccaggccgccggcgatgccggggtgcacgccccagctttcgaccaccggaatcaggtagggggcgatggaggaggcaccgaacgaggcggacaggaagccggagagcgtcacgccgatttgcacggtggagaggaaggtgttcgggtcacgtgcgattttggcgactttggcgccgcgagcgtcctcctgctccatttgctcgatctgcgagccgcgcagagagaccaatgccaactcggtgccggagaacacggaaccgataacgagaaatacaaaaatcaggaggatgttcaaaccaagtgacatggcttcaactctaggggagcggcacgtcaaattggggtgtgctggctgggcagtaagaaactcggcaaggggaagggcattctcatcactatcgatgagacgcaagcggcctcgcatgatgatttggttgccattgctacagccgtgcagcacgtcattacggatgccgatgaaagtgatacgcctgatgaggataagaagggcgttgccatcgtgtttgctggcttgccgtatatggtcaacgatttgctggataacgaggtaaccacattcctgcgccgtgcgctacgccgcgaattggataacgtgccgcttccagacgtcaagaatgcgttcctgaaaacagttgcggattccggcaagaccatcagtggggaagatgcgcttgaagccgctcgccagtctgaaggatacccgtacatggtgcagcttgttggctactacatgtggcaatccgcacaacgtcgaggttcaaatgtcattaccgcggacgacgtgtcgaccggtgtttccgatgcgctgctcgccttcgacgattcaaggacaaactcatccgcccggcaggtcatgggcagctggaatttgcggtgccgcatttggggcagtatttgcagtcgttgtagcaccaaatatagggctgggttcattcatttggtaggttgcgcgttcatttggtgggttgtcggcatggtgaggcgttggaatggcggcatttcaatggtcagtgttggagtgcagtgaccaaatgaacgcataattgacctaatgaatgaagtaagccggttgcgggctagtttcgatccagttctatgagcgccgacgcatcttggccacggcattgctgacgcaaatacgcagcacaatggtgaagacgactaccataatccccagaatgccaatgttgaaccagaactgatccgtggtgtgctcccacagatcatcctttttgaacatcggcaccttggtggggccatacagcagatcgttgagcccgatatccgaggcggcggcggagaagccccaacgtccggggaagatcatgctgaccagctcgaggctgtcgcggccggtgaccggaatcatgccgccggagaacaccaactgggccatgaccagcaccaccagcaatggcatcgtctgttctcccgacttcaccaacgccgagccgacttcgcccaacaatgcggaagtccacgcagtcagccaaatcgccaacaccagttcgggtatgccggaatcagtgaccacaccatggtccgggccgggcttgccgaggctgaccgcagtggtcagaatcgccgcctgcaacaaggtctgcaaacccatcacgatgagtttcgaggcggtgtatgacgtgggcgacaaacccaccgcgcgctcgcggccgtaaatcgctcgctcggagacgatgtctcgcacggacaaagccgatcccataaaacaggcacccagtatgacgagcacaagcagctggttcggctcggtggcggcgtctttgaaatcgggctcacccaagccatgagaaccgggcacaaccagcgacagcagtcctaggagcaatggcagcaacagcaggaagatcagcaatccggggtcggcgatgatcaaatgcagctgacgaatcaccagagtgatggtctgtttgatgcggaatggctttgccggtttctcatgctcggtgtgccgcgtgatggtggactcggcctgcatggtgcgctggcgtgaatcagtaatcgaatacacccgttccggagattcggcgacatcgttgaagatgtcggcccattccttgccgttgaacgcctggctcatctcctgcacggtgccgaagaatgccggatggccgccgggagcgagcatgagcacgttatcgcacaacttgttgatatacgacagtgaatgggtgactacgataaccacgcggccggcatccgccagttggcgcaacatggtcatcaccgtaagatccagcgccgggtcgaggcccgaggtcggttcgtcgagaatcagcagttcgggttcggtgagtagctcgatagcggtggacacgcgcttgcgttggccgccggacagtctgtcaatgcgattcttacggcgagacgtgagttccagctcattgagcacgttgtcgatgatttcggcgcgctcggccttggttgagccgggcaggcgcagcttggcggcgtattcgagcgccgcgtccacagagagcttgcggtgcaccacgtcgtcctgcggcacgaatccgatacggctgcgcaacagttcgatgttctgatgcacgtcgtatccatcaaacagcacgcgcccgtccgtggggctgttgagcccggcgacgatggaggtgaatgttgatttgccggcgccggaaggtccgattacggcggtgagcgtgcccttggcgaatacggcgttgatgccgtcaagcagccgggtgcctttgcccacggtcagtccgatgttttcggcgataaccgcgtcgttgctgacaaacggcgtgcggtcgcacagcacgccttcatgcacgatcaggtcggtgttgccgacggtgacgacgtcgtcttcccgcagccagatcttcgcgacgcggcggccgttgacgtaagtgccgttggcggagttcaggtcagtgagcaggatgccgctgctggtggtttccagcgagcagtgtttgcgggagaccagataatcgttgatgcgaatcaggcaggcggtatcgcggccgatgacgcctgtggtgtcgtgctcggggctgaaggacccgtgcacgcggttggtggtgagttgggattcgagccttaccgcttgcgtgctgcctgccagaacggtgccggcggcattcgatggggaaggggatgcgcagggagacggagatggtgatgcgggtgataccggcactggcgatactgccgtcggtgccactgctgttgggcggggttgctgttgcaggtgcgcgagggccggggatacgcggtgcggggccagcggggctggcgttggttgcggttgtaccggttgtgccggttgcggtgctggtggtgtgggttgcactactgggcgtgcctgttgcggcgcgagttgcgtgggttgtgccggttgcgctgatggtgccggcggtagcgcaggctgggccacgtttgccgcagggcgtcgcgggggctgtgccggcgtggacggcccgctggttccgacgatgcagacgatggtggcaccttgtgccagcgtcactttggtgctgttcagcagcagtacggaagtggtgtgaatgccgttgatggacagtccgtttgcactacccgtgtcttccaagagccaaccatcgtcggtaaaggtgacgcgagcatgatggtgagatacgtacgggttgtgaatcaccagatcgcaatccggcgcacgcccgatggtcgtggcacgtgcaggattgggggtataggtggcggatccgtagtgaatagtaagggcaggtggcattggttcagacttccgtgttcttcgatctctctgcacacagatgtaccacgaccgcattacccccggtgaacggggtctgactgatggtcagaaactcagcacctcgaccttgccggtgtcgagctggtaacgggcgccgacgatcatcagctggtcggcagccaatgcctgctgaatgatgggggattgttccaccagcgtctcgatggtgtgggccacgtgtacgcgctcgatgtcttcatgcgcgtcgagctcggcttcgcgcgcctgccagacggacatgccggcctggcgcagaataatcgattcggcggcggcgatgtgctcgtcgaggtcgtccatcgcatccgcggcctccagtgagccgtcggcttcggaagtgatggtgtgcatcaggtcgtccagctcctgctcggcggcctcgattgcgccgcagtgctcgtgaccgagcacacagatcaggctgacgtgcagtttcttgaccgcgtactccagcgaggcgataaccgcgctatcgatgagttgcccggcggtgcgcacggtgaacagatcgcccaagccctgatcaaaaatgatttccggaggcacgcgcgagtccgagcaggagagcaccgcggcatccgggttctggccatcaagcagcgtctggcgggtctcctgatcctgccatggatggtcgggcttgccttcggcgaatcggcgattgccttggagcatacggctccacgtcgcatttgcggtcgattcctgttcaacgtctgcctgagccatgaaaacctccattatcagcggactgctggtacccatagtagcgattggaagtgcggattcgcgactgcatgcataatctggctttgcccaaagcataatgagaacgctcacaatctcaatcctgtttaagggtgggccgtgatgatagtcagcacaagggctgtggctggtgtgataaggctcatatgttctgtccgtgcgagccctgtgccgccacactacgatgggttctggtaatcgcctgaagaatcctgaaaggaccgaaaatgactcttctgcagcatgaactgaccgatttcaaggtgaacgcattccagaacaacgagttccacgaagtgaccaaggacgatgtgctcggccactggtccctgttcttcttctacccggccgacttcaccttcgtgtgccccaccgagcttgaagacctggccaagaactacgccaagttcaaggaaatcggctgcgagatctactccgtctcctgcgacacccacttcgtgcacaaggcctggcacgacgccaacgagaagatcgccaagatcgagtacccgatgcttgccgacccgaccgccctgctggccaaggacctcgacacctacaacgaggccgatggcgtggccgagcgtggcgacttcatcgtgagccccgagggcaaggtcgtggcctacgaggtcatctcctccaacgtgggccgcaacgccgaagagctgctgcgccgcgtgcaggcctcccagttcgtccacgagcacggcgaccaggtctgccccgccaactggacccctggcgaggaaaccatcgagcccagcctcgacctcgtcggccagctgtgatcgacactgaataggcggtaaccttggctcccctctctgaggggagctgtcgctgaaagcgactggggggagtgctcgcgagagctagcctgatccgatatgctcccctcagtctcactacgacagctcccctcagagaggggagccagtgtatgtaagggagttttcatgactcagaccaacaatctctatgacgtcgtcgtcattggtggcgggccggctggcctgacggccggcctgtacctggcccgcgctcgctaccgcgtgctgattctcgaaaaggacgatttcggcggccagatcaccatcaccaacgaagtcgtcaactatccgggcgtgggccgcaccacgggccgcgcactcacccagaccatgcgccagcaggctcaggacttcggtgccgaattcctctccgccgaagccaccggtctcgacgtggatggtgacatcaaaaccgtgcacacctcacgcggcgacctcaagaccttcggcatcctcatcgccaccggcgccagcccgcgcaagctgggcttcgagggcgaggccgagtacgccggccgcggcgtggcctactgcgccacctgcgacggcgagttcttcaccggcaaggaagtactggtggtcggcggcggattcgccgcggccgaggaatccgtgttcctgaccaaatacgcctccaaagtcaccgtgctcgtgcgcgaaccggacttcacctgcgatgccgcagtggccgccgaagccaagaacaacccgaagatcgacgtgcgttatcaggtcgagctgaagggcgtcaccgccggccaaggcggcctgcgagaagcctcgatcctgaaccttgccaccggccagaccgaaacgtggaagcccgccgacgccggcaccttcggcatcttcgtgttcgccggctatgtgcccgccaccgatttggtgcgcggcgtggtagagctcgacgaccacggttacgtggtcacgcacgactacctcagaacctcggtgccgggcgtgtacgcggccggcgatctgcgcgtcaagaacctgcgccaagtggtcaccgccaccgccgacggtgcgattgccgccgtggaactggagcgttacgccaagcagatgagcgagaaaaccggcttggtgccgccgcgtcccactgcttccgcttatgaggagtccgaggccaaggccgcctccgccgcctcggccgctggcacgacgcccgccccggctcccgccaaacgcagcgccgatgccgatgccgcagccagcgccgccaagaagcccggcgaactgttctccgccgccgtcaagcagcagcttggcgtggtcttcggacgcatgacccgcccggtcacgctcgctctcgagctggacggcactccgctttcggcggaattgcagggtttcatcggcgagatggtcgcgttgtcgaatggcaagctgaactcggttgccgttgatgccgcagggctgatcacggcggtggatggtgcttctgtgcctacttctttggtggttggcgagccattggccgtcaccttgccggacggcaccgaactgcccacttatggttcgttggatgattccggccgtgccacgttcgacgtcgccggcgtcctgccgctcgcccgtccgactgtgcgcatctgcgtgccggctgagggcgacggcaaggccggcaaggacggcaatggttcactggtcttcaccggtctggccttccacggcgtaccttccggccacgagttcaactcgttcgtgcttggcctgtacaacgcggccggtcccggccagccgctgggcgatgacctggtcgaacgcgcgaagtccatcacggacccgctgaacatcatgatcctcgtctcgctcacctgcacgatgtgcccggaaaccgtgcttgcttcccagcgcattgcctccctgagcccggccgtgcgcgccgaagcctacgacgtctcgcacttccctgaacttaaggaccagtacggcgcgatgagcgtgccctgcatcgtcatcacccacgccgacggcacccagcaagtcgaattcggcaaaaagagcatcccccaaatgctcgaactggtcggcgcgtaagccgcacgacctcaggtactcaacagcaacaacaacgattctgccaaaatcgtgacgtacatcgattgatgcgatcgatgcgcccgactccggcagaatcgttgttttgcggcagctcagcctcggtcttcgacggccttcgtgacgtttctgtcgccgaggtacttgaccaggctgatgctgatcagggccacaacgaacaggccggtgagcaccgggatgagtgcggcgtagcggtgggcctgatcaggcgcgtgggcaactacgaacgaggccaactggttgccggacagaccggcgaacgcccaggcgctcagcgtcagaccgtgcgtggtggagacggttttggtgccgaagtgctgatcaagcagcacgggcagcgtcgagaaaccgccaccatagcccgcgttgacgaggaacagcatggccagcacggcccacagcagagcgttgtcgatgctgttggtgaagatctgcagcaagcacacggcaatcgacatgatgaagattacctgatagacggtctcgcggcgcttcaggtggtcggagagtgtggagaagcccacgcggccagccgtgttgaacacggagtccacggcgagcaccagtccgatgatgccggagatggcggcggcaaacttggcggggctcaggttggcatactgcgggaaggccttgagcacatcgtgcaggatgtccttctcttggctgatgagggccaggccgcaggtgatgttgatatagaaggctatccagatgccccagaacacgggcttcttgaggattgtcttgcggctgacgtgtgaggtcgcgggatcgtacacccagccggccggacgcttgatgagcaggaagccgacgaacatcatcaccgcgtagaccgcggcgaggatgaagaacatgctgaccaggccaaccgtgccgatgagatattccatcagtgggctggcaatggccttggccaggccgaagccggcgacggcgatgccggtggcgaggcccttgttgtcggcgaaccaaagcatcaggttcttgaccggagtcagataaccgacgcccaggccgatgcccatgatcgcgccataacagatgaacacgcccggcaggaagttcagggcgatgctcacgcccgtgccggcgaagccgaccacgaagcagaccatggagacgagtgcggatttcttgatgtttttctccaccattggcccggcaaacgcggcggacatgccgaggaagaagatggcgagtgagaagccccattccacggaggcggggctggcgtggagacggtcagcgataagctgcttgaacacgctccagcaatagacggtaccgattgggatatgaatcagcagtgcgggaataatcgcgctggtccaacgattctcggtaaaccttgccatatatggacggatcctttcgtaactggtgtacgatgacctgccgacccgaacgagagtcgcatcgcccatatccacgcacatcacgacggcatgcccccgtgaaccatccgggctgcacgaatcgaatcaaatcgaatcgcgcgaactgcgaacaattcgctaaacatccttggtgtgcatttcatcggcgctgctggctcttgtcgacgccgacaaacagaactataacgctgttatggggttgctgtggctggtttctgtggtcggaagctatgagctttctcacatcgaaaacagttatatgacggtatcggcgtgattgatacgtgacgtctgcccgtggacgcggcatatccctctcggaaaacaatgactccgtcatgtccatttcttggtttgacatgttttcgtttgcagcgtcggtgctcaccacggtgaccgcggcgttcgagtcgccgggcagggcctcgaccgagggtctcatcctcggctgagatgtgggcggtactatggattcttatcgataaggttcgtgatatgcggagatggtaacgatggtgaccttaaaggatgtcggcgaactggccggagtgaccgccaccaccgcctccgcggccctgcgaggcaaggattacgtcaagcccgaaaccacgcaacgcgtgtgtgacgccgcccgcaaactcggctacaaaatcaacctgtctggccggtccctgcgttctgggcggtccgataccatcaccttccttacctcgggcctcgagggcgactatttctcccatctggccatgtgtgtggctgaggaagtgcacaagcgcgactcgcacatgctcatcgaactgtcccggtatcttaccgacgacaacgatctgtcgtacacgttttcggacggcatcatcgccatcaatgcgccacgtgcggtcgatatcctgaagcggcacccggccgtcatgctggaaaactacgacaccagcctgcccatcgacaccgtgaacgcgccgagcgacgccggctcgcgggcggcaatcgaacaccttatcgcgcgtggctgtgcgcgcatcggcatcgtcggcgacaatcacgatcccaacaatcccaacatcattcccggctcgcgtgatattcgtatgcgggccgccaaggagacgattctcgcggccggactgccgtttgacgagcgccgtgatttcatcaaatcctcgtggtcgattgacggcggtatcgaggccgggcgcggcttggccaagaaaggcaagtgcaagtacgacggtctgtactgcctgaacgacggtattgcgctcggtattctgcgtggtctggcggacgatggcgtaagtgtgccgggcgatgtgcgcgttatcggcttcgacggcctgagccagagcatgtacagcgtgccgactttgaccaccgtggccaccgatttcaagggcatggcggataccgcgctgaccttgcttatgcggcgtatcgagaacctggacgacgagttcttcccgcagaccgtgaatgtgggctataagctcatcgagcgcgaatccactgcggcgtagagtctttggccgtgttgagcttcaattgggtgattggactggcaccagcggctgatatcagatatgccgaaagcagcgatgatcggatttaagttgctggagatgacaggatggattgctctttacccctttcaccatcttgcaataattcttacatgtaagaactctctgttaacatgtaagaattattgcaagatggtgaaaggggatgctcatgttgccggccaaagaaagtttgacggttgagttcaagagtgagcagaagcgccctcaatcgcatgatgaaattgttgacaacgtagtggctctagccaataccgaaggcggcacactgtatctcggtattgaagacgatggcactgtgaccggcgtatgtgacgagcatcgcaatatcaatggacttgcggtactaattttcaataagactgttccgcagcttcccgctcgcgtggcgctcttgtatgagaacgaggtgccgatagtcagtattgaggtggataacagtcagcaaatcgtatctaccagtcaggggaagacattgcagcgccggctgaaagcagacggctcgcctgaggtcgttccgctgtttgtttcccaattcattagccgtttatctcagcaacggttctacgatttcagcgcgcaacctgcaccagaggctcggttggacgatttgaatccagactcacggaacaagttgagaagccatattcgcagtgccaatgcgcaaaactcgttgttgtcttttactgatgaggatttcgatcgggcacttgagctggttgttgatggcccgtatggattgcagccatctgttgctggtctgctcaccattggttcggttgatgctattcatcgatcggttccagccgcatcggctgtttttcaagtgatgaaaggcatgtctccaaaggtcaatatggatccgttcgtgttgcctttggtggatatgtttgatcgtgtaggcgagctgatggagccatggaatcccagccacgaagtcatgagcggcttgattcgtgtcgatctgccagacttcgatcgaggggcattccgtgaggcaatgattaacgctttttgccatcgcgattatgcacgaatgggttcggtgagattcctggttgatgatgatgggttgaccatagctaatcccggaggattcatagagggtgtttccgaagataacctgcttactgcacaaccgcgttcccgcaatccgcagcttgccctgattctgaaagctgccggatatgttgaacgcaccggacgaggcgtggataccatctatgccgggtcggttgcggcgggcggttctttcccggattattcacagtccagtgctgaggaagttatcttgttcttgcgccgtgtggtacctgacgaggcattcgtgaccatgattggcgacgaggaacgtcgacgtggggctccattgccggtctggtcactgattgtgctctcgctgctgcgtgagcatcgtaggcttaccgtggtccaattgtgcgatttttctcatttggagcatcgacgcatcgtgtccgctgttgagaatctggtggaagctggtttggtagagggggtcggtagcgggagctctcgttcgtatatgctgagtgcccgagtgtataaacgttcagaggggctggcgtcttacgtgcgccagcgtgacatcgatgccacccggcgcagtggccttgttctggagttcgccgaaaaaaatgatggtgtcgtcactacggcggatgtcatggatttgtttggcctgagctatatcagtgcataccggttgttgaagaagctagaggatgcgggcaagttgcgccgcgaggggaatgggccgtcatcccgatacgtgttgggatgattggcgcgcgtgaaagtaagttctttcatcacctttcaataattctttcatgtaagaactctctgtttacatgtaagaattattgcaagatggtgaaagatgtacacaaaacggggaagccccgctcacatcgagcggggcttccccatatgcgctggtgtgtagatcagcctgtgttctgcaggccggcagcaacgccggagacggtgcacaggatgaggtagatgaatcctgcctgctggctttgcgtgttttgcttcaatttttcttaagcagagtgagacccatcgtatcgttcgattctacgacgaacgttttgcatcaagcgcagataatgtggtgagtgcatattcaacaatggcggacggtcttgatgcacttggtttgacaaatattggaatgagcgaaagcatcctaaaaaaggctgccggtacagacaagcttcctgataagcaggaagctgaagtgagtgctcgggcgttcgctgcattcattgatcagccaagacggtagctcgcataatgcattatgtgtgggcagatgtgtcgtctgcccacacattcgctgttgtgctttcgatttggaattcctctgccagatacggggaaacttctaaaaggccgctatgccgaggaagagtcctgtaataccggtggccatcaatacgatgatggtgatgattccggcgaagatgcgtacaggaagggtttcttttccatggtttgatgggctgtccgcaactaatctcattactccagctgtaacccagcaaactgcgcccaggactagtgccaggaattctcgacaccattccgtttcaagtgcgggaatgccgacgattgatgacgggtcgcttgccagtcttggcggaatagcgcataggatacgctccaatatcaggtaaggggtatcaaaatggatcagagtcaaagcgaatgggagctgtagcgccagtcctatccaccacagcgtgcgtcggatggtcgcgagtctgtcgcccggcctagtgtccggcttgccgccttcgccctccgtcccggcaccgtccgcgggcgtgtggtccccctcgtgcgcgtccgtcgttccgtccgtgtccttctcctcattcatatgtcccctttcgatcatccgagtctgtcactcggccagcgcgcccgttctatgcgcgccgtcgccggccagtctagggccgtgcgacgcgaacggggaggcccgcgtcgcttatcggcacggaacctccccgctcgcttttgtcgatcggtcggccgggaatcagcccgtgttctgcaggccggcggcgacacccgagcaggagtgtcacaaagcccctgccgctctgggtacccaggtggcggtttatgaggacagcatcggtcaactcatcctgcagtggcttcgcaaacctgagtactggtcggaaggtagttccggcacgcaggcactatggcacgcgtacacacctgagccggttactcccagtgaattggccttgtcgcgtcaggcatgcggtgtcgcatgtgatgcacagcctgtcatcaaaggcacgctgcccaatcgggacatcgcccatatggccgccacatccttgggatacttgacatggggcgttacgaacgatccaatggactatggtctcggtgatctgggcggatgggccctggatttgttgcagatttggggaagctacctggcgaatgccccggaagaggacctggcgtcatggctgcacgctcatctcggcgagcaagacgcccgtatgggattcagttacagcgatgttctcgcggactgtgatgcatggttgctggcgcggtccatgcagagcgattcctccgaaaggtctttgtccaccgctatgcgggac

SEQ ID NO: 319 - DNA, 68700 bp, Unknown
  R42_10m  MAG No. k141_3866
agccgactcatgcggccgttgccgtcattgaacggatgtatgcaggtgaaatcgagaatgaacatggcgatggcaagcaatggatcggtatgtccatctcggattgcttgcgtgtaggcggaacacgcgcgttcgatcagtattcgatgtagtcgaatgatctcatactgcctcattttctgcatcatacgaacttttctgcatcatattttatcaaaatgaggtagaaaatgggctgatgaggcagaaaaggcggcaggatggtggccatctcgcttgccggttgcgctactttcccgggaatgttgcgctcgtggcaagagacggcaagttcaggcggccgagattggcgatacccgtcgtgtagtcgaacgtcttaccggactgccttacgagcgttgctgacggtagcctacgctgagaaacagcttacactgagaaaccatgagcaagcaccaccatcgcgaccgtagctgggccccggcacctgaagcattgccggacgacgcccagaccatcgacaaccacactcacgtggcctccgtaatccctttcgcgcgcgctatgagccatgaggcgcaggagaaggggcagcccgaagtcccggtgtacgacgtcgaccaattgctggcgcaggcgcaatctgtcggcattgggggtatcatcgactgcggttgcgagctgccgcacctgatgaccgccgtccagatggccctcgatcatccaggtaacgtgcacgcggcgctcgcaatacaccccaatgagtccgtgctccacgggcatcgcggtgtgccggggccggatggtctgcctctcaaatacaagccttaccatgacacgtctttcgaggacgcgctcgccgaagtacatcgcctcgccaccacataccccgagcaagtggtggctatcggcgagaccggcatggacctcttccgcaccggcgaaggtgccaaggaactgcagcgcgaggctttccgcgcgcatattgccctggccaaggaactgggcctgcccatgcagattcacgaccgcgactcccatcgcgaggtcatcgaaaccctgctggccgacggcgcgcccgaacgcaccgtattccactcgtattccggcgaccgtgagatggccgagattgcgcgcgaacatggctggtatctgagcttctccggcaccgtgagctacaagggcaatgacggtatccgcgaatcgctacggattgtgggtctgggccatgcgatggtcgaaaccgacgcgccgtatctgacgcccatgccgtaccgtggccgcaccaacgcgccgtacatgatcccctacaccttgcgggccatggccgatacgctcgacctgtccatcgcggatgtggcgcgcggcacccgcgataccgcccgcgccgtatacggactgtgagggccgggtgtgcggccgtcgcggcgatgtgttgacttgtaaaatttgtcagaattgtgaacgaggtctaccatgatgtacctgacataagcgagggggatgatctccacctcaatggaggactgaacgtatggctgagtcgaaccaaaggaccgcacgcgcccaaaaagcctcaaaggcccagacagcccaggctggcgccgccaaagccaaggcccgacaggaagaagaagcactgctgagggccgacacctttaccaacgctcccaaggtgtcccgccgcactctcaccaaggaggagcgcgaggcactcgccaagcagagggaagccgaaaccaaggaagccgagaaaatcgccagcgcatggtcgaaaggcggcctcggccgatggtgggcccgcttgcaatccagcccagacaaggttacctggggcatggcgatcgtggcgctcggcgtggtgtacggcgacatcggcacctcgcccctctacaccgcgcagaccttccttgccggtcagggagggcttggcagcgtaaaccgagaggccgtgctcggcatgctgtcgctggtcttctggtcgattacgctgatcaccaccgtcaaatatgtgctcatcgccatgcgcatcgacaacaatggcgaaggcggcatcttcgcactgtactcgttgattcgcaagtacggcgcatggctcgcgattcccgccatgctcggcggcgcggcattccttgcggattcggtacttaccccggcggtttccatcagttccgcagtcgaaggcttgcagaccctgccgccattggaagggttgttcgacgaaaacccaagcctgaccctgatgattaccgtcgtgatcatcgtgattctcttctccgtgcagtcgcgcggcaccgaaagcatcggcaaagtattcggctcgatggtgctggtctggttcagcttcctcgccatcgtaggcgtcacgaatctctctaacgactggtctgtgttcgcggccctgaacccggtgtacggcatcaaattcctgttcagcccggacaatgctgccggcatcgccctgatgggcaccgtgttcctctcgaccaccggtgccgaggcgctgtactccgacatgggccacgtggggcgcggcaacatctacttcacctggccattcatcaaggttgcgctggtgctcaactacttcggccaaggcgcgtggatgttggccaatagcgataacccgcaatacaccgcgatgaagtcgctcaacccgttcttccagatgatgaccccgaacgtgcggtacctggccgtgattctgtctgtttcggccggcgtgatcgcctcccaggccctgatcacgggcgcgttcaccatggtttccgaggccacccgcctcaactggatgccccatctgcaggtgcgttacccggcccgtacgcgcggccagctgtacattccggtggtcaacggcgtgttgtgcgtggccacgctcgccgtgctcgccatcttcaaggattccgaacacatctccgccgcgtacggcctggcgttgaccattacgatgatcaccaccaccgtgttgctcggcgtctacttatggcattccggcaagcgggtcggtgccatcgtgttcaccgtgctgttcttggcgattcaggctatgttcttcatcgcgtctatggccaaattcctgcacggtggttggttcaccatgttgctgaccgccgcgattctgttcgtcatgtacacgtggaatgagggcaccaagctcgaacgtgcgcaacgccgtcacatgcggcccaacgacttcctacccgcgctcgacaagctgcacggtgatttccgcatcccgtattttgcggacaacatcgtgtacctgacctccgactcggaaaccaagcgactcgacacggacatcttcttctccatcttcgccgaccaccccaagcgtgcccgtgcttggtgggcagtcagcgtggaaaccaccgacgagccgttcacccgtgaatactcggtggaggacttcggcacgaactacatctaccgcgtgcgcttccgtttgggcttcaaggtttcgcagtccatcccggcgtacatccaccagatcatgcacgacctgtccaaaaccggcgaactgcctaagcagaagtcgatttaccccaaggtcgacgccgatccggacatcggcaccatccgttacgtgctgattcacaaggccctgatgccggaatccaaggtttccgcacgcggtgccctgtcgttgcaagccaagtacgcaatccgccgcatggccggctcgccggttaagtggttcggtctggcaccttacaacccgctggtcgaggtgcagccgctgttcgtctccacccgccgcccaccgcgtctgaagcgcaccgatacggccaagaccatcacgacgcccacgccgactcgtgcagtggccgacccggccgccgtccccgacccgatggacaccacgtccgggcttgggcgattggtacaggagctcgatgccgccgtatcggccgaggagcggaagatcgctgagaccgctgccgccgctgcggtcgctgagcagggcgataagggcaaggccaagaacggcaaacccgccgccaagcctcagcgctccgccaaacagaagcgataacataccagtttgcagcggcgctgatgcgctctataaagaatggctataacggtcgccgcacgtcgccgcacggtttcggtaagttgaaataccatgtgcagattactgggatacgcgacggcaggtttcaacctgagtctcaacgccgtgttggggcaagacaatgtcgaggatttccgtgaactgtctgaaatccacaatgatggctggggtgtagcccagctttccgatcccgccgaagcgccgcacgtgcgcgacggcggcgcacccactccggaaaccggcacccgaatctacaagtcgaccatcgcggcccgtcatgacagcacgtttgagacgctggccgacgaaccgtctcgcggtgccatctggcacctgcgcttggcaagctccaatctgccgctcatcatggagaaccagcacccgttctatgcgaacggcctgagcttcatccacaacggcgatatctcggacgccaatggccgcaacatcgtcaccaaccgctcatacccggtgaaccacagcgtgctcctctccaccggcggccgttccgactccgctatcttcttcgcggtgattctggaatacatcggtttcggctttccgctcgacgaggccgtggcccaggccgtgcgcgaactgcgccaagcctacccgaagtccagctacaactgcatgattcagtccgaggaccagctcatcgccctgtgcgccgccggtcgtgagaagaccagcccgcgcatcgtggaaatctacgatgagtatggccgtggcgagcaggccgccgactaccgtgtgatgcgctaccgtgagctgcgcgacgacaacggcgactccgccggtgtggtggtctcctcttccggctatgagcaggaaggctggaacgtgctggagaacgaccagatgatcatcgcctccaaccgcaacggcacctaccgtctccgttccatctgaaatagcttcataagctccctctgacgagggggccttgagcctcaaatcatccgcatcccatacttctccgccaacgccggaatatccggcacgccatacttggccaccagatccagccatcgttgtttgttctctccgccaaatcgctcggctcgggccgtatacgcctcgacctgcaggaacttcggcggcactgacttgctatggaacttgtcggcgtacatcaccacttcctgctcgagattcatcggcacatagtcggctggtggcaatggcagctcctggcgcaccacatcctcgcgcgtaagtcccacgccggtatggttgcggcagaactgggcgatggactcgtccacgccctcgtcgagcagatactcgtagcccttaagaccgtgcagaatgtagcgtttcttgctgaatttgagcggttcgtcgtcagagccgtcatgcttgaacacgcggtaggtgccgatgtcatgcagcagtccgccgatgagtactaaatgctcgtcgagcagacgcggcggcacatggccgccggtgacgcctgcggtgggcggtacctccgcgtccttcggtaatgtgcagcggcgcgtgaacagcgcgttctgccggcgcacgatctggcagccgatggtcgctacaatcacgcaatgcgtgtgcaccagctcgtacgccgccttggacggcgcgattttgcggtgcaactcgtcgatctgctccagtgtgggaatatatccggtcatgattatcaggtttcgcctcgtacggtcagatttatcctcagattagcgcggcaatgagccgcatcaggattgtcaggagctgattcggacatctcgacatgcctatctccgtttcaaggggctgattcggcatcctcctgaggtctacttccgtttcaaggggctggtgcccaagtatacgcggcgtaaaaacggcggaatgacgttggcatgaagccgtttatactcggggtttggcggatgaccagccccttgaaacggaagtagacctcccggaacacgcaaatcagcccctcgaaatcgaaaaagctcacgatgtttggtatgtatccgaacatcgtgagcttcaagagcctgtgctggtgtgtctggtgtgtattgctgccggacagatcagatcttgaagagtgtgtcggctgcttcggcgatctcgcgtgacgcagtgagcacgataacgcaatgcttcgggtcaccggtgtgcgccagcttggccagcgcggcgaacacggtcacctcgtcatccgcgttcagccctcgtgtcggctcgtcgaggatcagcacttcggcctcggtgctgattgcacgggcgatggccaccaaacgctgctgcaccaaaggcaacgtgccgacggccacgccgctggtggcctcggagaagccgaccttggccagcagttcgcgggcgatcaccggcttgggcttcaggaagttgcggttggacgcattcatggcgtacagcacgttttgttcggcgtcgagattcggttgcacggcgtgcagctgcggtacgatgcccagacggtggccgcgcagttccacgggctcgagctcaacaatgttggcgctcttgttcatcaccgtgccagacaccggcgtggccaaaccgctcatcacgcccatcagcgcgcgacgtttggcgtcggcggtgatgcccgaatcggggtcgtcgctgatcagcagcgcgtatgcgtgtccggagtagcagaagaaattcgcgccatcgaggatgttgaccttgcccttggggccggcgaccgtcaccttgttcagggcaaaggtcgggtaggtcttgagcagaatgtcgtcggaaccgccgcccaccaacacgcgatcgatacgcgaggccagcgtcatggtgggttcggccgctttgccctgaggctccgcatgctcggccaatgcgtctttgtgatcggttttggccagtcggagtgtttcgttgacgcgggcggcattgcgctcggtcacttcggcggatgcgttgaccgaagcgatggcgtctgcttcggcctcactggtctcgtcggtttctccggtttcggcagatgccagtgcgctgtaaataccatcgtcaacagtgctttcgtcatcaacgtcatcgaaggtcacgctgaactgcacggagtcagctggaacggattcaatggcgtcgttcgtctcagtctcagaagtcacttcgtcagccgttgcgtcagtggtcttctcgagttcctgatcgttgttcttgtcgctcatgcctgtgcctccgcatcgtcggttgtggtggtcgtcttattggcctcgccggcatcatgagcggtggcctcagcagcttcatcggtctcggcagcgccagtggtttcggccgtttcaatcgcctcagcctcgctcacggtgccccagtcgccatcggcggcgaacagcttgttcgcgctgaagaacgcaaggcgcagggcggcaagaatcgccaggatcaggattgaacccaggccataccagaccatggtccaaatcaggtccgatgtcaccgggatggtatggccggatgccagagcaggtccgatcggcttggcggcgaacgcgcctccgaccagaccaattacgtagaagggcagggtgacgatgaacacttccagcatgaattgccatcccaaacgcccgcgagtgacgccggacaccagtgccatgccgatctcgtcgtcacgcttgggtgcccacacgcctgacagcacgaggatgagcaacagcacgccgcccacggcaaccaacgcaatggtgccggtcttcgcgcgcgaggatagcgtatccagcggctccagagaagcgttgtaggattccagcgaaggggaagacacctcgtatcccttggcgggcagcttggacttcttgagggtggataccaaggacttgtatgtagcgggaccaccggtgtcgaacaccacgtccagatccggcaccgcccagccggaggcggtcttgtcgttggactgtgggtcgagtccggccttggcgaaggtctgatagttggtgaagatcgcgttctcgcggttgcgggcggccgtcaccggattggcgacggcggattcggatgtgtacttgtagatgccgcgcaccttgagctcggccgtggtctgggcgtccgaggcggccgccaccttgagcgtatcgcccaccttcaggttgttggcggaggcaaacgcttcagagaccagtgcgccggtggtgttcggtttggaggacttgttgtcgtagctcaggtccttgccgtccacgatttcgaaggtaccgaggtcgctggccttggcggcatcctcggtccagaaggctcgccaaatgagctggccgccggtctcatcatcggaggccgagcccagcgatccgccgtccagggccttcaaatcaccgctcacgcgggccggcacggtttcggtaaccgtaaagttcaacgagttggtggccgactggacgagcgtggcgtattcggtgtatgaggtccacgtcatgtaatgcttggtggaagccgagtccgtagcggagaccttcttccacgtagccgcagtcgggcgaatggccaacgtggccttctgctgatcgtacgcggtggtgtgtgcgttggtatcttcttgaatgatggccagtccggcgactgtgccgaaggtgaccgccaaggtgatgaacgcggtcagggccgtacgtcctttagaacgtgtcagggcccgccaggcgttgctgaggacgaacatgtaattacctctcccgttctcctaagccgaacagatcaatacggctttaactattgttgcgtttagtgaccgttttcttgcgcaatactgttatacccctcaatgaagtctgagaacattctgacagcgatgtggtggtcatgaggggatttgcacccggtatgggataaaccctcggtctatttcggtggcatcggtacactggcatgagatatgcgtggcgtcacgtgtgctccggcatgtctgcgattccggattcgcccggagtccggcatccggaagcgtggccttgcgccgttggataagagtatgagctgagcagattttcgggtaggataagtatgcgattcacttcagggcattcgagccataaggctgtggggcgtaggagaagccgccatgccggtaacgggaaatccaatcgctccgcatctacgaatagcgctgcaaatcatcagacgggtcccgtaaacctgaagactccccagcacgtgggtggcaacggccgttcgctggtcagccgtacaccgatatgggcgcgagtggtggttgtactgctgctgacgttgctggccagcgtcacctgtgtgggcacgctctacgcggcatccgtctcgagaatggccacggatgcgcagcgtgtgctgacatccgccgaaagtctggccaattcggcacttggctgcggcagcgataagagtctgtcggacatctcccaagagttggtcaatgccaccaatgatctcaacgaggagctgaacggcccgcagtgggacttcttccgcgaccattcgcgatttggcagcgacatcaccgctgcccgcgaaatgctggcttccgtggatacgctggtcaacggtccgttcactgatctgctgaacctgtccaaacgattgcagggcttctccctgaagaatggctcggtggacgtcagcgccctgatggatatgccggatatcgtcaagcaggcgcataaggatatctcgcagcagctcaccaagctcaacaaggtgccgactccgagcgtcgccaaggtggccaccgtgctcgaatccgaaaaggctgcgctcaagaccgtggattcgatgctcagcgaatacgatggcctcattaacttgctaccgcaactgcttggcgaggacggcaagcgcacgtatctggtgatggtgcagaacccggccgagctgcgttcggcgggcggcatggtgggcaccatcgccgcaatcacggcagataagggcacgattaccatcggtgatttcgccaccacttctggttgggacattcctgagaagccaatggatgctacggtgctgaaggagcgccaggtatttggcgacacttttgaccagtacccggccaccacgaccatcgaccccgaattccagcgtgtggcacagatgaacaaatacatgtggctatatcagaaaggcaacgaagacgagaacgtagcgggtgtattgtcattcgatcccgtattcctccaggcattgctgggagccacaggcaaggtcaagctttcggacggccgagtgctggatggcaccaccacggtgccgttcttcgcttcagacctgtacacggattacccggacttcgagcagcagaacaacttcgtttccgaagcggctcaagcaattatgaaccatgtgcttggcaacgcgaatgcttccaccgcatccccgctgttgaaggcaatcagagataccagcgctagcggtcatttcaagctatggatggctgatccggatgagcaggaggcgctgattgccaccggacttatcgacgataaggccagtggcgagttgtctgctgacagtcaggtacctgaaaccggcatctatctttcggagctgcagcaaggcaagcaggattggtatctgaagacctccaccacggtcacaaaaacctgcggcgacgcctcggccagccggaacgccctgtattctggcgtgctggataagcgcatcacgacagccgtgcgtaacacgcagctgggtcagtttacggaagatcagctcggtgacgaatacacggtcaccttcaccatgaagaacacgctgactaaggctaaggccgaatcgttgcctgatttcgttaatggcggctcggagaatccagtgctcggtggcatgttgtaccgcgtggtgcttaccgccccgtacggtggcgaaatcaccgccgtgcaggctgatatagattcatggggtaccaacaccgcgagcctgtatgaccgtcagtacattatgttcaaccagcagtggatcgagcccggaaaagaattgacgattgcctataccgttcgggtcagcagcgatgccacacatccactgaacgtggtaaccacgccggtggtgaatgcggatggcgtcgagacgggctccaacggtaaggtgacggatgagtgcccggccgatacgaacggcgccgatggtgcgaacggcgccgatggtgcgaacggcggcaagaacgacgcgcataagggcgcgtcctccgatccctcggccggcctggacaccttggacaagctgaagagccagatcagctgcccggtcgatctgaagtccctgacgggatccatgtgatgaccatgcccgattccgtttccggcgtcgccgtttccgacgccaccgtttccggcgtcgccggcaggccgcgcgacgtgaactacgatctgctgcgcgtggtggcgatgtgcctggtcatcggcgtccacgtgatcaacaactacatgcccgtcaagatgaccctcgccggcagcgcggaaacggtgcgatccgtgctgttcgcgttgttcatggtctgcaatccgctgttcattatggtgtcgggccggttcaacctgacattcgatgccgaccggccggtgagcacccactcagcgggccgtctgccgggctctggctctgatgccctggcaggcggcggtgccggccaagccgatcccagcagcctcgcgccgtacgtgcgctactactacaaacgttttatctcgctgattgtgccgtatctgctgtacgcgggcggcatgggattcgtcgcctacctggtgatcgatcatcgttcggttggcggcgctgtgtctggaacgttgtttgatatgttttccgggtatgacgattccgtctattggttcgtgttcatgctcgccggtttcgtgctggcgacgccgttcctggccgcgatgatgcgcgcgataggccggtcgggtgcctggctgctgatcggcctggccgccgccgtggccgccgccgagcagatctgcaatcttgccggatacccgttgacgttcctgcagtcgttcccctggcgggggctgctggtctactatctgctcggtttcgtgctggaatactatccgccgtccacgcggatgcggcacggcttgtacgtgtcggcgccgttcgccctggcgtggaccgtcgccacgccgtacctgttcgccggccagcagatccaggtgggccgcacgctcacggtctccttcgcggtggtggtggccgcggtgttcctgttcttccggtacgacgtgcatatcacgtcggcgcggctgcgcagggcgatcacctggctggcggggtactcctacacgatctatctggtgcattcgcccctgtccaaggtgctgatcggcccgcggattcccgcgcccacggacggatggtcgtatgcgggtatcagcgtgttgatgtttggcgctacgctgctcgcggcgctgctatttgcggtgattgccgataccgtggtgctcaagcccgtgcaacgtctgctgcggaacgtcgccctaccgcggaagggccgcctgtagtaggcggtcgttttcactgcccttgcgcgcggtagcgggcctcggtggcctccttggccggcgcccaccagtcgcggtgttccgcataccaatcgatgacgttgcgcagtccgccggcgaagtcggtgtgcatcggcgaccagcccagttcggcgcgcagtttggatgcgtcgatcgcgtaccgtctgtcgtgcccgggcctgtcgtgcacgttctcgccggtgctgatgtggtggaagcgcacgtcgtgtttccgggcggcctccaacagccgcatcgtgccttccatgttcgtgcggatgaacggttccggattggcgatggaattatcgttgtgcgattccgcggcgaagtggacgatggcgtcgtgaccgggcacgatacgctccaacagcgcgacgtcgcagatatcccccacgacaaggtcgacttgcgacggcggcagaccggcgatgttctccggattgccggcgtacgtcaacttgtcgagcacggtgatgtgcacgtgcggatggttccgcgccacgtatcgcacgaagttcgcgccaatgaagccgcatccgccagtcgccagaatattacgcggctcgaatacgccgccgcacgccatgctgttcaccattccagcatgccgtcgcatgccaacggctgcggggttcgggtgtggacgtcgtcttgcacgtattcaccggtactgagtccaaggaaagggctgcggacacagtcccctctccttgttgtgccgtcataccggaatcccaatcacctgttctcgaagatgcgtgcccatgtctccatggaagcgatatcatggcttcggtattgcgcagatagcttcttccagttcctcaggattcggcgtgcaagtcggtacccttcaagcatgtttttacggaaacgcttattgtctcgtttcagccacgccacgccattcccatcagccgtcgtgaccagcgccgaattcacgtgatcaaaagccgaccaagtccaagtggcatcttgtgcaggaatgatgccgtcagggcgaaggactgtattcggatccacatttgaaataaaactcttgatgatgagtttgatggcagagatgtagattctcttcatagttgaagggtgacttctcaagggctcaatttccccagcaggctccgggaacgcctcgatgctgtctgcagcctgggcgtcgggatagttcgcgcggaatttacgtacttcgctgagtttcgtcggcagacaatcaacaaaatattgcgggcctcgaaggatatctttcaacgccatgtggtgcaacgccatggccgaatagataaaacgaagccctaaactgacatcggtgtacagggtctccatcaacatacgagggggacggtttggatatgtcagcagagcggcgatccatcgattgcgctcagtgaagtattcttcccatgagcgagccggatccttgtcgtgccacgcctgatgccacactgccacacctggcagacacacggttgggaaaccggcgttcttggcgcgtaatccgtattcgatatcatcgaatttgataaatgcgggtatcgaaagaccgaccttctcaacaaccgtgattggaatcagacacatccaccaaccattgaaatcctcatcgatacgttggtgacgatcaggggaatcacgaagcggctccatggaaaagtcatggttgtattccaagcctttagatggctgcatccacatcctctgttgattgatccgttcaccttgcgtatatagcatggtgcggttatccaagtggagcatgcctccacccacaagcagtggacgtattgtgtagtcagcgaactgtatcgcacgaagaatcgattccggttcgctgacggcatcgtcatctagcagcaatatgtaatcgctgctaccggccttgaccgtttcatacattcctcgggagaagcccccggaaccccctagattcgattgttgaatatacgtcagctgtgttcccagctttgctgacacctcagcaaagccttcttgatctttcaccagatcgttgccttgatccgtgcagtacacagtgtccaatcgattccgtagcgcggagtcctcggcaatcgttcgtaattggttcatgcaatatgaggcacggttgaatgttgcaatagctatagacatggaagtgccatgacgagcagtgcgattttcgcatgggacagaccatatggcatcagcaattgctaccgttcctccaagcgattccgcatcgaaccagaagtatccgccatccatcagacccgacatcgggatatccatattgatggacattgctgattccgaagctgctacaacgcgctctgcaacagggtagatcagaccccgtccggttgagcggaaaatactgatctttgcgtttccttgaacggaaaccccgaatcgtacagtctttacgccagtccaacgacgccaatatgatgcaggaaacgcattgaagaatgtacagcacgacacatgcccatgattctttagtgcaatcgaggtgcgtcccttgacatcaaattcattacaggaaacctcgttggagacccccgagtttcgaatcattcgttgcaacgtagactggttcatggattcgaatgacacttgacgagtatcgattcgagcatccaaagtggctttcgcgatgtgggggcgagtccagtcgattgcatacaaaggaagagtctgctcggcgtctttggtcgggtatacgactcgcatgaccgtttcccacgcttgtctcaagccagtgtcttccaaagaattattctggatcatgcgtattgtctcctgctgtgagtctctgccgtgctaacgatgatagtccatctcgaataattcgtcgcattccgagcaatcaactgcggtcgcttgagaccacattcggaatctcgatcatcgtgcggctcgattatggatgcagctcatacaggaaagggaacgacaccgctgatcgtgttgtcgttccctttcctatatctgacgtgatgcggttctggattattcgtctgtcctagaatccatcgtctgcgaggtggaagcctcgcattgctcatccttgataaggttaatcgtcattgccgtgtcgttcaataatgcgtactgacgattcttcgaatcacggatggcgaaggaacacgaattgtcatcattggtgaaggcaatcatatcggacggcagcttaggattgctatttggagtacgcaacgaagccaccaatttgaaattgccgttgttgaagatattcaatggcatttcaaagtgtgcgacgcgatgtcccggcttcgtcatcttaagtgtattggcgcctgtatcgtatgatatgccgccacgtttgatgtcgtggagcgcaatggccagatagaatacggtcggttcattgaactcatattcgacatcaaatgtgaatttgtcggagctggtgcatattaacggacaagtcggaataatccgtaatttcggcacgcgcttattaagaccgacggggaagcggctctcgtctttcttttccttctccttgctttctaggttttccagagtgtaacgatctgcgacatcatccttattccctgaagcgatgataacgccatccttaatgagaatcgccttgttgcagtatttcttgaccgcactcatgtcgtgtgtcaccaaaatgacagttttggtgggatcatgtttgacgtgcgcaaagaagtcatcgcatttacgctggaacgcctcatcgccaactgcgagcacctcatcaagtacgaggatatctcccttggcttggatggctacggaaaacgccaaacggacttgcatgccggaagagtaattcttcagcttctggtccatgaactcttcaagctctgcgaattctacgatgtcatcgtacatggcgtcgatttcatcgcgagtgaagccaagcagagcaccgttaagatacacattttcacgaccggtgagttcagggttgaatcccactccaagttcgatgaatggcaccaacttcccgttgacctggatggtgccggagtctggaacgtagattccagagatgagtttcaggagggtggattttccagagccgttacggccgacaatgccaaagaaatcgccttgacgcacttcgaaattaatatcacgaagcacatgctgttctttatagcctttgatgcctttcgcccaattgattaccaactgcttcagcccggtggcctgttccgtgggcagtttaaaatactttcccacatggtttaccgacagcacgacgggagaattggattcattggtggtttcaacggttgaggaatagtcagtcatagagttatccattacataacctccgcgaatttgcggttattctttcggaatacatggatacccagccagaatatgagcagcgcaagagcaacagggatcaatcctgttgccgcatgagcgctaagcgtccaaatagttgactgcgtggccggtgcgataagattgtgccggatatcctgcactgtctgcgcaatcgggtttaacaactgaatctgggcgatgcgcttgccgtaaggttgcaatgcctgattatccatcaccatgttgagcggatagatgacgggcatggcgtaaaacagcacttgcttaaggacatcccacaggtgggcgatgtcgcggaaatacacatacatagcgctcagcagtaaagcgatacccagagataacatatatagttcgatgaagttcagtggtaatagaatcacgcgccatgtaaaccgcacgtgattgaatatcgcgaaaataatcaccaccaccaagttgatggcgtaactgataagcgcgccgatagtggaagacaccaccacaatataattcgggaagtgaatcttacggagcagatcgccgcgatcgactactgaacggagaccaacagaagtggcttcctctatgaactgccaggtgctgatgccaagcagcaacactacaggatatgtaggagtgccatcagacatgcgtaggaatttggcaaacaccacatacatcacgcagaacagcatcaaaggtttgagcaccgaccatgcgatgccgagaaatgagccttggtaacgcagtttgaaatcggtgcgcaccagctctcgaagtaccactatcgaataatggtaacgttttctgagtttttcaatcatacttgtcacgaggccattgtccttactgattgacagcaaaatgtctgcgttgatccgttagcgtgcggattcgccaataggcgtctgcgggaagtcgatctgcggattaaaactacgtgcttccagcaacttgccatatacctggcgctggagcttcttgtccacgttgccttgacgcatgttgttgcgaaccatcgcgcagaagcgaagatacgggtacaggccttcatgatgcaagtggtaggaagcctcattccgggcgccgtagaggaatttccatacgttcttctcgttgatcatgccaaagttcacgcccctgttcacgcccatgtcgtgcagcaccacgctgtcaagcacctgcacgccggggcatgctctggtgatacgcagcgtgtactcggcatcatcgaaccagatgaagtattccttgtacggcaggccgaatgcctccatgacccagcggggaatcaacacggaaacgaaggagcatcggctgaccaagacgatatcgagacccttggctttaaggcggccccaatcccatgtcgggatgggattgttcatctcggaaatggtgccgtcgatgaatttgaccagggaacaggcgaatggcacgtctggtccaagttcggcaaccgcatcgccgtatcccttgaagagcttgtccagagcgtccggttcgggatatccgtcatcatcgaagatccaagcgtaatcacacccgatctcgtacgcccgacgcatgccagcagaaaatccaccagcgccgccctcgttcttctcaagggtcacaatgtcaagctgcaccgaatccgaatacttgaaattggccgcatattccttcaaaaaggaatccgtgccatcggtcgccgcattattcacaatgaccaactgatcgggcaaccgtgtctgtgcttccaaagaagacagaaccttcttcagtttttcaagacgattgaacgtcactacaaccgctgcaattttcgtattctgcattagtggctccactccgtcaacatgttgcggaaatattcgtttgccgactgcaattcagagaatttctccagccgatccttctccgcctcccaaagtttcttcctgttctcttcgctctcgagaactcttcccactatagccgtggcatcatggacgaactgagcggaccctctgcggcataatccctgcggcggcacaagcgtatcctgcgaacccacgttcgaagaaatcacgggaatgcctgcggacaccgcctcaatcgtggtcagagtaatgccttcattcatggacgagacgagcagtatgtccgtctgtgcataggtctgactcaccggcgtggacatggaacaacgttggatgaccgtcccgaggccatatcgttcgatgagccgatcgacgaattcatccatatcgccattgccctgcatgatgaagcgaagcttgccggggaacttcttgttcagttctcgcaccgcgaggatgaaggtctccgggcgtttctgccggacgttgcggcccacgaaactgatggtcaggggtttggagatgtcacgggacttgaacgtcggagtcttgctgtcggcggtaagaccgacaagaggcgcatccaccaccttcttcggatcgatatgatgaacatcctccatccaatgttcaagctggggagagatgacatggtgtatatctatccatttatcgcgggccacggactcactggggtatccgccgtggaaaatgtattccacaatatgcagggaatcgaccacgtgggtttcggggaagtagcgctttacccaccacacgttgtcgtacatccactggcaatgatgaataagcacacccacgatattgaactgttcgaatagcgctcgcagcaacgtggcgtccccgacacgatcctgcaggggcaaagtgagcggcaacaatacggcatcatcaaactcgtgacgtgtaatccaaggttggtggccatcggaatccgtgataatgattggcagcagccccgcctgccgggcgagggtgacggtctccatcgcccaacgttcggccccacctgattgcagccagtgcattgcgatgattacggcttttggcgcatcaggcgcggcctttcccggaacgatctcgacccacggatgatggctgtatccagactcattaactcttgtgatggtagcgggttcgaatggcgcaatggccgttttgccgattcgctcacgttgcactcgttttgcttcgcgcagcatgtcgaagaacgctggcgccttggactcgactttacggtacaagcgagcatgcctgccgacaggtcgattctgctccacatcatcatcggtggcgtcgtcaggagtcaacagcagacagcgaatgttgcgatccacaagttgttcatcacctgcgaaataatgcggtgaaaaataggatttctccttgaccgaggaagtcgcctgaaatactgcaaaaggctccagtccagcctgctccgtcaatacaccattcaacgttgaagtgtcggtcaagcgaggatactgccatttctgacccatgtacaacttatacgtaagcgttcgtcccggctggattagagcattgtagtccactgctccgagtgtcagacggcgttggcgttcactgagcttttcaatcaggcgcgcgccttcttcgtcaatatggaaaaaatgtcgcataactcttatggtagtgaaaggcatgggcagagacccatgcctttcactcgagaacatcatccgggatctggtcgaacgaggcaattccgtcactgctgatgttcggttaccgcattgcatcgctgcggctgaccatcccattgtcgtgattgttgtcggaccgcaaagggcacccattgggagatcggcatcaaccgtttgaccctatgaggcgatagtaatctccatatactgcaatcagaggttctcagtggattcgtgctgcatcggagcggggaataccgactgacgcactctatacggtacgacttgttcagtacagttgattggcttcgcgcttcttctttcgagcgatacgtagcgactcagcagggaacttcgagctagccgttgcggaaaccggggcgggatggtctactgacacattcaagttggcccagccagtgccgaggtccatcaaagatccatgttttatgtcgtagtattcattcccgaatcccatggcgattccccgcgctccggcgcatgcacccagcagatgcatatggaaacgactggagatccaaaccgtgtcggcggcattcgggaaaccataattccatagatggctgaaaggaagaagccatacttcaccgggccattggtccttgaaaagatccagcgaccatgaatcttccggaggaatcgcctcaacgaggaaaatcggctcacttttctctactcccgatagcagtagagaatcgactgcggctttgacggctttcgggttgcgacccacgacatcttgttggaggcatacgaaggcgcgggcagacgcattctgctccaaccagtcagatcccgtgttcgcgatttccagaaacgcatcatcaaaaccacgttccgtgcccgctatgtccgcgcttctgctatctcggacgctcatatgatcaaaggcggtaagacttgttcgtgcgaggaacaggtcgattcccttcaaaggcgcaagtcccaagccggttccgtagagcaggactttgggattcagctccttcaactgggctaatgccaccaaaagcagcacgttagccttccagagctgattgatataaccgccgccgaggagatgaacggtatccatgctgcgcaacagatcgatgccgaaatcttcccggggtgttcccccatcgcgaatccagccccgtatcttctgcgccgccgcctcggaatcatccaacaagtcggaagtattccaaaccaactgccataatgtgtttacaacgtgtaaatgaggatgctcatccttcagcaacagactggagtgactggggttgggacaatccaaccaaatctcgctatccggatcggacttcgccaagaaacgaatccaggctcgagtgatgaactcatctccccaattcggctgtccggctgtggaaacaagataatgacgccttgcgcgcgacttcctcgggcctgcattaaaccatttcatatctctaagtttaaacatgaaatgtcgggaaggtgtcatgattatgttgccgcctcaacatggcgaaactgttggtctcgacgatgaacgccttgcggtcgttcttggccatgacgtcaaggacgacacccgtcacgaacaacagcagtccggcaatgacaagcatgaccgctccgatcagcgtggggaaccgggccaccatgccggtgttccagaagtccaccgtcaccgtgccgcacagcacgacgccaaggacgccgaggacgcagccgatgccgccgaagaacgggagcggcttgtattcgcggatcatgcggaaaatggtgcccatcaccttgatgccgtcacccacggtgtcgagcttgctgaccgaaccctcggggcggtcccgatactgaattggcatctcgtagaggcgcaggttgttgttcagcgagtggatggtcatttcggtttcgacctcaagcccgcgcgatagcacggggtaggttttgacgaaagtgaacgagaacgcacggtaaccggtcatgatgtcagtgacatgcgcatcgaacaggccgttgatggatccgcgaaccaagcggttgtcgaagtcgtggaacgggcgcttgttctcctgaaagtacgtggagctcaagcggtcgccgattaccatgtcatagccttcgagaatcttatctaccatggctggggccgcatcggctgggtaggtgtcatcgctatcggacatgatgtacacgtcggcgtcgatgtcctcgaacatagctcgaatcgcgttgcctttgccctgccgtggctccttgcggacgattgcgtccgcattggctgcgatctcagccgtgcggtcggtggagttgttgtcatacacgtagatatcggcgtttggcagcgctgacttgaagtcgcgcaccaccttgccgatggtgacttcctcgttgtaacagggaagaagtaccgcgacggttggttgagttttctcatgcgtggaatctcagtatagtctttgacattgattgtttatgattttgcgcataggcatgatggtgtatggtgcctctaatatcgcagtgattacttttgcttagtgtttatccttgaattttggtattcttggctaagacgttttctaaaaggtgaacgacaggttgtgatcgggatacgagcattcatcgtcgggttaatgtgcgcatttaaaatgtggaatctgtctgttcatgtgtgcttgttgttcttggcctagctcttttagaaacgttataatccgtttttaaggtaagagacagcagctggagggcaaaagatgatttggctcgggttcgctgccgctattttggcggtagcattaattctgtatatgccaggttttttcttgttgaggacctttggacagtcatcaataaatgccttcgtttttgctccgccgctagttttagcgttgtatgcaattattgaaatagttttatctggtttaggcatacgtgggagctggtgtacgatttttctgccggttcttgttatagcggttgttgtttttctccttccgctactgctaaaaagaaaaaaagaagaaagaactagctattcgttatcgtatttgtccaatacgcgtgcgtattggggaatgttggctctgtatgtcgctgttggcgcggttgttacctcagtgattttctgtttgcatatgcatcggcccgattcgtatacgcagttgtacgataatgcgtggcatatgggaattattcagaaattccttattaatggtgatttttcaacggtgaaagcaggggatattgtagcaacttctggttccacgttctatccgataggatggcattcgttggttgctctggcagcttcactgactggagaagctgttccgatttctattaatgcaagcatagtggttattctgggcttggtatatccaatttctatgtttgccttgatgagcagaataagcgaaaataatcgcaattttattattgccggtgcctttactgtgccaatgtttgcagcttttccatggagattcctcacattcggtccgctctattcgaatttgctttccttcagtattgtacctttggtgattatcctggcgcttaatatggtcgaggcgaagagagtgctcaaggaacgtctctttacgattcttgtgtttgtatggtcgatcgttggagtagtggcgacgcagccgaatgcagtctttacaattggcatgctggttgttccatatcttttccttcagattccagcgtatttgacgtatttcaaagtgatgaagaatcgtaaggttgtaggctcgatagtcggtgtagccttagcggttgcaatagccgggttttgggctttgctttacaatgcgaaatttatgcagagaacggtgacttggcagtggccgtcttttgaggggaaaacgcaggctcttatcgatgttgcttttgtaggcttccatgatgcggagccgcagattctacttggaattcttatatttgttggagttgtatatactgtcttccacaagcgtatgctgtggatgacgagcgcttatttaattatgtgcgttttttatgccatcagttcctccactgagggattcctcaaaaatgttttgactggattctggtaccacgaccagtatcgtttgggtgcctccgcggtattttatggggctgtgttagcgggaattgggctgtggaatgttctagcagttgttgctgaagtggtccctgaaactctgattggcgtaaagaacgctaaaaatcagtgtcttctatcaatgatttgcattttgctcattgtccttgtcaacttcttcccctcattccaccttagcggcaagggggattatgtcactccgttcggtgctattacaagagatataagctactggaattcgtctgatcagccgaagagctactctgctgcagagtctgcttttgttgcaaaggttaagaagattgttcccgaaggggaggtcgttcttaatcagccttatgacggcagtgcttatgcgtgggggcaagacagccttaatgtgtactacaaagcatgggagggaaattggatgggttccccgactgaagataattgtcagataagcaaatcgttggataagattgcggaaagcaataaagtaaggagagctgttcggcgaatcggagcagagtatctgcttattttggatagaagtgattttagcaacgttaaagataatgatgatttggtgcagtccatctatgctagttattctaagcataactgggaaggcattgacaacattaccgataaaactaagggattcaccgttgtgttgtctcagggagatatgagactatataaaatagcaatataaaatatacggcagaattatttaattctgccgtatatatactatatgatgtattttagggctaaacaaccttcaagaaaatgtttgcagcctttatcgatgtatgagcttccttgtaagaggattaatgagaacattaagaataatccagctcagcgtcattaatgttgcatacaacagaataataatgaatatggaaatgataatttttagggagccagaggattccggaataagaaaaatatagtgccagagaatttgcttgaataggaaattctcatggatgagatatacgccaaaagttgcaggagaaacacagaggatgaagttcgctaacaacttcggagcttgtttctgctccctctggactatccaaatgaagatgactgtagcaataataacggggatgatcggggaagctccaggtcctgctgtaagaatattggcattataatattctgatagaaaagcttcggatttaataaaataagtacaagaaatacagacaaaaaagcctaagataattgtgataagaagatgccatattttgatcttagggaattcagatacgtatctacgaataaaagaaccaatcatgaaaatggttgtaagataaatcacgtcggtgaaatactggtttgttggattgagaagtttccatacaaaagtcatccaaaacattatggaaattaggacaagtgtttgtcttttcgataactgatcgaataaaatagtgataaaaggagctagtaatataagaacgcaaaatgcgctcataaaccagtatgcattaaatgtaattgggaaaaaggaagtaagaaccatattgggggatatttcttccctgaggtttgtgggtataagtggggttcttcttaatagggcatatacaacaaatatgcctgcagagtaaataaaaatttgaatccaaagtcttataagacgcggaattggattctttttattgaatgcgagaaaataggcggaaattaaaataaaaaaagatactccaatttggccgaacattgcaagggaatcatgagcggcggatgcccatgttctggataggtttggatcggtatgtatcgaccagttgtcagctgcatagaaatgggttgcaacaatgagaaacattgcaatgatgcgtaagagctcgaaacgccagtccctgtgcttgttcacattctctcctgctaatattgaatcctcttctttcaaagaagtatagcctagggggctggcacaggaatgttgaagtggcttgatttttgtcccgtccttatagtggggcggcttgcgccgcttggtttgcataatactcggtttcggtctgttccggtgtcctgtggcccaaggactggtgcggacgcttcgagtccccgccacgagactcaccggaacgtcgccgattccaggtccctcgaatcctggaagggcttgcgtcgccagacgagctcggtcctgtacgcgccgtcggcgctctcggccatggcgttgtcgtacgagtcgccgaccgtgccggtcgagggaagcatgccgagttccccgaccctggtggtgtacacgaggctgatgtactgcgcgccatggtcggaatggtgcacgagaccgtccgtgccgccatgcggggcggcccatgatatcgcctgttccagcgcctgcagcggcagctccctggtgtccatggtggtggcgcacgcccatccgacgatcctgcgggcgaacacgtcggtgacgaacgccgtgtagccgaacgagccgttggccatgcgcacgtaggtgatgtcggccacgtgcagccggttcggcgcctccgcctcgaacctgcgttccacgaggtcgggcctgccgcccgtgcccttcgccggtttggtggtgacgggcgtcctgccgcggcgcacgccgcggattcccgattcccgcatgacgttcatcacctggtcgcggccgatctcggccggatcccggccccgcgccaacaactgggcgtgcgtcttgcggtacccgtacacggccatgaggaaatcggcatggatctcggggatgtcgcgggccagcgcctcgtgcctggcggccatgcggctgacgggtctggatttgaacatgcggtagccgcgcggcgtgacggacccgcagtccagcgaagcggccagcaccctgcagatcggcccgaccctgaaacggtccttgaattcgtcgatgtaagcgaccatcaacgccgtgtcgggtcgagctgtgccgcgaaaaaagccgacgccgtcgtcaatatctcgttcgcccgcctcaatcgcgcgacctcggcccgcaaactcttcaactccgccatcgcgtcttcggccgactgcttggtctccgccgcgaccgtggcgtccgtcttgttgcgccaacggcgcagcgtctccggcgcgacccccagatccttggcgacctgttcgatcgccttggtctccgacgaatacgagccgcgcgactcggtcaacagcctgacggccttcgccttgaactccggcgtgtatctcgttccttttgccatggttccatcatctcccatcgagttaggagaaatacggaacaaaaatcagttcatatcatactacttgctaagggatcttggtgaattttgttttctgcaagtagcctttgccggatgtctggtcatattggaccagttcagtcccgacaatgcgagctcggtcttgtggcatgattggtggtgatggaatcaatgacgagtccaacaaaacgtcgccaacctccgccgtgcacgtttatttgaccataaacaactggaagaagttcagatggcgtcacacacgctcccgcgtgttgtgaaccgggcgcgacgcctcgccgcatcccgcctcggggcagtggaaccgcgagcccggtcggaagccgatcgtgatgtgcgtctcgcgcctaccatccgccacgtcgcagaactccacgcccgacactccacgggtcggccaactgcaaggcggaggtgaacggcgaaatggtatccataccaccaaactatccggacgtcctcaccccctgaccggtttcacccgcatcaaatagcgaaaggtcattttttctgtgaatttaaatgtgcccggattcaatttgtaagcgcaacgcttgtgttcgggctggctgccttcgattgtagcctggcgatctcctcgtcccacacctcgttgggcgttttgtagccgaggagcttcatcggggtgtcgttgatctccccgacgatcgcgtcgaggtcctcctgggccaagtcctcgaacccggttcctttgggcagatagcggcggatcctgccgttcctgttctcgttgccgccacgctgccaggagctgtacgggtcggcgaagtacgtgagcatgcccagcgcctcgtccaccagcatgtgcaggctcgcctccgtgccgttgtcccacgtgcggtcgacgcgcgcggccggcgggatgtccttgaagatctcgtattcggccctggccgtggcggacgcgctcttgtcgtcgacgagccgggcgaacagcctgcggctcctgcgctccacctgcgtgttcatgcagcgcctcgacggcgcggcgccgaccaccgtgtccgactcgaaatggccgaaccccttcctggatccgaccgcctcgggccggtccgcgatgggcacgcgcatcgggatgcgcggccctttcgccttcctgccctttttcctcgtccggcgtttcctgccgcgcgccaggtactggcgcaggtccagcgcccgctgcggcttggcgtagatccactggtaaaggcactcgtggctgatccgcatcgacgggtcgccggcgtactgggccttcaaccgtccctcgatcagttccgggctccaccccctgcgcagcgagtccagtacccaggcgcgaagccggtccgagtccatgcgacgcggcttgcgggatccgcgccggcgcaggtccgccttcctctgcgcggccagcgccgaatagaacggacccgaggtccacggcccggtcttcagccgtttcggccggtagggccggtacgacccgttctcgttggacgcgaaccacaggccgcgcctcagctcgcgtgacaccgtggacttgtcccggccgatcctctccgcggtccgccgaatgctcagatgctgttcgcaatgcagcttctcgatcaggatcctctcctcggacgacaggtgcgaatactgttgacccatgagtgcaacaccttcttaagttagaaactgaacacttccaaccctagacaaggtgttgcacttctatttagaacccggggtgtcgtctcttttcatgtcggtggattaagctgtaacttgtaacataggtcgcgaacatgatttgctaagtgcagagaatggaatgctggttcagagagggcgtagaaaatgattaatggatgttcggtttcgttggtgatgccatgtcgcaacgaatctaaatatctcgctgctcttgttcaggatgttccttccttttatgatgaaatactttgcgttagcaacaaatctacagatgagactgttcaggtcggtcgccagatcgaaaagggcgacaagagatttcgccttctgattgatgatagagtatctggtggaattggatatggttttgcacatatgacaggtatccaaatggcaagaagcgaatacattgtttgtgctgattctgatggaacgtatccaatcgaagattttccgcaaatactaaaacaaatgattgaacgtgatttgtcttttgtgtcttgttctagatatccggataaggaaatccctccccaactgcagctgggagtgcgggcgcttaatcttgaaataatgttgttatactggttcaagattcatgattccctttcgggaatgtgggttttccgtaaggacgttgttccagaattgcgtcttacagagggagattggaacctgtctcctcagattaaacttaatgcgcataaatatctgggtaagaaatttgctgagattaaggttaagcagaggctccgtcttggtgagacgaaacaatcgtattttaaaactggcataaagcatcttatctggattgctaaaaatcgatttgttgaaccaaaaagcgttcagcaagcggattagggtcttattgatttttgtgactttgagggggtagaacctttatgggttctgtctttggacttgttaagggatggatgtgattggaaattatttgtatttcggttttgatattttgttggtgaaattggcgtagcgtctgcgccctgctacttttggatgatgaatatgctaacctgtgacggatagtgaggatattcagttaactgggctcgtgtgaggcttttgggcatggttgcctttcgatgctgcgcataagaaatgctaccctagtgcgctttcatgagaggtggtggtggcttttaatataatctggtttagcgattttctatcaatgtgcataaaaacaacacgcagaatatatagtgtttttggcctttcgctgtttgatgtgggtgaagcgggttaggcggtgacggtgttgaggccgagtttgccgcaggttaggtagatcatggtgctgaagtggtccatgttcctgaagccgcgggagcgggttttgacgtgctggacgatgctgttgagtccctcgaggatcgcgttggggcaccgatgatcgaagtaggcgaggatgtcctgcagtgccggcggaactgtccggcgagggccttcatcggttccagccgcgaatgcatcatccacgagcacaatgccttgaacccggcctccgcctccatgcggctggcgctaccggcgtagatgtcctgcaggcattcgcgcatcccgcacgccctggcggtcttcgaccgccgcttcgccagattgcgcttgacctccagctgcgggtccgtgaggttggactcgttcccaggccacaggtacttcgtgcgtttgatcagcgggttctccctggcctcggccttgcggaccttgtcgatggcctcgttggcgtgtttgatgacatggaacctgtcgatgattttggccgcgttgggcaagtggtcgcggatgcccctggcgaatcccaggctcatgtcgcacgtcaccaggcgcacgcggttcgagtcgccgttgtgcgccatgaaatcgtccgcgaaccgtttcactgtggtcgagtccttgcccggcaccacgcagatcacgttgcgcttcgccgggtcggcgacgacggtgatgtaccggtggcccctgcggctggtctcgtcgatgccgatcgtctccacgcccgtgtagttctcgtacaggcgcgcctcgtccacgtaatggcggatgaaccgccacggtctcgtgtcgtgctcgccgacctgttcggcgatgtccgcgaccggctggcttttcgctagttccacgaccatcgcctcaaacaggagcatgaacccgcggcccggacgcgcccactgcaccgtcacagtcctcacgccgtgctccgggcacgccacccgtggcacggaggcgtggatgaacgccttgtactggaagaaattcaggtgatgccacgtgcgttccatcgtgtcatgtaccgggcaagacgcctccccgcatcccgcctcgggacagtggaaacgggagccgggcccgtatgtgtgtgatcgaataaaggtgttcactgtcggcacttgttcctgaacaccctgagcgttcaatttggacggtgtcggcggtgatggcgccggtggaatgagaacaccggcatcgtccggttccttggtagattcccgagtgcctgtcaaccaaactgatggttcccgggaggaaaggaaatgacggcaccggtgtgtgtccgacagcgtatcaggcagctcgaccgccagggcttgagccacagggagatatcgcggaaactcggcgtatcgcgcacgaccgtggtcaagtacgccaaccacggggattactctcccaagccccttggctcggggcatgcgggcaggtcgctggtcgacgcggggtattcggccgtcgtggacgggtggccggccgcggatctgcgcatgcccgtcaagcagcgccacaccgcgacgcgcgtgtacgagcggctcgtggcggagtgcgggttcacgggctcgtattcgtcggtgcagcgctgggtcaagcgctggcggcgggagcatcgcatggagtcggacggcttcgccgagttggagtgggcgccgggcagcatgcaggtcgatttcggccaggccaggctgttctccctgttctgcgcgcattacgggttcgagccgcggttctgcaacccgtattccggccacgggaagggcagtgtggagaacgccgtcggcttcgtcaggcgcaacctgatggtgccgatgccgtcggccgagagcttccaaacgctgacgcgcgtgtggcttgacgagtgcgaacgcatcgccggatcggatcactaccggcatgatgttccggtgatcgaactgttcgaggcggagaaggaccacatgcttccattgcctggcgtgcggttcgacccgtgcgactggaggagcgtgaaggccgacaagaccggcgccgtcacgatcgacgcgaaccggtatccggccggaccgaaatggcgttccatgcgcctgcaggccggggtgcgcgtcttcgagatcgaactgcggggccccgacggcgaaacgatcaccacgctggagaggatctggggccattcggcgaaaacccaggtggatccggcgagcctgctcgcgatcatcgcgcgaaagccccgcatatggggcgaaagcccgatcaggaacgatttccccgaaaccgtgcgagccctgctcgaccgcatggacgcacgcacgcgctccgatctgctcgacgacatccgagccgttgccgccgactgcgggttcgccgccacggtcaaagtggtggaaaccgtcatcaacgcgggacggaccgtcgaccgcgcggcgatcggcacatgcgccaaacgcatcctcgagggtgcgggaaccgaaggcgggcaggatttgaagcgttacgacaaatacatgaaggaggccgaatgagacggcaaaaaccgcggcagcgcggcggccgcgttcctgacaaggccacgccggaacaggtcatgggccttggcgcgcaacctgccgttgacgcacggcgtgcccgggaaggccctggaggacgccacgcccggccggctcggcttcctggccaacctgttcgggaaggaaaacgcgagccgggccggatccaaacggcggcggctgcccggacagctacgagacccgcagcgtcatctccgactcgaacctcgagtccggcagatggggcgacgtgttcggcgatggggacatggccgccgcggtcatcgaccgcatcgtccaccacggcgggatcctccgcttccatggcgaatcctaccggaacgaacactccctcatgaaataaaccagacaaacaacaaaacaaggaaccaaccgccgacggtgttcagattaagagccgaacacgtccacctcaatttgacgaaatacagccttcagccgtttcggcctgtagggccggtaggacccgttctcgtcggacgcgaaccacgggccgcgtcccggctcgcgtccgacggtggacttgccgcggccaatccccaggacgatctggcggaccccgagcccgtcacggttcctcaactcgtcgatccggatgcgttcctgtgccgacaggtgggaataggctttcatatcgagtgcaacgctttctcttcggttgtggacttgaacacttccaaccatagacaggcgttgcacttctacctagaacccggggacgttgagaagttggttgaatatgctgttcatcaggcgctttgcggttgtttgtttatcttggtcgaaaacatcctacccggaaagcgctcttctcttactccctcaacaactcaacggagaaaccccacccacgaaaacagcaatagcgccatagtttacgttttccaaccaaatttgagccctgttcttacgttttataaccagaataaggtgcactgggctacgttttccaactttggtgtctagctgagctcgaaccagctatggttctgaaactattctgatggatttaccgcagttcgcctgccaagtatggctccacgaatgcgaggttgctaccgcgttcgagtgagtggaggtcttgcatggcatattgccaagattcctcccacgttgtcggattgccgtgtattcgccgaagagattgaagggttgtagagaacaggttcgggttgcgggtaaagcggtctgctagtttgatggcgctgctctgcttgtgctgtgcgtctagattgtcaatcctaccgcgaaatgcgtgttcgaggttgcggctgacgtagaacaggcggtacgggaccatgagcgtggcgcggccgttcttcttcctgaacccatcgagtttcagcaaggcatccacgccgtttcgcttggtcgtgcgatccgcaatcaggatagtgcggtttggcgtgatgatgtcggtcgttgaatattgcgttccatccaccaatgggtcttcccgcactcggtcgtcagatgtgaacgccccgtctaggtcgcagatctggatgacatggccgagctggccccaggcgcggtcgtggtctctgaggtagtactccacaagttcgcgcaccgtctgggcaggattgtccgctggatagaacccgttacgacgtcggaactcctcacggtggtttggcgcagtcaacacgtcgcagtggaattcctgcccttggaataggcggttctcgattaacgacgagaatgccggcacgagcaggctggcgtcgcttgctccttctacgaccagcaggacgatcttgcgtttagccacggttcaccttcgttccggaggcgttgagtgctgccagatcgtcgtcgatgtcatcgtcctcatcgggatggccggcggcatagagactgttgccgaacatgcgtggtatgggcgaatcatagatgtcggggccgctccatccgagctcgctggccgtcaggtaccgtcggcgctggttgtttgtggaggacttgcgggggatgatcgcgaaccggttattgggatcggtcactgtagtgcgaatgcagccgttcggcagcacttccaacgcacgcaggttatgggcggtgaacaccagctgccctgcgcacccgtccgccaactggtacagcatgtcaccgagcagcaactcgaacacgccggagtcgaactcatccacggcaaccagcgcgttctcgtcgttatacgcgtgcttgagatagccaagcagcgcggtgatgcgtatgatgccttcgctctcacagcggaatgggaccgtgatatcgccacgacgcgagaacagctccgcggtgacccgatcctcgccatctttgccggaaggcgcggttccgatcttcagcaggacatgcagaccaggcacgagggtgggcaggatgcggtcgaaggactccacggtctgtccaagtcgtttcgcctggcccgtggtcagcgggttcggttgcaacaggtcgaacagaaactctgtgttgcgacctgcggaatcctcctccatgatggggatgaacgcatatgcggcataggagccacgacgggtagtggatacgaagacatcattggtcgcgtaatcgcataaggccttgcgtaggcgtacgaactcatcgaaacgttcgttgatgtatgtcagtgatctggcggacacaccattcgcttcccgtacgcgggagaccgcccagtcgatgaggaactcggcatcgggtcggtcttcaagcgtggcacaccgcgagaacaggaatgagcgcccctccatgtacgcacgatcagcggtgcgtgagaccacggttttcaccgaggtgaccgcctcgatggagcgccacacatataccggagttgacacgaaaccatcggtctcagaatcctccgtccgatgccccaacgcctccctgcctaggcgtgagagatcgtcgccgatgcgaaccgactcggaaacgacgcgcgctcgcgtcgaatccgggttcgctttacgcagggacaccttgtattcaaggtagctgggcttctgttttcctccgatgaggagcgtcgccgtcaaggttgcaagaccggtgctgacgctaatggcatcgccggcggtgtccggcagcatattcccggatagcagcgcgcgcagtatcccgatggcatcgataacggtggtcttgcctgatccattctgtccatagatacccgttacgctgccgccagcgggcagatcgtcaaaatccaagacgccgtgcgatatgttcctcatgttgtctagaacaagtctttgtaaacgaatcatcgcattaccgttctttaaaagtcataataatcaatttataattgaaatacatgattattgtacaacataagatatattttcgccaccaaatctcgcaatcggtattcattgattgcgctgtcagtgacctatcggcggcctgtcaatggctatcagtgcccttgcttccgatacttttcctcagtcccggctttatcaggcatccaccagttttcgtgtgctcggtaccagttgatggtcgcggccagaccttccttgaaatcggtgtactttggtacccagccgagctcggtctgaagtttggtggcgtcgatggcatagcgcttatcgccaccggggcggtcgttcacatggtcgaagtcgttggcgtcgcggcccatgagcttcaaaatcatgcgcagcacatcaatgttgttgtattcgccattggctcccacgaggtaggtttccccgatgcggcctcgggtgagaatcgtccagatggcactgcagtgatcttccacgctgatccagtcgcgcacagccagaccttgcccgtagagtttcgggcgaatgccggcaagaatgttcgtgatctggcggggaatgaacttctccacgtgctgataggggccgtagttattgctgcaattgctgatggtggtcttgagtccgtgcgtgcggtgccaggcgcgcaccaagtggtcgctggcggccttggacgccgaatacgggctggacggtttgtaagggctgagctcggtgaatttgcgctgttcgtccagagccagatcgccatacacttcgtcggtgctgatgtggtggaatcgaatatcatggcggcgggcggcctcgagcaacacgtacgtgccggtcacgttcgtattgaggaatggggaggcgtcgagaatcgaattatcgttatgcgattcggcggcgaagtgcacaatggcgtcaatcgggggtactgcggctgcagagcgttggttcagcccagaaaacagggattccacaagctcggcatcgcaaatattgccatgcacaaaggtcaggttcgcggccggcacgccatcgagattctcgcgtttgccggcatacgtgagcgcatccagaacagtcatgtgggcctgcggatggttgcgcgccacccagtgcacgaagtttgcgccgatgaaccctgcgccaccggtaaccagaatgtgttgcggcgcgaatgatgggttggttgcttcgttggatgctttgttgactgcttcgttggttgagtcgagggcctgttcggaattgctcatatctaccaatcgtaacctgaggtttgcctgagtgcgggggcttatattggtggttgcgttgttctgcactctgtctttgtggcggcgaacgggtccgggcaaagacgcagaaatgtaagaacatgccatcgttttgccttgagtctgtcgtctggtcttggattgtgtccagtctgctggtaagtctaggaagattgccgatttgcaattgggtgagtaagatattttctcggagatcgaacataataattgatgtattgactttatgaaagggaatgcgcgcatgccggaaactactcaatacccagacctagtcattgtcggcgcgggcctgttcggtctgacggtggcgcagcaggcggtggagcacaccggcgcgcgcgtgcgcatcatcgatatccgtgatcacatcggcggcaacgcgtactcgtacttcgatgaggagaccggcgcggagatccacaagtatggcgcgcacctgttccacacgtccaacaggcgtgtgtgggagtacgtgaacaggttcacctcgttcaccgattacgtgcaccgcgtgtatgccacgcatgacggcgaggtctatccgctgccgatcaacctgggcaccatcaaccagttcttccatgcgcattacacgccggccgaggcgcagaagcttatcgccgggcaggcgggcgagctggccggcaccgatccgcagaacctcaacgacaagggcatccagctcatcggccgaccgctgtacgaggcgttcatcaagaactacacgggcaagcagtggcagaccgaccctgccgagctgccggcggccatcatcaagcgcctgccggtgcgcttcaactacgacaaccgctacttcaaggacacgtgggagggcctgcccgcggacggctacaccaagtggatggagcgcatgatcgacgatccgcgcatcacggtttcgctgggcgtggacttcttcgacgagtcccagccgtacaacaaggaggcgctgaaggccgcgggcgtgccggtggtgtacacgggtccggtggaccgttacttcggttacgagcttggcgacctgaagtggcgcacggtggacttcaaggaggtccgttacgacgagggcgaccacttcggttgcccggtgatgaacttctccgacgctgacgtgccgtacacgcgcgcgatcgagttcaagaacttcaacccggagcgccgcgatgcccagaacccggacaagaccgtggtgtgggaggagtacagccgtttcgccgagcgcggcgacgaaccgtactacccggtgaacacggacgcggacaaggccctgtacgcgcggtacgaggccaaggccgcggccgagccgaacaccgtgttcggcggccgcttgggcacctacaagtactatgacatgcaccaggtgatcgacaccgccctgaccgcctacgaggaacaggtcgcgccgctgctgaagaagtagaccgtcgtttcaccagaggattaacgatttagcttgaaaccgactgaatattgctgaggcaatagccggtttcaggcttctgtgttttttgggaagccaaatttcctggggtacttaaggctcgccacgaggagtacagttgtctgtaacgcacaatgtggcgcgtaagacgaggggcgtatctcgcaagtggggtgcgatgcagttgaaggagtgcatgtcatgactgatccgaatgccaatccgaacggccaggtgccggggcagcaagctgacgccaatccgactgagccgttaaatgcgatgacgggggaagcaggaaccgccgccaacaatgctccaacccaagcactcgcagcgggcgaacagcccactcaggcgttcactcctgttgagcagcctacgcaggcgtttacacctgccgagcagtccacccagcctcttgcgccggtcaatcagccggtaccgcctacgcaggctttgccaccagtgactcctgccgctgcgcccgcgcccacaccggcagcacccaattcgccctatccggggacggctccggcaggcggatcggttcctccggtctacggcagcgtcagtgctcggtatccgggcggcggggccgtgcctccgcaaacgccctataacccgtatatgcaaggcggccaaccgaacggccagccgggatggtctggttcttacggcagtgtgccgcctgaagcgaaccagaagtacaacggcctggctattgccggttttatctgctcgttccttgtctcactccccggtctgatcctgagcatcgtgggcctcaaccagattaagaaacagggcggcaagggcaagggcttggccatcgccggcatcatcatcagtgcggcgggcatggtgatacaggtaatactggtcatcgcgctgatcgtcggcggtgtctcgtacaccagcaaggctatagatgaggcgaaaaccgattccttctatagtcagtcctcttcgggcaacggtgatagcagcgataagagcaaagctcaagataatcttgacgatgcgctggacgacacgttgggcgaaacccatgacgatctaaccgacggcgattatgggctgtacgattcgattcaggatttcgtcgactattcggaattcaaggactccattgaatccgaagcggatacgtttgcagataccggcatcaccttcaactaccgtgtcgacggtgacaccttggtgtacgagtacgtgctcgacgacagctatgcctcgctaggcgataccgtcgcttcctcactggatgctatggacagcacctatcaatccaccgcgaatctgctgggctcgatgtgcaagacctccagcggcaaggcatcattgcgcgtcatcatgcacacgcaaagcggccagtcgctgtacgacaaaacctggaccgaaaagtagcaatcccagcgaacgtgcgttttggtcgattgaaggccggtatgcttgctccttggacggatgcttctgcggaaggaaccgccaaggagtaggcttacaggcatgagactcgcacgtttttctttgaatgattcgccgcgctacgccttcgtacaaaaggacgaaacggacggcaaggactacctcatcgaacttgacggccatccgctggccggcgaccaggtcaagcctaccggcaaccggtacccggtcgacggcgacggcatccgcctgctctccccggtcatcccctccaaggtttacggtctggccaagaactacgaggcccacgcccagttcatgcacgaggccggccactccgaaatcgcccacgcgccggaagacatggtgatcttcaccaagccgtccacctcggtgatcggccccgacgatccgatcgtgtacccggcctgctccaaggacatgaacttcgagccggaagtggccgtggtgatgggccgtatcgccaagaacgtgtccgttgaaaacgcgatggattacgtgctcggcttcacctgcgtgaacgacgtgacgttgcgcgacctgcagggcatcgaccccacgtggacgcgcgccaagggtttcgatacttcctgcccgcttggcccgtggattgtgatgcgtgacgacctcgactggaaggacgccaagatttccttcacgctgaacggcgaggatgtgccgatggcgtctggcaccaccgcgaatctgattcacggcatccccgagcagattgccgcgatttcgtcgttctccacgctgctgcctggtgacgtcatcatgaccggcaccccgaacgcctccggccacctcgacccaggcgacgagaccatcgtgcacgtcgagggcatcggcgatctgcgcaacgtaatcgttcgggcgtgactcgttctggatcccctctctgaggggagccgtccaggcggagaagctgactgaggggaaccaagaacgcgccttacgctcccggcaataccgcgtgcagggcggtcatcaccaccaagctgatgatggccgtcactgtcagcgagaagccggcgagcttggcgttgccggttagcgaatcagtgaacttggttgagaagatcgtgataggggcgaacgagcccaacacgatgatctcgcgaatcctcatgtcgaatggcagtaggaaccaggcggccacggcgataatcgcgccgaataccatgcgccagacaatcaccttgcccaactccaccttgtccttgcgattgttcggaatctccatcatcagtccgatcatggccatcgcgcagaaggcgttcgcattggcgaacggggtgatgagcgtaacgatgggctgtgggatcgtgacgtgcaggaacatgaacaccagcatcagcatgtagatgtcgaaggaaatcgagcttaggaagtccctggcaatattgcgcagacgcaggatgagcggtagcgacttgaaattgtcatccatatgcagcagcgtgcgtgtgatggtcagtgacccggccgtggccacggtggcgttgccgatatcgagcatgatgatcggcagaccggcggacgggcccatgaacgtctgaaccacaggcaggcagaacgcgcccaggttcaggcccgaggcgttgagcatctggaaggcgcggtagttcttctcgtcgccgcgagaaccgaaatacacgatgaacagcggaatcgcgcaggcgaagaagccgaacaacacgatccacagcatgcgcatgtcgtgcttgttcgtggcgaacgacaggataatcgcacaaggaagcgtcagattgaataccagaccctgcacgattttgtaatcacgctcgccgaaaatgtggacatgtttgagtatgtagacaccgatgataacgagcagcagcgaaccggcctgaaaaatcatgttcttctcttatcccacaagcacccgccgcagcaccggcggcggtcaggcgcataacaaaccagccgtgagtataggagcgttcgcgcggcgctggcgcggggcggtgcatattgtggacagtcccgtaacgttgatatgccatgctggcgagatgaatatatccaataccaagtggagctcggcacgatagagaggtaggaaaacatggcagagcagacggtcaccgtaggcgttggggcattgagcatcgaggacgttatcgccgtagcgcgcggtggtgccaaagtggcgatttcggacgaatcgaagcatgagatggcgctaagtcgcgcggttatcgatcatttggccgacgacaccgtgccgcattacggtatctccaccggattcggcgcgctcgcctccacttccatccccaaggaacagcgcgcgcagctgcagaaaagtctgatccgctcgcatgccgccggtgccggaccggaagtggagcgtgaggtggtgcgcggcctgctggtgctgcgcctgagcaccctgtgcaccggacgcaccggtgtgcgcccggaaaccgcgcaggtctacgccgatatgctgaacgccggcatcaccccggtggtctacgaatacggttcgctcggatgctccggtgatttggcgccgctcgccgcctgcgctttggtggcgatgggcgaaggcgaggcccgcaacgctgacggccgcaagatcggcggcggcgaagcgctgcgtgcggccggcatcacgcccgtcgatttgaaagagaaggaaggcttggcgctggtcaacggcaccgacggcatgctcggcatgttgtgtatggccatcaccgatctgcgcctgctactcaagacggcggacatcgccgccgcgatgagcgtggaaggcatgctcggcaacgaccgcgtgttcgccgccgacttgcaggcgctgcgtccgcatcgcggccaaggcgattccgccgcgaacatcgtccgcatgctcaagggctccggtctgatcgaggccggccgcccgggctccaccgtgcgtgtgcaggacgcctactcgctacgctgcaccccgcaggtgcacggcgccgcccgcgacaccgtggaatacgcggcctccgtggcgggcgtggaactcgcctccgccatcgacaacccgtgcgtcacgctggacggccgtgtggagtccaacggcaacttccatggcgcgccgctggcctatgtgctcgatttcctggcgattccgactgccgacgtagcctctatctccgagcgtcgtaccgaccgcttccttgacgtggcgcgcaaccgcggcctgccggcgttcctggctggtgacccgggcgtggactccggtttcatgatcgcccagtacaccgccgccggcatcgtctccgaaatgaagcgcaacgccgtgcccgcctcggtcgattcgattccgagctccgccatgcaggaagatcacgtgtcgatgggctgggccgccgcccgcaagctgcgccggtcgattccggcctttgcgcgcgtgctggccgtggaactgctgtgctcctgccgctccttcgacttccgcaagccgtaccgtccgggtgcggcgggcgccgccgtataccgcgtggtgcgccagtacgccaacgaaatcggccccgacgtacgcgatacctggaccaccccgcaaatcgaaggcgtagccaacgccatcctctccggcgaaatcctatccgccgccgaagctgccgtcggcctcctgaaatagatgtgagctccctcatcagagggggctactgttcaccctccccaccaaaatccaaaacttgagtcacctgcactcaagttttgggaatagaatgggttccaggtcggttgaccatatcagacaacgacaagttgcggtctgcggtggcgcttgcggggctttcgaagcccgcgagccgctccgcgcggaacgcatgacatggaggaatacgatatggaacagaagttcaccaccatggcccaggaggccgtcggcgacgcgattcagagtgcgtccgccgcaggaaacgcgcaggtcgagaccctgcacgtcatggatgcgttgctgcgtcaggaaaacggcgtggtgcgctccctcatcgaggccgcgggcggagacccacaggccatcggcgccgccgtgcgtaacgctttggtcgcactgccgagcgcatccggctccagcacttcgcagccgcaggccagccgccagctgaccgccgccatcgcccaggctgagaaggaaatgcagcagatgggcgacgaatacgtctccaccgagcacctgcttatcggcatcgcggccagcaagccgaaccagtcggccgaaatcctggagaagaacggcgtcaccgcagcctccctgcgcaaggccgtacccggcgtgcgtggcggcgcgaaggtcaccagcccggacgcggaaggctcgtacaaggccctggagaagtactccaccgacctgacggccgccgccaaggaaggcaagctcgatccggtgatcggccgtgatcaggaaatccgccgcgtgattcagatcctctcccgtcgtaccaagaacaacccggtgctgatcggcgagcccggcgtcggcaagaccgccgtcgtggaaggcctggcccagcgtatcgtggcgggcgacgtgcccaccaccctgcaaggcaagaagctcatctcccttgacctaggctccatggtggccggctcgaagtaccgtggcgagttcgaggagcgcctgaagagcgtcctcaacgaaatcaagaacgcggacggccagatcatcaccttcatcgacgagattcacaccatcgtcggcgcgggtgcggccgaaggctcgatggacgccggcaatatgctgaagcctatgctggcccgtggcgagctgcgcctgatcggcgcgaccacgctggacgagtaccgcgagaacatcgaaaaggatccggcattggaacgccgtttccaacaggtgttcgtgggcgagccgagcgtggaagacaccatcgccatcctgcgtggcctgaagcagcgttacgaggcgcaccacaaggtgacaatcggcgatgacgcgctggttgccgccgcgaccctctcgaaccgttatattccgggccgtcagctgccggacaaggccatcgacctggtcgatgaggcggctgcccacctgcgtatggagctcgactcctcgcctgaggagatcgatgaactgcagcgcaaggtgacccgtcttgaaatggaggaaatgcagctcaagaaggctgaggatcctgcatccaaggagcgtctgggcaagctgcaagccgaactcgcggacacccgtgagaagctcagcggcctcaaggcgcgttgggatgcggagcaggccggccacaacaaggtcggtgacctgcgtgccaagctcgatgacctgcgtgtgcaggcggacaagttcacccgtgagggaaatctggctgaggcctcgaagattctgtacggagagattccggctattcagaaggaactcgccgccgcggaaagcgcggatgccgaatctgccgatgccggcgcggccaacccggccgatgagccgatggtcccggaccgtgtggacgccgactcggtggccgagatcgtctccgactggaccggcattcccgttggccgcctgatgcagggcgagaacgagaagctgctgcatatggaggactacctgggcaagcgtgtgatcggccagaaggaagccatcgccgccgtgtccgacgcggtgcgccgttcgcgtgccggcatctccgacccgaaccgtccgaccggatcgttcctgttcctcggtcccaccggtgtgggcaagaccgaactggccaaggcgctcgccgacttcctgttcgacgacgagaaggccatggtccgcatcgacatgtccgaatacatggagaaggcttcagtctcgcgcctgatcggtgcggctccgggctacgtgggctacgagcagggcggccagctgaccgaggccgtgcgccgccgcccgtattccgtggtgctgttcgacgaggtcgagaaggccaatccggagatcttcgacgtgctgctgcaggtgctcgacgatggccgcctgaccgatggccagggcaggaccgtggacttcaagaacacgatcctgatcatgacctccaacctcggctcgcagttcctcgtgaacgaggacatggacgccgacgccaagaagaaggccgtgatggacgccgtccacatgaacttcaagccggagttcctgaaccgtctggacgacatcgtcatgttccacccgctcacgcgtgaggagcttggcggcatcgtggatatccaggtggctggcgtggcccagcgtctgaccgatcgccgcatcacgctggacgtcaccgactcggctcgcgaatggctggccaacaccggttacgacccggcttatggcgctcgtccgctgcgccgcctggtacagaccgaagtgggcgaccagctggcccgcatgctgctggccggcaaggtccacgatggcgacaccgtgctcgtcgaccagaccggcggcgagcatctggagctttccgcctgggccagcgaccagatcgtctccgacgacccggatgtgagcgtggacaacgttaccgaagataagtgacaatcactggctcccctctctgaggggagctgtcagcgaagctgactgaggggagttcgggcggtttcgcaacagtgatttttctctgcaaaatctcttaaacaggtgggtatggtagcagtcatacccactttttcgtctttgtgggtctatctcgatttcgaggggctgatttgccccctttcggaggtctacttccgtttcgaggggctgctcttctgccgaaccgcgagtatcagcggctttatggcaacgccattccgccattgttgcgccgtgtctacttggctaccagccccttgaaatggaagtagacctcctgcaacatcgaaatcagccccttgaaacggaagtatctgtccgatccgtctcaattgtgttccccaagagtggaagaaccgtggcatcaaggtgttcactgtcgcatatggtaggaaagtgagtgttaacggacgaagggagagccagtgaccggacgattggcgccgacgccgtcggggcgcatgcatatcggcaacgtgtacgccatgttgggtgcatggctttcggcccgttcgcgtggcgaccgcatgctgatgcgtatcgaagacgtggacaagccgcgcgtggttgccggtgcgggccagctcatgatggacgacctgcattggctcggcctcgactgggatggcgaaccgatgttccaatcccagcacactgaacgatatgaatacgctctcgaatgcctgcgctcgcaaggtgtgctgtacccctgtttctgctcgcgtgccgacattcgcgccgcctcggcccccaacgagggcgacggcttcatggtgtaccccggcacgtgccgccgcctgctgcacgaccatcccgacgaggtccgtgcccgtctgtctcgcggcgaccagcattccatccgtatcgccatgccgaaaccggcagcgggagaaaagcaacgtacagtgcctgacgattccgctgcgctgtcgggagccgtgccgccggaacagcagggcgatgccggaatcgttgatggtgtcgcatgctttaacgaccgtgtctatagtccacagcactacgatttggcccgcgaggtaggcgattccgtgattcgccgagccgatggactgttcggctatcaactggtcgtggtcgtggatgacctcgatatggatgttgatgatatcgtgcgcggccgtgatctgctgcgctccaccgcgctgcaaatgtggattcgccagtgtctgttggctggcggctttgagccggaatgcggcaacacggaaaagcctctcgccgagcaccccgagtatgcgcacctgccgctcatcgacaatgcggccggtcggcgtttagccaagcgcgaacgttcgctggatatgggagccttgcgcgcccgcaacgtaacccccgagcaaatcatcggatactgcgcctggttgctgcgtctgcaacccactccaatcccttgcaaacccgccgatctgctggcagatttcagctgggagccgctgcgtgccaaccacctggaccgcgcgctgaagccggacgatccaaccactccacaatggctggcagaagcgttaggctagaggcagcccaacaggaaggattccaatgtcgtcgaagctctggagaaacgtggcgctggcaggcgtggccgccgccggtgctgccgtgtgggccgtggccccgcgcacgttcaatgacaagcgtcgtaatttcgtgccctccattccgaaggtatggtatgcccatcgtggcttgcatgatgcgggttctggtttggtcggctataccgatatcgctgattatggtggggataattcggtcagcgcccaagccgataccactgagcgatccatcgccgaaaacgatgattatgtgtcgcttgcccgtcgcatggctgtcaaggccggctacggcagtgcggatatgaccggtccgatcgctcctgaaaactcgctggccgcattcgccgccgcctgcgaggctggctatggcatcgaactcgacgtgcagcttacgctcgacggtcaagtggtcgtggtccatgacgccgatttgctgcgcgtggccggcgaccctcgtcgcgtcgaagacctgacgtacgacgaactgacccgtattccgctgttcccgaacggcaagtccggtgacttgaaggccgaaccgttgccgggtgccgacgcgaacccgccgctggtggtcacgccgtccgccgcgccgaaggggtactaccagcatgtgccgctgttctccgatgtgctggacgtggtggccggccaggctccgctgattgtggaatacaagttcagcgacaacaaggcttgggatgagcgtagcgaagagctcatggaaaagggccacgccttgcttgaggcgtatgacggcccgtacgtgatcgaatccttccatccgggcgcggtgaattggtacaaggagcatcaccctgaggtgtgccgcggtcagctgagctggccggcgaagctgagcaagaatggtgcggctgaatgggccgccggcttactggcgttcgactggctgtctcgtcctgatttcgtggcctatgactggaccggtggcgctacgccgcaagtcaagctcgctcgttcgatgggtgcgatgccggtttcatggaccgtgcgcagcagcgacgagctcgcccagtgcgcgccctacttcgaccgccacatcttcgaagcgttcgtccccgacgcagtgtgaggttgagggcgttattgatgtgctcatggggcggttacaggctcatcgggcggtaacttgcccatggggcggtttgaagaatatgtgaaaccgcggaattaagccattttggcataccgccccatgagggttttaccgccccatgaggcaattaccgccccatgggggatttcccgccccatgaggtatggcgttttacttgtgatatggctcgccagcgttgatcttataagcgcgatagatctgctccagcagaatcacgcgcatgagctgatgcgggaacgtcatcttcgagaaactcagcagaaaatcagcacgacgcagaatcgcgtcgtcaaggccgattgagccgccgatgaccagctgaatatggctggtgccacgcaatccaaggtcgttgattttggcggccaattcttcgctggacagctgcttgccattgatggcaagggcaataacaaacgcgccgtccttcagatgcttggcgatgcgttcgccttctttggccttgatctgtcggtcaacgccttcggaggcgtggtcaggcgttttctcatctgccacttcaatgatgttgagcctgcagtagcgcgaaagtcgcttggaatactcgtcgatggcgtcgcgaagatatcgttccttcacgcgtcccggcgcaataatgtcgatttgcataaaaagcccatcacattggctcccctctctgaggggagccaggaaaatcagtcaattacgccatagagacggtcgccggcatcgcccaaccccggcacgatgtagcacttgtcgttgagcttctcgtcgaccgcgcacactacgaccttgaagtcgatggacggatcgatgtgctcttccacgaacttgatgccttcaggcgccgcgatgatgttgatcgcggtcacgtccttggcaccgcgctcggccagatagtgcgtggcagcaaccagcgtgccaccggtggcgagcatcgggtcgatcaggaagcactgacgaccggacaggtcctccggtagacggttcgcataggtgacctgctgagtggggtgttcctcgtcgcgcttcataccaaggaagccgacttcggcggtcggcataagacgggtcatgccatcgagcatacccagacctgcacgcagcaccggcacaatgatcggacgcggtttggccagcttcttaccggtcatcggagcgaccggtgtttcgattggtgcggcaactacggacaggttgcgggtggcctcataggcctcgagcatcacaagctccgagacgagctcgcggaaagtggaggagggggtgttcttgtcgcgcagcacggtgagcttgtgctcgaccagcggatgattcaaaacgtgaagttccatactccccagcctacccgtagttcgcggggaagtcacttgggcggcagtcgcgcgcgtatcgcacaccaatgtaaacagcgttcgacggcgggccgcgtaacaccgttgattttgtaacgtgagcgttatgtatgagacgcatatgaaatattcaggcaacggaaattcacgcaggcactgccatcgtatagtgcagtcggccggaagccagccgtcgatatccggcaagtggttcagcacgatatcaggcatcagggcacggtacggcaatcagcgtagacattccgcgggcgggcaacgttcgcggaatgtagtcgtatgtggggaggaagagccatatgactcgattgcaaagactgaagatgggtgctgcggtgtgcattgttgccgcagtgcttgccaccagcggttgtggctggggtcgcaccgtggccgagaaagaggcccaagagaacaacgcgactgcggcaagcgacacctcatcatgtgtggacacctcaggcaacaccatcaaaatcggtttcgtgaattcgctgtctggcacgatggccatttccgaacagacggtgagtgattcgctgcacatggccgttgatgagattaacgcaaagggcggcgtgctgggcaagcagctcaaggtagtgcagcaggacggcaagtccgagccggctgtgttcgccgaaaaagccaagaccctcatcgaaaaggaatgcgtggccgcggtgttcggcggctggacgtcctcttcgcgtaaggccatgctgcctgtgttcgaggcggataacgcgctgctgttctacccgctgcaatacgagggcatggaagccagcccgaacatcttctactcgggtgctgcaccgaaccagcagattgtgcctgcgcttgattaccttaaggagcaaggctacaagaagctgttcttggttggctccgattatgtgttcccgcagaccgcaaatcgcgtggtcaaggcgtacgccgagggcaatggcatggaagtggtcggcgaggaatataccccaatgggctccaccgacttcaccaccatcgtcaacaagctcaagttctccggcgcggatgcggtggtgaacacgctgaacggtgattccaacgtcgcattcttcaaggaatacaaggcttccggcctgaaagccgccaccacgccggtgatttccatgtctatcgccgaggaagaggtttccgctatcggcgttgacaacgtcaaggaccagctcactgcttggaactactaccagacgctgaacaatgcgcaaaacaagacgttcgtgaagaacttcaaggcgcgctacggagccaatcgccccacctccgacccgatggaatcggcgtacacatctgtgtacctgtggaagggcatggtcgagaaggccaagtcgttcgatgtggacaaggtcaaggctgcagcagacggtgtcaccttcaatgcaccggaaggcaaggtcaaggtggacggcgaaaaccaccacatctacaagacctcatacatcggcaagatcggctcagacaagctcatccacaccgtctggaagtcggacggtcccatcaagccggacccgtacctgaagacctacagctgggccaagagcctgagcgccagcgtcgagagcaactgagagaagaggacacaacaacatgggtatgttatttccacaaattgtggcaggtctgtccaacggatcgattctgctgctcgcagccctcgggttgtcgttgaccttcggccagatgggcgttatcaacaacgcccacggcgaattcatgatggccggcgcatacaccgcatacgtcatgagcatggtcatcggcaataaaacagtgtccctggccgtggcgctggtggtcggtttcgtagtagccggtttgcttggtttactgctggacgtgttgctgctggagcgtatgcgcaatcgtccgcttgatacgctgctggttaccttcggtgtatcgctggtattgcagcagctcgcacgcgatattttcggtgccactccggtctacgcttcggctcctgaagcgctgaccaatccggtgaccatctttggctacagcttctctgcaggccgactgttcatctttattctgtcgattatctgcgtggctgcgctgtacgcgatcctgaagctcacgccgctgggtcgccagattcgcgccacttccgagaaccgcgacctcgctgaggtttccggcatctccaccaagatggtcgaccatgtgacgttcttcctgggctccggcatcgccggtatcgctggcgtggcgctgagcctgctgaactcgattagcttcaacttcggtacgaccttcatcgtgcaggccttcctggttgttgtggccggcggcgttggccagctcaagggcgcggttatcgcctcgttcgtgctgggcttgtgccagtcgtccatcgaactgccgacctctgcctcgattggtcaggttgccgtgttcctgattgtggtggtgttcctgcagttcaggccgcagggcttggtctccatccgctccaggaacctcgcgtgagtgcttcagaagggtaaggaaacgacaatgaagatgactttgagcgaatacgccacgaaatataaggctttgatcggtgtggtcattgccgtggcgctgatcttcctttctccgactgtgctgagcgtgtacaacctcggcctgctgtccaaatacctgtgctacgcgatggtcgcggtcggcatcggcctggcttggggccaaggcggtatgctgacgctgggccaaggcctgttctttggtctcggcgcgtacgtgatggctatccacatgaagcttgaggacattggcgtgggccaagtgccggacttcatgtcccagtacggcatcaccaaggttcctggattctgggaactcttccgcaatccggtcatcgccgtgattggcgtggctgcggtaccgggcattatcgccgcaatcctcggtctggctgtgttcggccgtggcgtgcgtggcgcctacttcgcaattctttcgcaggcgctggttgccgcgttcgccgtgctgcttatcggccagtcgaaaaccaccggtggcaccaacggtctcaacgatttcaagggattctttggttacgacttgactgataacgccaacaagcagatgatcttctacatctgcgcgttcctgacgctggccatggtgcttatcgtctactggattcgcaaatcgtttatgggcgacctgattatcggcgtgcgcgaccaagagaaccgcatgaagttcttgggctataaccccgcctccatcaaggtgttcgccttctcggtggctgcaatgttcgccggcattggtggcgcaatgttcgtgccagtggtcggcatcatttcgccgtccgatatcggcgtgacgccgtccatcctgatgctcgccggcgtggtgatcggcggacgtgccactttgctcggcccggtggtcggcacgctgctggtgcgctttgcggaaacgcagctgtctgaggcgtatccgtccgcgtggacgtacatcgaaggcctgatcttcattctggtgattgcctttgtgccgaagggcttgggacagttcaagggcgtatggccttggattaaggagaagatcgggctcggaaagagttcggttggagcttcggctggtgctggtgctggtgctggtgccgttgccggtaccggtactgctactgcaaaggcggtgaacgcatgagtgaggagaagaacatgagctcgaatccatcggctcccgcacctgcatcgcaggccgatttggagcagttgcgcgccgaaatgattgagatgcgcgacgaagccaagcgtatgcgcgacgaagcggcccagatgaaggccgaaatcgttgaagagcgtacgaagctgcacgatcagcttgcggtgctggatgatcgcggcggccagtggagcgattatctggaagttcgtggactgcacgttgagttcgatggattcgtggccgtcaagaatcttgatttgactgtgcagcacggcgatttgcgattcctgatcggcccgaacggtgctggtaaaacgaccatcatcgacgcgattaccggactggtgccggccactggttccgcggaattccgtggcgagcagctgttgggccgcaagccgaacgacatcgtcaagctgggcgtcgggcgtaccttccagaccgcatcggtggttgaagagctgtccgtgttggagaatctgcagctggccgagggcttccgcaagaagggtcgtgagctgttccagccgatgggcggcgtttcgcagaacatcgaatacatgatggacgtgtgcaatctgactgtggatgcaaacaagcccgcaggcatcctgccgcacggcaagaaacagtggctggaaatcggtatgctgctcgtgcaggacgcgcacctgctgctgctcgacgagccggtggccggcatgactccggccgagcgtgtgcagaccggtgagctgctcaagcgatgcagcaagaaccgcacggtcatcatcgtggaacacgacatggatttcatgcgtcagttcgccgattcggtcacggtgctcaaccagggcgaaatccttgccgagggttcggtcgaagacatccaaaacaacgaagaagtagtccgcatctacctgggcggcggagaaaactaactccctgtctcccctccctgaggccgaggcgttaagcaaacagcccagtgggctgtttgtagccgaaggcgagacgatagtcgaaccagcaggttgcaggcaaggcccgtccttaattgcggacgagctgtcaccgaaggtgactgaggggggtaggtaagaggaagaagcgcaatatggaccgcactgacaacaaccatcgcatcccggaatgcgctttttcagtgcatattgagggtgatacaacgcgcctcaacatcaatatgcacgacgccgtagaaagtgaataatcatggcaatgcttgaagtaaaggatttgaacaccggttacggcaaagtgaccgtcgtcaacgacatcagtttcgacgtggccgccggcgaatgggtgagcatcgtcggcaacaacggtgccggtaagaccacgctgttgaaggcgattctgggcttgctgcccgtttcgtccggttcgattagtttcgagggcaaggacattaccaaggctgcaccgaaccaacgcatccgcaagggcatggcgttcgtgccgcagggccagcagtcctttggcaccatgaccgtggacgaaaacctgcacgtggtcgccgaccgctacggttcagaggccaaggcccgttacgacgaagccgtggaaatgttcccggtcttgaaggaatttgctggccgacgtgccggtctgctgtccggtggccagcgtcagcagctttcgattgcccgcgcgctgatcacccgccccaagctcatgattctcgatgagccgaccgaaggcatccagcccaatatcgtcgccgaaatccagaaggccattcgcatgatggccgaagacaagggtatcggtgtggtcttggttgagcagaaggtccaattcgccgtcgagcgcgccgaccgctactacgtcctggcctccggccgtttcatcgccaccggcgaaggcggccccgaccaagtagaagccgccaaggaatccatgagagtgtgattaattcgacccccgtttatggccatagagcgttatgagaaacgtcccgttcttataacgctcttattattgggcgatgttagggctcacattggtgtgcctgaaaaactccagtcaacaacagaggatgttatgagacttacaccacgagagactgacaagttgatgctgtacttggcggggcagcttgccaaagaccgcaaagccagaggcgtgaagctcaactatgtggaggcgattgcgttgatttccgccgaatgcgttgagcgggcgcgtgagggaagcactgtggcggagctcatggcatacggtcgcacgctgctcaagcctgaagatgtgatggatggcgtggccgagatgctggaagtggtggaggtcgaggccacgttcccggacggcaccaagctcgtctctattcataaccccatcgaatccaccgagaagttggtgccgggggaatatctgctggctgacgatgatttggaactcaatgaaggttccgaagacatcgagctggacgtggtgaacactgcggatcgaccgattcagattggttcgcacttccacttctttgaagttaataagtacctgaagttcgaccgtaaggcggcgtatggcaagcggttggatatcgcggctggtacggctgtgaggttcgagccgggtgaaacgcatcgagtgcggttgattgatattggtggcacgcgtgagattcacggcttcagcgcactggttgaggggaagttggatgaccctgaggtgcgggaggccgcgtttaagaaggcgcatgagcttggattctcgggaatctgagctaagggccaccctcagtcagcttcgctgacagctcccgccagcggggagcggactacctctcagtctcgcttcgcgagccagctcccctgacaaggggagctgaaaaacagcaaggacttttgacatgaagattattacgcgcaaggattatgcgggaatgttcgggccgaccacgggagaccgcgtgcgactcggtgacacgaacctcatcatcgaggtggaaaaggactacacgcactacggtgatgaactgaagttcggtggaggcaaatcattccgcgacggcatgggccaaagctccgtgcagctcgacgttgaatcgccggataccatcatcaccaacgccctcatcgtggactacaccggcatctacaaggcggacatcggcatcaaagacggcaaaatcagcgccatcggcaaggccggcagcccgcagaccatgagcggtatcacccccggtctcgaagcgggctccggcactgaagctctcgccggcgaaggcctcatcgtcaccgcaggcggactcgacacccacatccacttcatctccccgcagcagattcgcactgccctcgccggtggcgtgaccacgatggtcggcggcggcaccggtccggccgacggcaccaacgccaccacctgcaacccgggagccttccacctgacccgcatgatcgaggccgccgaagcgctgcccatcaacatcgcctaccttggcaagggcaacgactccagccccgaaccattgcgtgagcagattcgcgccggtgccgcaggcctgaagatccacgaggactggggtgccaccccggccgtcatcgacactgcactcggcgtggccgacgaaaccgacacgcaggtggctatccacaccgatactctgaacgaaggcggttgtgtggaagacaccatcgccgcgttcaagggccgcaccatccacacctaccacaccgaaggcgctggaggcggccacgctccggacatcattcgtgccgctggcttcccaaacgtgctgccgagttccacgaacccgaccatgccgttcacgcgcaacaccatcgacgagcatctcgacatgatgatggtctgccaccacctcgaccgcaatgtgcccgaagacatctctttcgccgactcgcgcatccgccccgagaccatcggtgccgaagacgtgctacacgacatgggcatcatctccatgatgagctccgactcgcaggccatgggccgcgtgggcgaggtcatcacccgcaccatccagaccgccgacaaaatgaagaagcagcgcggtccgctccccgaagacgaacacgacaacaaccgcaacgacaacttccgtgtcaagcgctacgtctccaagttcaccatcaacccggccatcacccacggcatttccgaatacgtgggctccatcgaagtcggtaagatggcggatctcgtgctttggcagccgtccatgttcggcgcgaagccggaaatggtcatcaagggtggctccatcgcctactctcgtatgggtgacgcgaatgcttctatcccgaccccggaacctgtctactaccgcgatatgttcggcgcgctcggccgtgcgcttggcaagtcctgcgccacgtttgtttcgcaggccgccgtggatgacgatatcaagggcaagctggagctgcagcgccaggtgttaccagtgcatggctgccgcacggtaggcaagaaggatctgaagttcaacgacgtgctcgccgacattcaggtcaatcccgaaaccttccaagtgacggtggacggcgaaccggtccactctgacccggcgtacgagttgccgcttacccagcggtacttcctgttctgagagaactggtggctctcctcaaaggggagagccacttggttttagccttcggccacgaaatcggtcacgaaatcggccacatctcgaatgaggtcgaaggcgtcgtcgcctcgggtggtcagtacacgcaagcagatgccattgattacgcggctcacgccgagctcgccggtgaagccgatggcgtctgcgtgttcatggatgcgagtgatgagcgcgtcttcggcggcgatgcgggcagtctcgatgcgctcgcggatggcggcggaggatgcttctttagttgcggcatcttgtacagcgtcgctagggtcgagttcgggcaggtgagcgtagagaacgccgcagtgggtgaattcgcgccacatgccgagttcggtgtagtcaaaagcatcaggttccaacagcatgcggtcagcaaaggccagatgttcgcgcggtcgggcagcggcggcttccgccttggaaggccggcctcggcgatgtgcgtgctgttgcgccaattcggctgcggcggccttggtcacggcttcgggttcggccacatatacgcgcatacgattcgtaaaacgtttcatggcccaacgctcatccatcccaacgcggccacatgtcgccacatccgcatacacgaatgctgactcggcggaaatatgcgcggtggtcaggttcatgaatgagctgttcttgaacggaatcactgggaacggcaggaacacggctttggcattgccacgcgccctgagttcgatggtgcgttcggccgagccgtccgcggtgtcgaacaccttctcgtagctttgcgttttgatggtcgaatcggtgcctgggccgaagtcgatatcgatatgggcttcatcgcccctcaggaagccaggggaggcgagcatcacgacgaaatccgaatgacgtccgttggtgaacggggtcatcagtttgaacggcgcctcgaaataaatatcgtcgattttggtacgtccgtggcggaatgcagtggatagacgaaaagtgctactgcccatggacgaatcgctgccttcttatgattggtgcctgacgatgacatgggcaattatgccgcacttggtgcaacggtatgtttcggcccgtccgtttttggatacgggcgggccaaaacatcacatgtcctcgaacagcacgctcttcttgatccatgcgatgacgtcgtccactccggcaccgcccatcaggtcggtgaagatgaacgggcggtcgccgcgcatcttcttggagtcgcgggccatcacgtctagatcggcgtgaaccaacggggccaggtcggccttgttgatcaccagcaggtcggagcgggtgacgccggggccgcccttgcgtgggatcttgtcgccctcatcggtggcgatgacgtagattgtggcgtcggccaggtccgggctgaacgtggcggacagattgtcgccgccggactccacgaacatgatctgcacgtccgggtgggtgcgggccatttcctcacaggcctcgaggttcatcgagcagtcctcgcggatggcggtgtgggggcagccaccggtctccacaccgacgatacggtccggcgcgaggcgtgagtgctcgataaggaactcggcgtcttccttggtgtagatatcgttggtgaccacgcagatgctgtattcgtcagccatcttgcgggtcaggcgttcgataagcgcggttttgccggaaccgaccggtccggcgacgccgatgcgtacgtatgacatggggtttctcctttatgtgggaattagttaggtatgtggtttgcgggtgaggttatcctggctcccctccttgaggggagccaggataattagctcatgtagagcctcgagtacaagatttcatgctgcatggcggcgatgtcgaggtaagctccggagatgccgagatcctcgggcttcaacgtcatcgcgatattcaccgcgcgcacgaggcgcgggaacgaatcatgcagggcgacttggccagcgtactggctgagcggaatcgcctttgcggcgcacatggtaagcgcgctcaacagcgaatatccatacatgatggccgcgtcgcgcacgtcgttcgcatggtcagccgcgtacaggcccatcgcgatcgaatgcaggccacggcagcggcgctcgcgaatcagcccggcatacaggtcgagcgacggcgagccgtacaggccgtcggcggcatcgtgcagctggtggcgttcggtgtgatgctcgtgcacggcgatgatgctgttttcgcgcgaatccgcagcggatgcggtggcattgccggcaggacttggcttggcgaacccacgatgcccatccgaggtctgcgcctggccggcatccatctgctcggccagcttgaccaggcgggtacacatgcgctcgctgccttcacggatttcacgtgcggattgcagggccgaggccagctcgtcaagttcgatgagtcgctcggccagccctttgcgggagactcgcgaatcggtggcgtacttgccggccagcaccatctgcccgatttccttgtacggtgcgacttcgaggtagttcttcatatactcctcgaaatcggcgccacggcgcaagaagtcgcgctgtacgaaggtctccatgccgttggacagcgcgaacgcgcccacggggaagacgctgtcgcacacctgcagcatggccagacgtcgcgattcggtttcgttgatgttcatggggctatcagtgggtgtgccaggtgcggccgccgtcgtggctgtgggagccgtccgggcggtgcagcacgccgttcatctcatattcgccgggctcaccctcacctgcgtcgtgtgtatgcacatccagatggccggcggcctcctcggccgggaattccttgtcggcctcggcttcctgctcctcctcggccacgtcgcccgtggtcttgttggtgcccggaatcagtgtgccggtgccggcgtgggccttgacgatcaggaagccgtcaaacccaccctcgatgatatgcggttcataaccgatcttcttcgtgtattccatggtcggatggtcgtacggcaccagcacgcggtcgttctcgaccttgagactcaggtggcggttgcccagttcgaagcacaggcgtcccatttccttcatcgagttaaccggaatctcaatcagctgtgcggttttaatgcgtgcgaaatagcgcttgtcttcggtttcggcgagcacatcgccatccttgatggtcttgccaaccatgatgccgaactcggtgccgtcctcggccaccttgcgcatgcgcttcttatcggtttcgaaccagtcgaaggcaatcgacacattaagtttgccgtcgctgtactgctgactgatgatgttgccggtgatttctttggcgatcatccgttctccttggagaaaattgcttgtggcgtgagaatccccacgtccttcatgccacagtgtagagagcctgttgcgtcactttgtaacgaatgatcgaaatatgcaaaaaatatagcggaaaaatatccgaaaacacggaaaccggatatatggtacacggtgtgtcgctagtaattgcaagctattttgcatggttgtgcattagacgaatcacagttgtgatattacatatcacgttcctggagcgggaggttgtggtcgagctccgaaatcaacaaaaagagggaagttggatataatcgaagtacctgacaccgtcacattggcgatgcacattccggataatttcatttcgccgtccaccggggcgttgttctacgtcatcatgattccggtgtgggtgctgtgcctacgctacgtgatccgcaacagcacgccggagaagatggcctacctgggcgccggcgcggcgttctcgttcctcatcatgatgttcaacgtgcccacgcccggcggcaccaccgcgcacggtgtcggcggcgcgctgatcgctctgctgctcggtccccagtacgcgacggtctccgtgtcggtggccctgctgctgcaggcgctgctcttcggcgacggcggcctgatcacgctcggcgccaactgcttcaacatggcgttcgtgctgccgtttgtggcttacggactgtacgtgttgctacgcaaggtgctgcccgacggctggaaggaacgcgtggccgaattcgtgtccggctatatcggcatcacgctcgccgcattctgcgtggcgctggaactcggcgtgcagccgctgctgttcaaagccgctgacggccaggcgctctacttcccgttcacctttaacgtgacgattcccgccatgctgatcccgcacctggccgtagccagcgtggtcgagggtctggtgaccgtggtggttgtcgaattcgtgcgccgcaccgcaccggagattatcgaagacaatgcccgtgtgaacttcgccgagaccgccggtgctgacggcaaacaggtcgcgcacgccggactgcgcaagtctgcgtggattgcgctggccgtggtggcggtgctttccccgatcggcctgctcgccaccggcgacgcctggggcgagtggggcgccgaggacttcatgagtgccacggggctcaactacgtgccgcagtacatcgcccatggcttctcgtgggatgcgctgttgcctgactactcgctgcagggtctgccggacatcgccggctacattctctccgcagtgattggcatcgccgtgctcactatcgtgttccgtctgctggcgctcgcggtgagcggcaacggcaagacatccgcgcgttgacgatacctgcatggatgcgtgagtcggaggattacgatcctccggctgacaagtcatccttcatcgaacacaacctggggcatttcggcagcgtactcgagcaggttggtcatgcgttgccgattgagtcgagcccggtcgacaaggtgctgggctcggtcaatccgggcgtgcggctgctgggcatactggccgcgattgtctgcgtcaacatcacatgcaacatgctgttctcgtacatcatgctggcggtggtgctgctgatgatggcgacccggccggcgcgcctgatgagggcgttgctcggcccggtgctggccgtatgcatcctgagcctggtcgtggcggtgccgagcctgctgattgggcagtacagtgcgccggtccggctggtggtgcgtgcgttcgtggcggtgtcgctggtgatcgcactggcgcgtacggtgccgtggaatcgcctgattgccggactgcgcgcagttggctaccctgattcggtgatttatatctgcgacgtgacgattcagttcatcgatattctcggtcgttcgatggtggagttgctggatgcgctgcggttgcgcagcgtgggccgcgaccggaccaagctgacgtccgccggccagttgatgggcgcgctgtttctgcgtgcgaatacgcaggcgcggcaaatggctgaatcgatggtgtgccgggggtttgacggtacgtatcatatccaccacgagcgtctgctgacgtggcgcaacggggtgtatgccgtgtgcattgctgcaatgattgcgctggcggtgtattcgggatgagggtggttcgaatgaatggagcccaataatgttcggattaaagcgtaatcataaacaaactgcaaccatgcggccagataactcatggttccgcggcgacccgctggtcgaactgaatcacatcgacttttcctataaagattacggcgacgccgacgatgaaacctcgtcgcacgccgtgctacgtgatttttcgctgaccgtcgaacgcggtgagcgcgtggcgctgctcgggccgaacggcagcggcaagaccacgctgatgcgcatcatcaatgcgctggaatttccggactcaggcgagtatcggtttggcggtactccggtggttcgcgaggaagtcgaggcgaagaacagcctgttcgccaaagcgctgcatcagcgcatcggattcgtgttccaaagctccgacacccagctgttctgcccgtcggtggaagaggagattgcgttcggtccgttgcagatggggttgccggatgccgaagtacagcgcagagtcgatgacatggtgacgttgttcggcttggatcggatgcgggagcgggcgccataccgtctgtctggcggtgaaaaaaagcgtgtggcgattgcctgctgcatgtcgatgaatccggacctgcttgttctggacgaaccgaccgacggcttggacgagcgcaataccgacgtagtggttgaggtattgcgcgccttcactgatgccggcaagactgtactgttctccacgcatcaccacgacatcgtggagcggctcgacgctcgcatcgtgcgcgtgcatccgtcactatggcaatgacattcacgtggcgtctattggatatcttcatcgaaaaaagcagaaaggcatcggcgaggatcgcgagtccggcgagaactgcgatagtcgctttggtgatggttgccttcatgagagtttccccaaggtgttgacgttgatttcatgagattcgaaaaagagcgtatctaggccgaaccggacagtaagtcaacggtttctggaaaccagctgaaaaagctacggtattgtgaaatatgtctcatcggaatgggtcaagtttggcctagcgctcgcagtcgtgcgcgaagattcgttggattgattctcggtggattaagtcataggaagaaactagacaccttgcggtgtaaaaccgggaatcggaatggtgtaaaaccgggaatcggaatggtgtaaaaccgggaatgagaaaggtgtaaaatctatattgaggtgattgggtagctgagaaaggccggaaaatgaacgatttgaacaatcgtagtgataccttgactcaacctgattatcgtgctcgcgtggtcgatggcaggttaggtaagttacttaaagcattcggcgcggtggaaatcgtcgggccaaaatggtgtggaaagacatggacggcgctttcccgctcgcgaagtatggatcgtctggatgatgccgctacctttgcggccgcacagactgatccggcattggtactcatgggtaatgaaccgcatttggtggatgagtggcaagatgtgccgcaaatttgggatgccgctcgtcgtcatgtggatgacaatgcgaatcgcaaggggcagctgattcttacgggctcggccattccgaaggaccgagaaacaattcaccacagtggcacaggtcgaatttctcgcttgcgtatgtggcctatgagtctgtgcgagtcagggcaatctaccggtgtagtgagcttgtctggtttgtttgatggacaattcgagcctgccgaatgtgcaaccagcattgaagatattgccagatggtgctgtcgaggtgggtggcccgcaaatcttgatttggatgacgagtttgctctggaaattccgagtgaatatatcaagagtgtgcttgatatcagcgtgcccaagatgaacaagaaccctgaaaccgcgcgtgcactcatgcgtgcgctcgccgtgaacgtatcgcaggcaccaaaatatgcgacgctggctgcggatatggcctatggcgatgagcgccgtgaaccggatacgcagacagtaaagagctatttgggaatgctcaaggacttgtaccttctgacggatttggagggttgggagccgccactccgcgcaaagagtcgtgtgcgaaccaagcccaagcgatatttcgtggatccttcgttgcctgctgcggttttaggtgccgcgccgaatactctgatgcgcgatacacagacgctcggcgatctgtttgaaacgctgtgcattcgtgatttgaatgtatatctgtcggccatgccgggcgcgaacaatcgcatcgcctactaccgcgatgacaaggggcttgaagttgatgtcattatcgagttgtctgacggcaggtggggtgctatcgaaataaaactcagtgaccttaaggtgaacgatgacaatgcggataagctcaaatccttccgcgacaaaatctgtggcaaccccatggcccaagttcgcgaaccagagttcatgatgttccttaccggccgaggtgggaaggcctatcgccgcaatgacggcatactggtcgtgcccatcgcaacgttcggggcgtgaatcgggtaaaagaaaagaagcgccgaaccgcgaaagcgcctgtcggcgcaagggccgctcgcggcggcaaaaaatggagcccggggcttaagcacggtccgacgcggatacttagtatagcttgcgatggggctcgccgcgccggggaggtgtggtgttggctggtagctgattgttggggtgcggttggtgggtctctccctcagtcacgggcatcgcccgtgacagctccctcatcagagggagcctggagcagggctactccaaccgtccgcgacgccagaggttggcaccgtgctggaaatccttggcggtggccatgaggctgccggcggtgtgcataaggcgggcggctttggtgcgcacggccttctcatcggcatccgaggagaaggcgccgttggcctcggcccgggtcaccatgcgccgcgcctccacgcgcaagcccaacgccaccacatcggtaaacgccgccgcacgctcaagcgccacggcaaaatcgcccacaaaagcaccggagagaatcgaatcggccaatcgcacgatgtcatcttcactgggagcctgatccacgccggcgatggcggaggcggtagtggccaccggctcacccaagcgccacagatgcgcgatcgagtcgcgattcgatcgcatccacgtacgcaacatatacagtcgccacagcacaccaggcagcgaatccggctcggcatcgctccacagttcggcgatttcatccacgccgaccgtctccaccaacgtgagcacccgctcaacaaccgccgggtcttcgctatggcgcacacgatccagcaatgcggcagcagacagatgactcatctcgctcaac

SEQ ID NO: 320 - DNA, 98645 bp, Unknown
  R42_10m  MAG No. k141_3983
accaccacgacaggcaatcaggcgaggaatgaactggcaatcattgactataaagaagtagtacaaacacgctcttgagttctcaaaccaccaccacaccagcaagacaggaaaccaaccagaagaaggaacccgccgcgccgagcggcaacaggtgaataacttacacgcaaccacgccacaacgcaaatcgggcatgaaaaggcacgccagaatcgttgcaacgacggcgttctatcggcgtgtcgaaatcagcttgaatcacgccgttaccatcaggatacgccggctttttatgggctcacgtaacgaaatcagatgttcaccggcgtgtcgcaacaattcattccacgttcaactcccctcagtccgatcacgcggacagctcacccgcaattacggacgagcaaagctcgcgcccttatggctcgactatcgtctcgccttcgtctaaaaaaacagtccaccggactgttttttaaacgacccagtatcaaagagggaagccaaaaggggattagaaggtcaggcgcatttggtgccagaccacgtcaccgtgagtggaatcggaaatgccctcgtcctcatatccgaatcgcgcatagaatccgaccaaccgatctttgcaggtgagcaccaggcctttacggccggctgcacgagtgtcttcaatgactttcctcatgagtgtactggcgcaaccgcgatgctgatacttcggcgcagtatccacgccgaaaatcatttgccagtcaccttgagggttgtgctgcgcggcatcctcgtacatgtcatcggtcaagtcgcgccgatcggtcacaaaaccgttgatgaacgccatgacgatctcgccatcaatcaatagccagaaacattccggataggtctcgattcgggcgcgcagggacgagcggtcggcggcctcggcggccgggaagcattcgaattccatggcggccagcgcgtccagatcgtcgatggtggcgtggcggattaactggggatcagaatcagtcatgtttttgtctttctcttaacactccgttgtgagcaactcccccagtcacgcttcgcgtgctggctcccctcaccttgaggggagccggatggatgtcagattacgtggtattcgcgtagcagggtggcaatatcggtgccgtcgagtttcttgagcaccttcttgaccacggccttttcaatgaagttgagcttcatatcggtgaccggtgcaccgtcacgcaatttgacggtggcgttgagcaggttgcgcacgtcatagacactgccccacacttcaggcacgccgcggtccacgccgagcaacgtgtagacagcttccataccggtgcgcatcgagtactcggtggtgaagatcgtgtcacgcggggtctcggcgaactggccaaggaatgcgaagttcacggcaccatcgggcaccacgtccgggcggtcgccggccgcgcgcggcatgaagaacgcggtgatgtacggcatcatgaccggcacggtgttggcgtgatgcttggcgagcgcctcgatcttgtcggtcggcacgcccatgtggtaaagccactcctcgcaaatctcttcaccggtgcattcggtcatcggcttcttcacatagttgccgggcttgtccgggaacaggccgtagacccatacgcacagctggtccttgggctggtcgcggaactgctgctggcggttcagggtccaactcatgagccagttggagtcctgcacagtgacgatgccgccggtgacgaccttgccggagaacgggtcgcgcttgcaaatcttctggatgtacggcggaatctcgccgtccagggtggtgatggtggcgctcatccacttggtggcattcggatcggagcagaacttctccggatggccaaagctcgggtcctggtcggcgatacgcttccacatatcccagccgccgccgggcttcaggtctgggttccatgcggcgggcgagttctgggaacccatggtggagttctccacgcaaccgccgttggtgatgaacaccagatcgttctcggtcaggtcgatggaggatttatcaccctcgtgatccacgtcgatgcgcacggcaagcttcttggtgggcgtgctggcagggttgcgcttgaagaaaccggaggtggcctgaatcttttggatggtgtcctggcctacgccggtgtgctcgcgcttggggccggctcccccgccaatcgcgaattccacgttcacaaccttggtgttgtagcggaattcgacgccatgcgattccagatacttgaccatcggcagaatcatcgactcgtactggttgtagcgggtgaaacgcagcgcggaaaagtccggaagtccgccgatgtgatgaatgtagcgtttgatgtacagcttcatttccagcgcggagtgccagttctcgaaggcgaacatggtgcgccagtacagccagaagttggagttcagcacctcatcatcgaagaaatcggtgatcggcttgtcatacaggtcttcgtccggggtgaagaacagcttcatgatttccatcgaagccttgtcggacaggccgaacttgcccttgagccccgcgtccttgccgaggtccttggtggcgcggcacagcgagtagttcgggtcctccttgttgagccagtagtactcgtcgagtacgctgacgccctcggtttcgatggaggggatcgagcggaacagatcccacatgacctcgaaatgattgtccatctcgcggccgccacgcatcacatagccgaggccgggaatatcaagaccgtcacaggcgccgccgggtaccgggtccttctcaaggatgtggatgttctcgccaggcatctgaccatcacgcaccagataacaggctgcagacaatgccgccagtccggtaccgatgatgtatgcatgcttgttgtccacgtcggccggcttcttcgggcgtgcgaaagcctcataattgccgctgctgtagtacatattccgcctccttggggtagagttgacgcttcgtcaactcttcttgaatagacatcatgtcacattattgccgaacacgccataggcaacgttcggcgttctgccgtattcgccaataccttgcgtctacggttttcgaggcctgtgttggctgttggctcataactattgaaggcatacaggcatactgaggatgctgggtgcttcaccgaaccggatgattgataaggtcccgctcaatccatgccatgaccaaatcggcaagtcggtttacctccgcttcggtgagttcacggcctttgggcagatgatgccatttttcgatgcatccgcggcagcatgtggcggtagcatgctgagcggtgaataccggatggccgcgccatggcgtctgcctgccgtcgttcttcggttcggctgagcctatgcggtctcgcaacatttctcgcgcatgacgatcgatggtcgccttgcctttggtgcgggcataggctcgttctttgtcggtcaaagcgaatttggcgcggaactgcgaatgagacagccgttccagcatcgcggcaatccattgtcgctcgtcatcgttgttaccagtatccgccatctccatgcccatacgttccacaatagtcgcgcacatcgtatggtggcacatgccttagctccctctgatgaaggagtccccagcaaagccaggtgagggagaggccaggggcgaaacccgccaatcaggcggcaggcaagcagctggggccaaacagaatcttgatctcagcaaacaacgaagtatcccgcttgacgcggaaacgatcgccaaacgtgagcacctgagcgttacccttctcatccagcaccgcaagatgtacttcgcagtaaccaggatgattagcgagcacctgaccgagttgcatcatgcgttggcgctccaacgccaccggcggcagcgtgatgaccaacggacgttcatcctcggcttccaaggtcggaatctgcatttccgtggctctcagagaaacggtttcgtcgcgcaactccacttggccacgaatctgtacgatggcgtccacggcgagttcggcggcggccgcttcatagaccttgccgaagaacatgcattggatggagctttccatgtcttcgatggtcacgatggcccaggggttgcccttcttggatacgcgccggtccacattggtgaccaaaccagccaacgtgacctgctgtccttcacccatcgttttggctcgatcaaccagatgcgcgatggacatttcacgcaaggacgcgagaatcgactgcataccggagagcggatggtcagacacatacaggcccaacatttcgcgttcgaagttaagcttggtcttcttgtcccattcctcaagatcgggtacggtcacggaagcgtcgcccatggcctccgctcccccatcctcggcatcggagaacaaatcgaactggccctccgcctgtttgcgcttcagactcaccaccgagtcgatggcggcctcgtgcacggtgaacagcgcgcgacggttcgggtcaatcgagtcgaaggcaccggccttgatcaacgattcgaccaatcgccggttcagcgcggtcaggggcacgcggcggatgaagtccatgaagttcacgaacttgccgcgcgggccttcgcgttcggcgatgatatcggccacggccttgtcacccacgttacggatggcaccaagaccgaatcggacgacgtcgccgactgccgagtactcgtacaccgattcgttgacgtccggcgagagcacctggatgcccatgcggcgggcctcgcccaagtacaatgcggtcttgtctttgttggtggcggcaccttgcaacaaggcggccatgaactcgaccgggtagtgcgtcttcagatatgcggtccagtaggagatcagaccgtatgcggcggagtgcgctttgttgaaagcgtagccggagaacggcaccagaatatcccacacggcctgggaggcctcttcggagtatccatgctccttcataccggcgaagaacggcaccttctccttggccagcacttcgggcttcttcttacccatggctcgacgcagcacgtctgccttgcccagcgaatagccggcgaggattcgggcggcggactgcacctgctcctggtagatgatcagaccataggtctcgtcaagcacctgcttcagaggttcctcaagctcagggtggattggcgtgatcttctgcaggccattcttgcgcttggcgtagttggtgtgcgaatccatactcatcgggcccggtcggtacagagcgataagtgcggaaatatcgttgaagttatcgggcttcagggttttcagcagtgaacgcatgccgtcggaatcgagctggaacacgccgagcgtgtctcctcgggacatgagtttgtaggtttcggcgtcatcgagcggaatcttggtgtagtcgatggcgggtttgccgttggcctcgatgttcttcagggtgtcgtggatgatcgtcaagttggacaggccaaggaagtccatcttgaccaaccccaacgtttcgcacgtgtggtattcgaaggtggtggtgatggtgccatcggtgcgttccagcaacggcgaggtgtcggtgatgggcgcgctacccatgatggtggcgcaggcatgtacaccggtctgtcggatcaggccttcgatacccttggcttcttcggtgatgcgcttggcgtccgggtcggaatcgtagagttctcggaattccctggcctcggcgtagcgtttggctgtcgggtcgaagatgtcatgcaggctgatatccttgccgccggtggccgcgggaggcagcgccttggtgactttttcaccgaccgagaactcgtagcccatgatgcgggcggagtccttcaaggcctgcttggttttgatggtgccatagatcacgcactgggcgaccttatcggtgccgtatttttcgccgcagtattcgatgactcgcgcacgaccttcagggtcgaagtcgacatcgatatcaggaaggctcactcgctcagggttcaggaacctctcgaaaatcaggccatgcttgagcggatcgagctcggtaatgcccatggaataggcgaccatggcgcctgcggccgagccacggcccggccccaccataatgccgtggtccttggcccactgaatgtagtcggcgaccacgaggaagtatccgcagaactgcatctggcagatcacaccacattcgtagtcggcctgcttcaatacgtcgagcggcgggttgccgtcgtaacgcttctccagaccttcctcgacttttttaaggaacagggaggtctcatcccagccttcggggcaggggaatttcggcatgaacgcgccgtcttcgtggtcgtcgaacatcacgttgcagcgttcggcgatggcgagggtgttgtcgcaggcgtccggatggtccttgaacagttcgcgcatctcttcggcggttttgatgtagtagccggtgccgtcgaatttgaatcggtccggatcgtcaagacgggaaccggagttgatgcagagcatggcgtcctgtgcctgggcatcttcggcgtgtacgtagtgggaatcgttagtggccagcagtggtgcgttgagtttcttggctatggtcagcaggtcaccggtcacctgagtttcgatgggcagaccgtgatccatgagttcgatgaagaagttgtctttgccgaagatgtcctggaattcgccagcggcgcgcagggcctcatcgaactgaccgagacgcagacgggtctggatgatgcccgaggggcagccggaggatgcgatcacgcctttggaataggtggcgagcacctccttatccatacgcggataacgcatgacgcgaccttcgaggttggccacggacgaagctttgatgaggttgaccaggccttcgtcgttttcagcccacatggtcaagtgggtgataagaccaccaccggagacgtcgtcacggcgctgggcttcagtgccccaatgcacgcgggatttgtcttgacgtgcggtttccggggtcacataagcttcgatgccgatgatgggcttgacgccattggccacgcagttggtgtacatctcgtaggcgccatgcatgttgccatggtcggtgatgccgaccgcaggcatgccaagttcggccgcacgcttggccaaatcagggatcttcgacgcaccatcgagcagcgaatagtgcgtgtggttatgcagttgcacaaagttgttcccgtaatcagccatgcgccccaccataccgtgtggtctgggcggctgttcagcattcccgtcggcactccgcgatgagggcggcgcacagcatgatgacctgggcgacgagattgaaccacaccagcgcgccgatcaacgccgcgaacggtgcgagcagcggattgcgggaggcgccggtcagcagtcgcgcgccgagcagctgcatcaccgaaaccgtcagggaacccaacgacgcgccgatcagcgtgaatcgtccggctttgatgtgcgcgaccacacgcaacagcagcatgaacaaggcgaagttcagcgcgacgccggtgcagaaaccggtcagctccagcagcagaatccccggcagcgagctgctggcgatgccgctccactgcaacacgcgccgcaccatgccaccggacaccgtaccggccgcggtcgaaagaatgaacagtattgcgatggcgatggcggcaagcgtatcgcgtaaccttgcgacgacgatattgagctcgtcgccgcagtcgtcgaacatggaccgtacggcgtggcgcagcgagttcatccagccggtcaccgtccaccagaacatggccaacgtggccagaccggtccacgtcaatgtgcttgacatggtgtttagtgcggaagacgtcagaaacgagtcggccacaccaggaatgacttcacgcaccgcgtcgatcagcatctgctgccaatcaatgttgccgaccatgataaggccgaacacgctcaccgcaatccagacaccggcaaaaaaggcgaacagcagaccatatgccagaccattcgccagcagggggccgcgccgcgacacataccggtcgagcacgcgcccaggcagcgaacgcgcccacgcgtccgctcccctgtcaatcgcactcttcaacccatgcatagttcaactgtagctgttgttaccgttgttgaaacagcgtggcgcgaaatcgcatttagccagctcaaacgatggcaaccatcaacgcccccactcaattgttcagaatcggataccatatgagtattcaattcatccgtcggagttcaatgtcagcagtcctcaccaaccgatgtcttgctaatccgctggccgccctagtatctactgtttcttgtggacttcgttcaacagccaggcagagcgtacaacatactgcgtagtacatggcgcgaatcccaatgaccaccatcgattgatgacggccacgaatactcgtactcagcatccgcagtcacttggggtatggtcatgacggagagccatcatgaccgatctctcattattctgggatgaatccggcgaggctggaactgaatctaaatattaaaacgcatgatgcacacgttgcggaattagtccaccagaacttcggcatgctcggcaggttcagcgggttcgatgtgacgggcacgcatggcatcgagggcggcggccaggtcggccgggtactgggaccggaccgtggtccaaacgcgggtgcgaggatggcggaattcgagcttcatggcgtgcagccactgccggtcaagtcccaaagcttcagacagcaccggattggcaccatacatggggtcgccgcacagaggatgcccaatcgaggagaaatgcacgcgaatctgatgggtacgtccggtctccagattcacggataccagtgtggcctcatggccgaaacgctccaacacatcccaatgcgtaacggccggtttgccagccggagtcacgcagaagcggaaatcggacactttggcgcgcccgatcggtgcctcaatggtcgctttgttctctttaagaccgccctgcacgagcgcatgataggttttctttacctcatgctcggcgaactgccgacgcatctcggtgtacgcaaggtcggacttgcacaccaacatcaagccggaagtgcctacatcaaggcgagaaacaatgccttcacgcccggccgcgccataggaagcgatatgcacgccacgatcacgcaacgatcccaataccgtgggaccggtccagccaaccgaggcatgcgccgccacgcctacaggcttatcgactacgacgacatcatcatcttcgtagacaacagccatatcagttgcgataggctcaggcccggcctgttcctccgccaaatcaaattcgacggtctcccccgcctgcaacgtgctggaccgcgcaacttcacgccctaaaacgcgcgcctgtccggagtcaaccagatcggcggctttagatcgtgaaatacccagcattttggccacggctacgtcgaaacgcttacccaccaatgcatcgggagcagggaccattcgactcattacttggcgtccgcctccggctcagactgtagggattcgtcggattgctcgataagatccttgtgggagaacggctcccccataagaatcagaatcaccaggaccacaccggcgactaccagatagatatccgccacattgccaacggaccagccatagttaaggaaatccaccactttgccgttgaggaagccgtcagcgtacataacacggtcaatcaggttgcccagagcgcctgcaaacgcgaaagaaagcgccaccgaccatttcatggagatagtgcgcaccccagccacagcaagggccacgcaagccacaacggccaacagactgattacccaagtagcgcctgaccccatgcccaaggacgcgcccggattacgcaccaaggtgaaggacagcagtccgggaatcacgcgaatggtctgaccgttggataacgcggccatcgcccaagccttggtgagctgatcgacaatcagcgcagccgcggccacacatgcaaagacggccacgcgagtgcgcagccgtccctgttggttcgtcatacgacctgtacctgcctacgctcagttggtcttggacgaggtctggtcgacgtagttgttcgactcggaaacctgcgatgccagctggccgaggtactcggtgaggcgggcgcggtattcagtctcgaactgcttgaggctctggatgttgccctcgacgaccttggactgagcctgaaggttgtcgcgcacctgctcggcatacgtatcggctgcagagcgggtgttcttgtcgtacgcatcagctgcggaacgagtgttcttgtcatactcggcggcacgctgctgcacttccttctcgtagttgtcagcgtcatcgtgctgagacttggagtagttgtccgcatcctgacgagtcttgacggagtatgcgtcggcctcagaacgggtgttctgggagtaggtctcggcatccgcgtgaatctggtcacggtaagcgtcggcctcggagcgggtacgatccgaataggtgtcggcgtcggaacgagtacgagtggagtagtcgtcggcctcggagcgggtacgctcggagtagttgttggccttggtgaccaaatcgttgtacttgttctggctggcctcggtgatttccttggccttgttcttgcccttctccacgtactgatcgtgcagctgcatagccagagtcagcatggcggtggcgcgctcgggctcggtgcccggcatggaagcgacgccagcgatcttctgcagagaaccggtctcagtgctcggctcgaccttggaaacctgggcacgaagctggttttcacgctgcttggcttcttcgagctgacgagacagttcagcgatctgagcggactgctgctgagcggcggaaccctcctgctgagcagcggcgagctgacgggacagctcctcgttggccgcgcggaactgatcacgttcctgctgaatggcggcgatctgctggccgacggcttcctggttaccggaggcctgagcggcctgggcggtgagctgatcgatttgagcgttcagctgatcgacctgacccttgagctgctcattctgggaggacagcgcgcggttggattcctcggcttcgctgagcttggcagaggcaagctgtgccgcctgatcattgccagcctgagcggcctgctgggcctgagccacagcgttcttcaaaccagcattctccgactggagttgctgcacctgaccggtaagatcggagatcttcgcattaaggttggtcacgtcagggcccagagactgagtggcctgaccgccggctaccgcctgacgtccaagagcctcgacggtttccgtgacctgatcaaggaagtcatcgacctcgtcgacatcataaccttccttgaatcgaacagtctggaaggtatgctccctaatatccttcggcgtcaacagagccataaatcttgcacctcgctttggggcattgcccgcacttacgttggtctcaagtcagaatgctatcacgaccccatcgtttcagaacattcaacgtgggtttttatgccagatatatgcctccggcgggtcaaaaacggcctcagaacactatcagaacaacactttctagtaccaccaacgcaaaatacagcacgatgaagctgacatcaagataaatcgagccgagcggcaatggacgaatatagcgacgtagccagcgcagagggggttcggtaatggaatacacaatgttgatcagctgggccaccacaccacgtggataccagtttcgtgcgagaacggagacccagtccagaatcatgcgcacgaacagaaccgtgatatacgcgttgatgagccatgcaagaatgcggccgatcagagagaacactaaggaaagcatgctgacagactaacaaccgcgcatgaaaagtttgctcggagcgcaataagaatcggccgactccttgctgggagtcggccgaataccgatataacgtcgaatgcgaaaactactgaaccggtcagtcagcgaacaaatcgtgtgccgaggttggttttgtcggctcttcgaccttgatgttcacctgcgccgggctcaacaggaacacgcgcggagtgacacgctcgagggaaccacgcacgccgaacaccacgccggcggagaagtccacaatgcgatatgccacggcttcggccacaccggtgagattcagtacgaccggaacaccgtcacgcaatgcgcgaccgaccagctgagcatcctcatatgacttcggatggatggtggtgattctgttcacgcgaccaccggggaacggcttggtagtcgacgatgcggcaggcgcggtggttgatgccagcggcgtgaccgtatggtcggaatcgaatgcggacttcggagccggcttctgctcctcgtcctcttcgatgtagtcgtcctcatcgtccacaacgtcgctcatgcccagataggacatcgcgtttttcatgaacccagccatggatcagtcctttcagcgcaggaaatcaggaatgtcgagatcgccggcgggatcgttcacggcgatgttcggatgcgaggtagtcggatcgtcaaagggcagggatgccgggtctgcggtcgtcggggtgaattccggacgcggagtggccacgggctgggcggccggagcggcggcgggctgctgcgtttgcgtggcagccggctgggcggccggtacggcaattgccggagcggcggcagagggatcctgcggtgtaaccggatcgaaaccggccgcgatgacggtaacacgcacttcgtcgccataggcatcgtccagagcaagaccccagatgatctgggcctcggggtgaatggccttgcgtacaagctcggtggcggcggaagcttcctgcagcttcagatcggtcgggccggcaatgttgatcaacgcgccgtgggcaccctcgatgctctcctcgagcagcggggagctgatggcgatttcggcggcctgggtggcgcggtcttcgccccgcgcggaaccaatgccgaacagcgcagtaccagcgccacgaagaatggagttcacgtcggagaaatcgacgtgaatgtaggaattcatcgaaatgaggtcggtgatgccctgcacgccggcgaggagtgcggtatcggccgtcttgaaggcttcgatgatgccgatggaacggtcggaaagctcaagcaggcgatcgttcgggatgacgatcagcgcgtcgacttccttgcgcaggttgtcgatgccgtattcggcggaagcggaacgctgaggaccttcgaagctgaacggacgagtgacaaccgcgatggtgagagcaccttgctgatgagccgcacgagcgacgatcgggctggcgccggtaccggtgccaccaccctcaccgcaggtgacgaacaccatgtcggcacccttcagggattcctcgatatcagactgatgatcctgtgcggccttagcacccttctccgggtccgcgccagcgccgagtccgcggctggactgatcggacagggagattttcacgtcggcgtcggagcgcagaagatccttcgcatcggtatttaccgccacaaattcaacattctgcagtccctcggcaatcatgcgattgacggcattaccgccggcaccgccgacgccaacaaccttgatgttggtcttgtcgttgaactcattctgcgcgatctcgctcacgtttggctcctgtcacttcacggttacacccaagagtagcgcaaacaggctactcttggagggaaattcacgcgcagaatggcgcgtgttgcgtgtattttcagtattttctcagtaactggcgtccattgggtcgtcaccgaagagcgcctcacgctcttcgtgggtggtggtacgcgattccaaccacccatacggcaagtgcaccttcttggcgaaacgcacgcggccgcgcggtttgtcgaccacgcgtggcgggtattcgatggtcgggtcgagcttgccgatctcgcggtccacatcggccaggctctcgcattccataaaggccttgcgggtggacccacccaccgggaaccctttcagataccaggcgatgtgcttgcgcagatcgtggacggccatcatctcatcgccctcatagaactcggtaagcagctcggcatgacggtgaatcacccggcagacctcgcccagattcgggttgagccgttcgggattgccctcgaaggcgtttttgatgttggcgaacagccacggccggccctgacatccgcggccgatggccacgccgtcgcagccggtctcgcgcaccatttcgagcgcgtcctcggcaccccagatatcgccattgccgaataccggaatgttgaggtgttccttgagctcgccgatgcgggaccagtcggaatgaccgccatagtattcggcggtggtgcgggcatgcagggttacggccttgcagccctcctcctgcgcgatgtgtccggcttcgaggaaggtctcatggttatggtcgatgccgacgcggatcttcgaggtgacggggatgcccgccggctcgcatacggcgaccacgcgctggatgagctcggtgaagatgtcggttttccatggcagggccgagcctcccccgcgacgggtgaccttgggtaccgggcaaccgaagttcaggtccacatggtcggccatgttgccgtcgaccacgattttcgccgcctgttcggtgatggacggattcacgccatacaactgcagcgaacgaattttttcgcttttggcgaaatggcagagacgcagggctttcgggttgcgcgccacgagggcccgcgcggtgatcatctcggccacgtaaagaccatcgggaccgtattcctcgcagatcacgcggaacggccagttggtcacgcccgccatcggcgaaagcaccaccggggtcggcacggtaatgttgccgagctgcacgggggcgatgtataccggagtctcgggccgtgccggcgcgtccatacacgggtcgagattgttggtctcgtgagtagcggtgatggtggtttcggtttcagattctgccatgtggttcctgttctgaaatagttttggctcccctcagtccacttcgtagacagctcccctcatagaggggagcctctatacagacccgtctttagtacagaccgccggcttcctgaacgccggactcaggccaagcctcgccgcccatttccacgggcttcaggggcacgcgggtgcgcttctcgccgatgcgggcggccacgtaatcggccaccttgtcaagagcgacgcgctcctgggccatggtgtcacgctcacggatggtcacggcgtggtcctcgagggtgtcgaagtccacggtgatgcacagcggggtgccgatctcgtcctgacgacggtaacgacggccgatggcaccggactcgtcgtagtcgatcatccattcgttgaagcgcaggtcgtcggccaggttctgggccacggtctgcagttcaggcttcttgctcagcggcagcacggcggccttgaccggggccagacgcgggtcgagacgcagcacggtgcgcttgtcgacgccgcccttggtgttcggggcctcgtccacatcgtaggcgtccacgaggaagcacatcagggaacgggtcagaccggcggccggttcgatgacgtacggcacgtacttctcgccggtggcctggttgaagtagctcaggtcttcgccggagtgcttggagtgcgcgctcaaatcgtaatcggtacggttggcgatgccttcgagctcgccccagtcggaaccttggaagccgaacttgtattcgatgtccacggtgcgcttggagtagtgggagagcttctccttcgggtgctcgtagtggcgcaggttctctggcttgacgccgaggtcgatgtaccagcgggtgcgggcgtcgatccagtactggtgccattcctcatcggtgccgggcttgacgaagaactccatctccatctgctcgaactcacgggtgcggaagatgaagttgcccggggtgatctcgttacggaaggacttacccatgttggcgatgccgaacggcggcttggaacgggaggaggtcatcacgttcttgaagtcgacgaagatgccctgtgcagtctccggacgcaggtagtgcaggctgttctcgtcctcgaccgggccgaggtgggtgcgcagcatcatgttgaagtcgcgcggttcggtccactggccacgggtgccgcagttcgggcagacgatgtccttcatgccgttttccggcatcttgtcgccgtgcttctcggcgtaggattcctcgagcttgtcggcgcggttgcgcttgtggcagttgaggcactcgacgagcggatcgttgaacacgctcacgtggccggacgccacccacacttcgggcggcagaatgatggaggtgtcgacaccgacgacatcaggacgggtgacgaccatggagcgccaccattcacgcttgatattgtccttgagagcgacgccgagggggccgtaatcccaagcggaacgggtgccgccgtaaatttcgccggcggggaacacgaagccgcgacgcttcgcaagggatacgacttcatcgagtttggactgagccacaatgcaccttctggtttgaacggtttggggtctaataacaaccgcttcaggatagccgtatacggtgacaggtcaggcggcattgtccggtatatgttccgcgtctcacgagcggccgttcgcagcgattcctatatcgcaaacacctccatattgttcctgttgttttgcccttccccaatttgtaccactgacatcgcgttagcgtcacaaattcgggagatgttgctcggcggaggcgtccacatatcacgaatggacgggacgcgccagacctgacgacacgtatcgaacaaatccgtcacgataatgtccatgttggcgcatagcgtcggcactgtagtgcagggggactcgcatgtggttcgcgagttgagaaaggcctgagcctgacccttagaacctgttggttaagaccatcgtagggagcagtaaatgagcaatagtgcatcatcgtttgccgatgtgtccagcggttgtaccgccgggactccggttccagccgattcacccatccgcgacaatatcgccgatgccgttcgccgcgtacgcgagacgactccattggcccagtcattcaccaattttgtgaccatcaatttggttgccaacgcgcaactggcggccggcggcactgcggccatgagtttcctgccggacgacgtgatcgaaaccgcgaaaatcgcgggcgcgaactacatcaacgtgggcacgctgctgccgttctataaggatgcgctgcccgaaatcgcccagcgactcaactacttggacaagccgtgggtgctcgacccggtggccgccggcatcggccacacccgcaccgccattcttcagaccttcaaggccgctcccccgaccatgattcgcgcgaacgcctccgaggtaatcgcgctggcgaacatgtgggggctcaataccgaaaccgtgggggacgcttccgagcaccgccccgccggagtggaatccgtcgacgacgtggagtccgcaaccggtgcggcggtggcgctggcacagtatctgaccgaacagcacgccaagcattcctcccatgacgcttccacccgctgtgcagtggctgtgtccggcatcgccgatctggtgaccgacggcgaaaccgtgtaccgactgccgggcggcagcgcgatgatgaccaagatcatcggtgcaggctgctcgctgggcggcgtggctgccacatatctggcggtttccgatccgttgaccgccgctctgtccgcatctctgctgtacaaccgcgcggcagagatagccgatacgacttcgcacgggccgggctcgttccaggtcgcgttccttgacgcgctgtggaatgttaccgccgaacaggtggcggaatccgagattttggtgcagtagtttcagttccctctgatgagggagctcataacagtttttcccaataagacttccacaagaaacaacaaaggtaggaataataatgagtaatgaatacccatacgcctccatgcgagacaacttcgacttgtccgcgtacttcgtggtggggccggaggactgcaaaggccgtccgctgaccgacgtggtggatcaggctctgcgcggcggcgcaaccttcatccaactgcgcgccaaggaggccgatgcctctgagctgaccgacatggcccgcgacatcgcgcagatcatcgaggacaatgagaagtccgattccgtggcctttgtgatcgacgaccgtgccgacgtggtgtggcaggcccgccgcaagggcatcaaggtggacggtgtgcatatcggccagaccgacatggagccgcgagaagcccgcgccctgctcggcgacgaggccatcgtgggtctgtcggctgagaccgaaagcctcgttcagctcatcaacgagctgcccgacggctgcatcgactacattggcgccggccctctgcacgtctccaccaccaagcccgaggcttccgtgggcggcaacgacggctccggcaagacactggacgccgcccagatcaacaccatctgcgctgccagcgaattcccggtggtcgtgggcggcggcgtgaccgcagccgatatggccatgctcgccggcaccaaggccgccggctggttcgcggtctccgccatcgcgggtgccgagaacccggaagaggccgcgcgcaccatggtcgaaggctggaaggccgtccgcggcgacaagaagcacggctacgcgccgcgcgtcgtagcccacacccccgctgctgatactcaggctgctcaggaaggggccgcaaagcctggctccgaggccactgagaagaagttcaccaacgccaaggacgccaaggatgcccagaagctcgccaagcagcagcgcgtggacatcgccgcccgtggttccaagcagcgcgacaaggcgcacatccgcaagaccaagtccgtaccgttcacctatcagtatggttcctacgacctggaagtgccgtacaccgaaatcaagctgagcgacacgcccggcgtgggcccgaacccgccgttccacgactacaacaccgaaggccccaagtgcgacccgaaggaaggtttgaagcccctgcgtctcgactggatccgcgaccgcggcgacatcgaagactacgagggccgccgccgcaaccttgaggatgatggtaagcgcgccatcaagcgcggccgcgccaccaaggaatggcgtggacgcaagcatgagccgatgcgcgccaaggaccacccgatcacccagatgtggtacgcccgccacggcatcatcaccccggagatgcagtacgtggccacccgcgagaactgcgatgtggagctcgtgcgctccgagctggccgccggccgcgcggtgatgccctgcaacatcaaccaccccgaggccgagccgatgattatcggatccgccttcctgaccaagctcaacgccaacatgggcaactcggccgtcacctcctccatcgacgaggaagtggagaagctgacgtgggccaccaagtggggcgccgataccgtgatggacctgtccaccggtaacgacatccacaccacccgtgagtggattcttcgcaactcccccgtgccgatcggcaccgtgccgatgtaccaggccctcgaaaaggtcgaggatgatgcctccaagctgagctgggagctgttccgcgacaccgtgatcgaacagtgcgagcagggtgtggattacatgaccatccacgccggtgtgctgctgcgttacgtgccgctgaccgccaaccgcgtgaccggcatcgtctcccgcggtggctccatcatggccgactggtgcctgcgccaccaccaggagagcttcctgtacacgcacttcgacgagctgtgcgacatcttcgccaagtacgacgtggcgttctctctgggcgatggcctgcgccccggctccctggccgacgcgaacgacgccgcgcagctttccgagctcatgactctgggcgagctgaccgagcgcgcctgggccaaggacgtgcaggtgatgatcgagggcccgggccacgtgccgttcgacaccgtgcgtatgaacatcgagctggagaaggccgtgtgcaagggcgccccgttctacaccctcggaccgctgaccaccgataccgctccgggttacgaccacatcacctccgccatcggcgccaccgagatcggtcgttacggcaccgctatgctgtgctacgtgaccccgaaggaacacctcggcctgccgaacaaggatgatgtgaagcagggcgtgatcgcctacaagatcgcctgccacgccgcagacatcgccaagcaccacccgcacgcgatggatcgtgacaatgcgatttccaaggctcgcttcgagttccgttggctcgaccagttcaatctgtcctacgatccggacaccgccatcgccttccacgatgacaccctgcccgccgagccggccaagatggcgcacttctgctcgatgtgcggcccgaagttctgctcgatggccatctcccagaacatccgcaaggcattcggtggcgaggccgctcagcagcaaatcgtgaaggaggctgctgctggcatcgactccgaggcactggctaaggccaaggccaatgtcgataacgacgtggtgtccgccaacgtgctcagccccgaagaaatcctcgccggcatggatgcgatgagcgaaaagtacaccgcccaaggcggcaagctctactccaccgcccaggagtaaacctctctggctcccctctctgaggggagccaattattatgcccggtggtgtcttaattcgggacgacgctcgactcgctcgaaggcggtgacgaggtcggcagcccggatcgcgccgcggcggtccttggcggccaccagagcggcctcggtccagatggcgcacacttcggcgccgctccagccttcggtccgctgtgcgatatccgccaacggcagttcgccctcgattgacagcgaacgggcctgcacctgcaaaatacccaaacggtcgcgctcagacggcatcgggaaaggaatctgccagtcgaaacggcccggacgcaacaaagcgggatccacgtcctcaatacgattggtcgcagcgaccaccacaacattgcccttggactcgaaaccatccatcaacgtcagcaactgcgccaccaagcgcttgccgacgccattggtatcgttctcgcgcgaggacgcaatcgaatcgatctcatcaaagaagatgatggcgcgcttgtccgcctgcgcggcggcgaaaatcatgcgcagcgtttcctcactatcgcccacatacttgctcacgatggtcgggccggacaccagatagaactgcgcgtccgccacattggcgatgatgcgggccagatgcgttttgccggtgcccggagcaccggtgaagatcacgcccttgatgggcttggcaccgatcgcacgcatctgcgcactgttgcccagctgcgtttcgataagctccttggcgcgcgtgatcacctgctcataaccgccgaacgaatcgaaggtaagcgacggatcgctgcccggcgtgatgcggtactgcttgatgtcgtcatcgtgatcggattcgcctgggcggatggccgtgggccacagcactcgttcgatgccgaacaggtcggtgaactgcacggtgttgccgggcatgatcgaattcgggtaatcgccttcaagcagttcgaggccgtcggaagtctccaggaccacgccttcgttgagcgcacggcgcacgatgcccacacggggcttcaacggccacacatcatgcggcactttacgatagaaatccgtgccgacgagcaacacgtcgcccacatcgaacacctcctgacgcggaaatgtgagctgtgtggtgtgcccattaggcattacgccaaaatatgcggtgcgttcatcgtcaaaaccggtgatgcgtaccaagacgccgtcacggcgcagtacatcgttatcagccatgtcccctcccgaacatttcatgaatcaatcgcaatcagcaaaccctcccatctcaccacaggagcggcaaaacatcaaggaaaaccgctccgaaaaacatcatgggccccacttagaatgaacactatggcacagattgcaacatctacacttcccgctgttctcgcgatctccggctccgactcgtccggtggtgccggcatgcaggccgatctgaagaccatgctggcttgcggcgtgttcggcatgagcgccatcaccgcgctcaccgcacagaacaccaccggcgtgcgttccattcaggacaccaaaccggacattctcgccgaccagatcaacatggtgtttgaggatattccgccggtcgcggtgaaaatcggcatggtgtctgccactgacatcatcgacgtcattgctgaacgactcaccttccatcacgccacgaacatcgtgctcgacccggttatggtggccacttccggtgccaagctcatcagtgacgatgccattgcggccttgaccggcaagctgttcccgatggctacggtcgtgactccgaacattcccgaggccgaagtactgaccgatacgctgattcgcgatcaggaggatatggaggccgccgcccaccgcatcgtggagcgttacggctgtgccgcgctggtcaagggtggtcatggcaccgaggatgccaacgatgtgcttgccgagacggatggaaccgtgacctggtttgatggcgcgcgtatcaataatccgaacacgcacggcaccggatgcacgctgagctccgccatcgcctcgtatctggcgcttggcgacacgttgcccaaggccatcaagcatgcgaagaagtatctgaccggtgcgctgaaggcccagctgaatctcggccacggctccggcccgatggatcatttctggaagtatcgctgacataagtgtggctgttaagctccccttgccaggggagcttaacactactgaaaaaggagaatcatggttcttgaccgtaatgccgttactcaggaagtgccgatcgacccggaaaccggcaaaccgtacctcaacaccgtggcagccatccaggtgtcggccaatggcgtgggctccgaggtttcaccatacgtggctcaggccgtcgaagtgattcgcgaatccgccctgccgcaggaaaccaacgccctgttcaccaacgtggaaggcaatctggacgacgtgctcaaggtggccggtgaggccgccaagaagctcgccgagcagggctaccgcacttctctggtgctgcacatggatatccgtcccggcttcaccggccagctgaccgaaaagcccaagctggtggatgagatcctcgccgacaagcaggcgaaatagcaaagcatcgcttccaccagcaagggcatgctttgttattacacgtttcatggggcggtaactcacccatagggcggtaaatatctcatggggcggtaaaaccctcatggggcggtaggcgaaaacggctctattctgcggaaaggcaaaatccgctaaccgccccatgggccaaataccgccccatgagtgttttaccgccccatgggaatcacggttttgccttctttcaacggggtaagagcgtaagtggggcatatataggagcgttacaaactctgttatcgttcataatgtgaccgcaacgcggcgtgccacaagatcgaacctatagttaagccccatgtagtgagctatctcacaacgattggctcgctacgtggaattcaagacttggactgcaaacgtcgttcatcccacacaatgggagggcgaacggaacacgcagtccaatcaagagttcgctcgccgcaacatcattgagcagttgcacgcgggcaggtttgcaagaagagggctcaaatatgactgctgctgaacagcagatttccggcaatcccgcggctatggaaagcgcacaagcacgtaccaccgtgacggatcaagccaaggttcaggatattatctcgcgcgtggatcgcgcacatgaaaccccgatgttccatcgcatcgtggcgctggtcgccgctggcatgctgatggacagcatcgacgtatatattggcagcgccgttgcctccagcgcgttggccacacactggtccaccgttgcacaaaattccacctttatgtccgcaggcttcctgggtctgctggtcggttcgctgctggccggcttcgtcggtgacctgaagggccgccgcgtggcttaccaaatcaacctgctgctgtttggcggcttcaccttcctcggcgcattcgccccgaacatggccgtgctgtccctgtgccgtctgggtgccggcctgggcctcggcgctgaaatcgtcaccggcttcgccatggtcaacgagttcgcaccgatgaaccgccgtggccactggtgcgcgattgtctcgctcgtggccaactgcggtgtgccgatcgctatgctgctgtgtgcatggatcatcccccgctggtcctggcgtccgctgttcgtggccatcggtctgggggccgccatcatctggtggctgcgccgcgacatccccgaatccccgcgttggctcgccgtgcacggccgttacgatgaggccgacgccatcgtcaagcagcttgaggccaacggctccgaactgatcgacgcagccgccaaggccgacaccagcgacacccgcaacgccggcggccgttcgctcggcatctgcctgcttgtagctgtggttgctgtggccgccacgaacgtgtgctcctacgccttcacttcttgggttccgacgattctggtcaagcgtggtattaacctgtccagctcgctgctcacctccacggcgatgatgctcggtgccccggtcggctgcctgattggctctctgcttatcgaccgcatcggccgcaagcgcacgattgtgccggccttcctgttcactggcgtgttcggtttaatgtatgccttccagacctctaccgtgagcgcaattatcgttggcttcctgctcatgatgtgcctgtacgtgcttatggcttccgtggtggctgtgtacgctccggaactgttcgccaccaaggttcgcttccgttgcgtcggcttcgcgaacgccgtggccaagctgctcaatgtgttgatgcctatggtggtgggttggatgcttacctcgcttggtgccacgtccatctttgtggccatcagcgcaattgctattgcatcgatgctgattgtcggcttctttggcgcggagactgcgcagaagtcggttgggtgatcggtttcctcacagtggaataactgctgataatgtccattcggcgtcttgcgtggtgatatgcagggcgccgttttgttgttctagtaattgtcggtaacggttgagaccggtaccggtggataggtccgcactgccatccgcatccgaatccgatgacgtgcgggccgtgtcgatgcaggcgatgcggacggtgtccagtccgatgccaatcgtcattacatagcccgcttccgggtcggcatgtttggcgatgttgccgtacagttcctccagcagcccggcgatcaggccactccgaccggctgcgccatgagcaccggaaataatcgtctgaccttcaaagccaagctctgataatcggcggtcaccattgctcgcaacatcacgaatttgctcggctagcgggcaatcagcgtctgtgatgccacatgcaatgccagaagcggcatcaacggtcgaatcatgcggagtcactgcactgtgcgccgcttctcccctgccttcaataacatcaatgacctgatgcgtgcgatccaatgcgcccatagccacgctacgcagttcgcgtaattcttcttcagaaggggtcttgccatcggcaatatccttgtcgaatcgcaaaatcaggtatgccaaatcattggatacgtaatcgtgaatgtcctgagctgtgcgttcctgctgacggcggtgagccaactccgctcgagccaagctgcgttcgtgattccatcgcgccgccatgccaccaagcatgaagccaataaacaacacggccactggcatcacaccatagagggcaatcgcaccaagaatcacttgcccagtgcgatgctcggcagaagaaccgctcgattcataggcgcttccggtgaagtcgcttcccgactgccctgcgctgtcagacccactggatgaagagccaccatcagcagcgccaccatcagcaacactaccgtttagggcactactactcgccgcgccatccgcagaaccgctcatcgtgtctgagccgccatcaagccaaggaatggccacgccaccacgcgacaacatccacaccacaacggcaatgccggcaaccgccagcgccaatcgcttatcggcgtatccggcaatacccaccgccaataacacggcgagcattgcacccgacggcatccagatcggactcatgcacaacactatccaagccaccgctaccgccacgcatccggtgaccggacgaaacgccatccaccccacaatggcaacgaatatgaactccgcaaggcagtccgccgccgagacactgtcagcagccaagcccgccatggtttccatcgtgcatatcaaggcaacaaccagtatggcaatcaacagccatgcattgcgaacaccgctatccagctcggccaatcggtgtcgtaacgctttcatagcagttcctttcctaccatccatgccgttgcacataccgcccatgccaactcttaaatctcatgccgtttcacgcagattgatatggcatgagcgcgactgcgagcgccgagtttggcgagtgcgcggcgttcaaaagtcgccacagtggccacgctgatgcccaatcgctcggcgatttccttggtggtcgacccatccgcatacatacgcagggtgtcgcgttctttgccggaaagcgcgccacggtgcgcgtatgacgtatcttcgagcaccgcgtaggcggttgcggcatccatgaaggacagcgaattaccgctcccctcatctcccagtaccagctcattggtcgacaatccttgggctgcattgcgaatagcgagcgcaatgccgttcaaatcggttttaccaaccaaggcctgcgccccgcagcgagccgcctcgtcgtgaaatgacgcgagcgcgtatgaggtgacacccaccagcccaacctcgggtgttttggtacgaatcgcacgacagacttcggtaccgggcacgtcgcccatagacatatccgtaaccagcacgtcaggccgcttggtggggctcaggcatcggctgatggccacggcacccaaatcgcaggtccatatcacggcaaaatcgctggacatgcgctcgattagcgcgccgaacactttcagcgcatacgggtcattgtccacaatgccgatgcgtatgttgcggttgcgcgcttctcccattacattcaccccttcagtgtgcccgacgccgaactgctccgtcctgacatgtcatggtcactatgacaactatcattccacatttcctgcgcgatttacgatggaatcatcatcaatccttgacaaggcggtaaaggaggactgcaatgaaccgtgcacaagcactcagcaagctcaacaggagcgatatgcgcaatgccgccgccgagcgcgggacgcaacgaatattcgcgtggaaccgcgcgcattggattggcatggttgtactgatagcggtgttgttgctgctgcagtggagctcatcaatgtatctcatgcccgacgaggtccttgacagggctgccaaaaacctgttcgtatggttccccggtatggttctgcactggccattggtgttgggaatcaccaacctgatactcggttcgatacgatccggcagtctgtctttcccattggcgagcgcaatcatcggaccgctggcattcggctgtaccaatcttcgcttacggccggggttcccataccgttcctgggctcagtggtggaagctaatgcacgctgaaagcggccatcagctattggttcattcgttgatcggctcggccatgctgttgatctgttatacggccgttgcgttcatctgctatgcaatcggacgctacggtctgcgcgaattgtttgtggatccgaatccgcagacggcgagcggacgactgctcacatggattcgtcaggatgcgattcgcttcggctgctggctggcgacggcaatcatgtacggcttgctattggcgctgaccttacggggcggcatggctgcgatggccgccgcgttgctaatcaattttgtgattccgcccgccttgctggtcatcaacggcatctacgcgctacgcccggcctcactgacgtatccgtggaaaagcctgctgttcccgttggcgtgcacactggtacctgcgccgatgctcatggcgctcatcacggtgtatgaagacacgtgcccgataggaagtacctgcacgctgatcggcgaccgatacctctcctggggctcgatggatcaggtcttgcatttcgtcatcgtgttcgccgtggcgagcttcctcggattcggcgtggtgtgggccgtgcggtggattgtggctcgtcgcacaaaataagagagaccaaaatatactggaatcaggggcttcgtgcaatgatgcacgagccgatccaagcaaaggggctgaccatgagcgagaaactgatggaacagtaccggttgcgcaaacaacgcaaacgccgtaacgcttgtatcgccgccatcgtgacagtagtgcttgtccttgccgtcgccggcggcgtatggtggacggccggcgatggcagcgcactggttcgcaatatgttcaagccgaaggccacgcctgccacacagccggtagtcgacagcaccgcagccttcgcctaccgcaccgcaccggaattcctggcgatgggagccggcgaccgagacaccggtaatgtgaactactcccctgcttcgatgtggatggcgttggccatcgccgcgcagggcgccaatggcacgacccgctcgcaactgaatgagctgctgggctccggttcgctggccgacagcgactaccaatcgctgctgagttcggtcaacgggcaatattcgggggcgaaatccgagatgagcgccgcgaactcgctgtggatcgataacgactactcccttgccagcaattaccaatccaccgtcaagaaaatgttcgaggccgaagtcaccacgctaccgttcgacgatcaggccgccgccaagatgtccgattggattgccaaacatacgaatggttcgctcaagccgaagatcacgctgcgtgaccgtgaagtcctatccatcatcaacaccgtctatgcggatggccgctggaaggatccgttcgaagagcagtccaccggcgacggcaccttccacggcgaagccggagatgctcaggtgccgatgatgcaccggaccttcagccaaatgacttacagccatgatgagtacaacacttggcagcgggtggagattccattcgacaacagcggcaatctggccatcgtgctgccggccaaagggcatttcgacgagctggccggcaatgccgagaaactcggatgggcgttcggcacgtgttcgtcggcatcccctggcgaggacgcaatgggttgcaccgcggacagtttgcccggatggggcgtctccgtcaactcggccacggtgaacgtctcgctgccacgattcaccgtcgacagcatgttcgactcggaagccaccatcaaggcattcgaaaaactgggggtgaccgatgcgttcagtgcaggcgacgccgacttcaccaagatggtcgacaccgattcgcacggcgagaatctgtatatcggttcgattctgcaaggcacgcgcatcgaggtgaacgaggccggcgccaaggccatgtccttcaccaaagccggcgcagacttcactagcgcgccggtggacaacatcgagttcacggtggatcgcccattcctgtattcgtacgtcaccccggacggcataccattattcatcggtgcggtgcgcaacctcggcggagtcggtggagaacactgatactttcccgacagtccgtcaattagggtgtatcgtttgacgcatggctacgatgaaggaaatcgcgaacaaggcgggggtttccgtctctacggtgtcgctggtgctcaacggacgcgacgaggggcgcgtaaagtccgaaattgcggacaatgtgcgcgccatcgccaccaagctcggctaccggtcgaatccgctggccagttcgctgcgtacaggcaagacgcacatcctcggtttcatcagtgaggaggtggccaccaccccgtacgccggcggtatgattctgggcgcgcagaccgccgcaagccagttcggctatatgctcatcaccgtgagcaccgacggtgagaacagcgagagcgaggaaatcgccgcactcaagcgatacggcaccgacggtttcctgtacgccaagatgtcgaaccgcatcacccatgcgccttcttcgctggccaagacgccactggtgttggtggatgccaccgactcgcttggcaaaatcccgagcgtggaaccggacgagttccgaatcggctacgacgccaccaccagattggttaaggccggatgcgcacgtatcgcctatgtgggttgctcggaaccgatgattgcgcaggatggtcgtttggaaggctatcaggcggcgctcagggacgcctgcctcgactatgacgatcgtctggtcgtcaatgtgctcaataacgggccggcactgaccgcagtcagcgatttgttcgacgccgagcatccggacggattcttctgcttcaacgatgcccgcgcctggtatgtgtacgaatgcgccgcacgccgaggactcacggtcggcaaggacatctccgtgatcggcgtggacaaccatcgcgtgttcgccgaaacgctggaaccgatgctcaccactgtggaactgccgcatttcgagatgggctactgggccgtggccaagctggtgtcaattatcgaaggacgctcgatggacgacgtctcacggccagcgaccaccgctcccctgccgccgatcgacgcgccgattccggcgaagatccactgcacgctgatcgaaaaggcctcggtgaagtaaccgaggcccacacgatttctcaaggcctccgtccagcacggaggcctttttgcatgtcgaacaggtacgacacgccgatgacgtaaatcgattgacgtaaatcgattgacgtcgcatagtcaataagcaacaattcaacaatcgcaagattcatcaatcattaagaaaggctattcaacgatgactggcttcactccggatgcacccgtcctccacgaaatcaagaaccacagcgaagctctggcacaggcggaagcaggcgttgcagccatggccgccgaacgcaacaaccgctggtacccgaagttccacatcgcatccaacggcggttggatcaacgatccgaacggcctgtgcttctataagggccgctggcacgtgttctaccagctgcacccgtacggcacccagtggggtccgatgcactggggacacgtctcctccaccgacatgctcaactggaagcgtgagccaatcatgttcgccccgacccttgaagaggagaaggacggcgtattctccggttccgcagtaatcggcgacgatggcaagctcaagttctactacaccggccaccgttgggccaacggccacgacaacaccggcggcgactggcaagtgcagatgctcgccgagccggacaacgacgagctgaccagcgccaccaagcgcggcatgatcatcgactgcccgaccgacaaggtcgaccatcactaccgcgacccgaaggtctggaagaccggcgacacctggtacatgaccttcggtgtctcctctgcggacaagcgcggccagatgtggctgttctcctccaaggacatggtccgctgggaatacgagcgcgtgctcttccagcacccggatccggatgtgttcatgctcgaatgccccgacttcttccccatcaaagacaaggacggcaacgagaagtgggtcattggcttctccgccatggggtccaagcccagcggcttcatgaaccgcaacgtcaacaacgccggctacatgatcggcacgtgggagccgggcggcgaattcaagccggaaaccgagttccgcctgtgggattgcggccacaactactacgccccacagtccttcaacgtggacggccgtcagatcgtctatggctggatgagcccgttcgtgcagccgattcccatggaggatgacggctggtgtggtcagctcaccctgccgcgcgagatcacccttgacgatgacggcgacgtggtcaccgcgccggtcgccgaaatggaaggcctgcgcgaggataccctcgaccatggttcgatcacgctcgatatggatggggagcaggtcatcgccgatgacgccaaggccgtggaaatcgaaatgaccatcgacttggctgcctccactgccgagcgtgcgggcctgaagattcatgccactgaggacggtgcctacacctacgtggcttatgacgaccagatcggccgcgtggtggtggatcgccaggccatggccaacggcgatcgcggctaccgcgccgccccactgaccgacgccgaactggcctccggcaagctggacctgcgcgtgttcgtggatcgcggctccgtggaggtctacgtcaacggtggccaccaggtgctgagctcctactcctacgcctccgaaggaccgcgtgccatcaagctcgtcgccgagtccggctccctcaaggtggattccctgaagctccaccacatgaagtccatcggactggagtagctctctcacctccctcacagagggaagttttttgtgtgcccctgtcgttcgccttcgcctatactgatggacggcatataacacaatccatcacacgaccggcaggcgcgcaggctcctcaccttactgttccacgccccggccgcaagcgccaccagcaaaccggactggcgcggaaagcaaggtgacatcccatgtccatcgccaagcgcctcaagcgccgcatgcccaccgtcatcgccgtcatcgtattgctggcagtctgggaaacgtgggtggatctaggacatgtctcccccacgatgatctccgcgccaagcgagattttcgccgccaccatcgaaacgtggaacacgctcggcccggccgcggcgatcaccggctatgagggcgtggtcggcttcctgttcgccgtgttcttcggcattatgatcggcatcgcactgtactgctcgcacacgttcaacgcggcgttctatccgctgcttgccgccgcacaaaccatgccgctgatttccatcgccccgttgttcctgatttggttcggctttgagatttccggcaaaatcgtaatcgtggcggtattcggcctcttccccatcgccgtgcagaccgtgcgcggactagaagcggtgccccagttctattccgacgtcgcattgacctgcggcgcgaccccggtctggacgctctggcacgtgaagctgcgcgttgccgcacgtcagatctatggcggtatccgcgtatctgccgcatacatcttcgccacggcatccaccgctgaatatcttggcgcgcgcaagggcctcggcatctggctgcaggctgcctacaattcgttccgcacgccgctgatcttctccgccaccatcgtcattatcctgatgacatgcgtactgatgctggcggtgaacgccagcgagcgcatcctgctcggcccggccggcgatgacgaagaccccgacgcggaccagtagttctttttaccgtcaaagacacaagccggcggccagaaccgactgaacggggcggcttctcatgaggtctccagccctgtctctataatggaacagctttaccagcgtgtggcaaaccggctttcttgagctttcatagggaatgtcgggggcgctggtcgaacggaaatcaaggccctccatatcgttttctgccgacttccgttcgaagcaatcccagagaacgatagagagacaacgaattagggaaccatcattatgaagaaaagccttgtatccaaggccgctgccctcgtgggcgcccttgctatgactttcggtttcgccgcatgtggtcagaccaacaccgccgactcctccaactccaacacctccgacctcaagaaggtcactttcatgctttcctgggcgcccgataccaaccacatcggcgtgtacgtggccaagaacaagggctacttcaaggacgccggtcttgacgtggatatcgtggccgtggcccaggccggtgccgaacaggccgtgaacaacggtgtggccgacttcgccctgtccaacttgaccaatgtgggcatctacacgctgaagggcgctcacatcaagcaggtgctgcaggtgcagcagaagccgagcgccatttggtgcgcactggcgtccaacaccgccatcaagtcccctaaggatttggatggcaagaccttcgccaccttcggctccaacgagtccgacgccgtggtgcgccgcatgatccagaccgacggcggcaagggcgagttcgacaaggtgaccgtcggcacctccaccttccagaccatggaatccggcaaggccgatttcggcggcttctacgccacgtgggaaggcgtgcaggccgacatgtacggcccgaagctcaactgcttcaccgagcctgactacggcgtgcccggcaacgccgacgccatcggcatcatcaccaatgacaagaccatcaagaacaatcccgacctggtcaagaagttcactcaggccactcagaagggttacgagtacgcgtacgccaacccggatgacgccgcgcagattctcgtggacgaagcccctgacgccaacctcaagcccgaattcgtcaagaagagcatgcaggttatcgtcgacggccagtactggggcgatccggccaagatcaaggacggctctttcgtgctcggcaccaacgacttcaagggcactcaggaatacttcgacttcctggctgaagaagacgcctacaccgacagtcatgacaaggtgattcatgaggccccgcaggccaaggaccttggcaccgacgaattcctcggcaagtaatttccgatattccgagtttgaatctacgcaaaaatgcgtccttcccatgaggaaaggacgcatttttgcgtatcggccgataaggttattcatagcgaatcatgctaacaaggaggcgattccatggcccaacgtcctgaccgcattattgccagcatggataccggtgttgatgatgcgttggcgttggcgtatttgttggggtcggcggatgagtgcgagctgagcggtgtgatcgccagttatggcaatgtggatgcgaacacggcttatgccaatacttgcgcggtgcttgatttgtttggccgggcggatattccggtgtttttgggctccgagcatccttcttgggctgatgcgtttattcccgatgcagggtgtgcccagtttcatgggaaggatggactggggaatacttggctggcaggggccggggctctggctgatggagctggtgtgcctggtgatgacatgtctggggatgacatgtctgaggatgtgcccgatggggttgtttctgttggcgggtatttggtaggggacgctcatgctcatccggcgtcggggtcttgttctcgtgtgggtcgctctcggcctgtggaccgtccccagtcggctacatcgacagctctcgccagctggggcaaaaggaggcgctccgttgatgctgcggatgggattgagtatctgattgagcaggttcgtgagtttggccgagacgttaccgtgctggctaccgggccgttgacggatgtggatgcggctattactcgggcaccggatattgcaccgaaactcaggctggtgatgatgggcggtacgcttacccaacccggcaattgttgggatacggtggccgagacgaatatcatccaagaccctgaggccgcgaatcgtgtatttcattccggcgcagacatcacaatggtgggacttgatgtgactcaccagtgtttgctaccgcgatcggcggccgaccagtggcgtgcgacggggaccaagcgcgggcggttcttggctgatctcgcgaacttttccatcaaggcaaatttggaagccgaccccgcactgttctctggcggcatgccgttgcatgatccgttggcggcggcggttgcacttgattcttcactggtcgattgttttgatcttgcgttgcgcgcggagaccaataccggtgatttcaatggagtacgaggccggaccaccggagacccggttgggctggtgaatcattccatgccgcatgtgcatgtggcacttggtgcggattcgggacgttttttggatgagtttgcagagaggatggctgaggtgtgccggtaactcccctcagtccgctacacggacagctcgaccgcaattacggacaagctgccgctcgcattcttctggctcgactctcgtctcgccttcgcctacaaacagcccatcgggctgtttgttttacggctcagccccctcaattttgaggggcttaacaaggactatttcacacccccagcaatcaaggaccggcttcgccggactcatcattacctggtcatgtcctatcggcctcggccaggcggcgtgaacgaacagtccaccggactgttctttatttcacgccgccaaatcgtcgatcgcggtggatgtaatggtcgatggagcgccatagcacgtcacggccgcagtccgggaagagttcgggcacgaagtcgagctcggcgtaggcggcctcccacggcaggaagttggaggtgcgctgttcgccggaagtacggatcaccaagtcgcaatcgggaacgtccggattgtacagatggtcggcaatcatcttttcagtcacacggtcgccggaaatcttgccatcacgcacttcgcgagcgatggcggcgcaggcgtcggcgatttcagcacggccaccatagttgatgcagaacaccacatcgatgaccttgttgttcttggtacgctcctcggcggcctcaagctcgtcgatcaccgacttccacagcttggggcgacggccggaccaacgcacgcgcacaccccactcgtccatctgttccacgcggcggtggatgatttcacgcgagaagcccatgaggaagcgcacttcctggggcgaacgcttccagttttcagtggagaacgtgtacaggctcaaataccgcacaccggcttcgatggcaccggcgatagtgtcgaacaccaccggttcggcggcctgatgaccattggtgcggaccatgccgcgctgcttggcccaacgaccattaccgtccataatcacaccgatatggcggggtaccttgttcttggggaagtcgggaatacgggcagggtcgctgaacggagctgcgggaatgtccaacgacgtgtaatcaacgttctcaaaagccatactcatgaatctatcaagcgcagcgaacgaatcgggcgttcgaggtaatactccccccaatcttcaaccaactcctgcacaacccgctccacaggcgcggcatcaagcaccgaccaatcgccacgaatcagtgcatcgaactggtttaacacgaacggcgcgatacggcgcgcatcggtagtgtggtcggcttcgcacatcacgccgccggacgcgatggacaggtacgccggctccgccttgccgcataccacgcaagtacccaatcgtggcgtccaaccggccaaggccaaggcgcgcatcacataggagtcgcctatggcttgcggggcgtgggattgtttggcgagcgcgttcaacgcgccgatgagcagccgatattggttcgtcagctgctcgtgttcggtgctggcgagtttatcgatggtctcgacgatgacgttggcggcctcatacgccgcataatccgccgcgatcggagcaccgtaagcggcgaccgcttcagcctgggagaccacgtcaagcgagcggccttcagcgataagcacatcgactcgcatgaacggctcgagcctggcaccaaagcgtgatttggtgcgacgcacgcctttggcgaccgcccgaatcttgccatgctcacgcgtcaggatggtgatggtacgatcggcttcgcccagtttggaggtgcgcaacaccacaccttcgtctcggtacagcgacatctcatctcctttccccgcgacgcccggcagactctactcaatgaagtagtcagtaaataaacaggccccagaaggcgaacaccaacagtatgtacagcatggtgaaggccaccagccagaacaggactcggcccagacgggtggaggcgagtaccgggtcggcaccggtgacgatgtctcgaacggattcacgacgagggggtatctgaatcagtccgcgggcggaagcgacctctatcagatgcataaagacgcgggaccaagcccatagcaccagcacggacaccacttggatgaccggccagctccaatacatgacgcccggcgtctcggtaggagcgctgccccatgcaagtttgaccacacccataatcacctgtccaagtccggcaaagaagatgagcaatgtggcaagagtggtgagggtcaaagtcagcagcgcgttgccgaaaccatgtgcgaaaccgagtatcacaggccgttccggtatcagcatgcccgcacgtttggcctcgcgtttctcgcgccgccatcgggcatccgccgcgattttgcggcccagcgccaccagtgccagcacgatggatgcgagcagcagcagtaccaccgtgacgtgcaggatcacaccatatatggtgccgacgcgtcttgccttcaaagcgcccgggagaccgattgattggtacagattggtgccggccaccttttcgctggtctgcgtgagtccggcggaagtgccgacggcccaatcgatgagatcgtccacataggcgtccgcaaacggggtgcccgcttcggactcatcccccagacgcagcacatggttggcgaccggatagctgcgcacggtcacgttccagttatcggctttgtgggcgttgtagagaatcgcacgcacgccgtcgacctgcgccgtcatcacgtcttttgaaccgtaagccacataggtgggtacggcgtaagcggcgggtttgagcgtggcgaggtcggaattgttcagtccgaacaggccggtgtccgcgctgaacacgcgttggacgatggatcgatagccctcgttcgcgccgacaagagtgaagtcctgggtgacgaaaaatcccagtgattggcgtgggctgaacaccatcgggctcagaagaatctggaaggcgacgtccggatcgtcctcgagcagatatgaggagatccatgtcgattcggaggtggcatagatgccgaccttggcggcgtctacatcgctttgggctcgtaggtattcgatgacctgatcatatgccttggctgaggccggataatcgcggttgatgtcggtggtgctccagacgggtttgtcgagcactgcggtcacaaagccggccgaagccatatcggaggccacgtcgccaaaggagttgtcacaggtgccgtatccggcaccgtgcatgaacaccacgccggggcgcttgcctgatgcgttctgaggttcccgaatcaataccttgatggcttggacgccgtccgcattggccttgccccgatcaccaggctccttggtcagattgccgtcgctggtcatgttcagcgtgatgtatcgctcggtgacctcatacgtgcctttcgccggcagcgtttctccggacgggttatcgaaggtgacttcggtatcgtcggtgagcgtggccatcgactggccggtgggttcgatgttccaaggcaccgtggtcaggttggaaatggagaccagcacgccgatcaggataatgaagatgggcaggctgaccatcagccggtgggtgctggtccacggcttggatcgaacagtcaggcgatgctcttcttcttgcgacacgtgcgctattgtaatctgaccgcgatatttacgccgagggcctattcggccgaatcagtgaccgggatgctggattgggaccacgaccgggcctgtggaattgacgggcacttggccgtcggcctccatttgggcggcgatatcgttcgctatggtgagcagcgtgtcgacgatctggtcttcgggcacggtcttgatgaccttgcccttgatgaagatctggcccttgccattgccggaggccacgccgaggtcggcttcgcgtgcctcgcccggaccgttgacgatgcagcccatgacggctacacggatcggcgcggtcacgtccttcaggccttcggtgacggcggatgcgagctggatcacatccacttgggcgcggccgcagctcgggcaggagatgatgtcgaacttgcgggggcgcaatcccatgtattccaggagtttgcaccccaccttgacctcttcgaccggcggcgcggaaagggacacgcgaatcgtgtcgccaatgccctcggccaagagcgcaccgaacgccaggcaggatttgatggtgccttgccaggcggggccggcctcggtaacgccgaggtgcaacggccaatcgcccttggatgcgagcagtcggtacgtttcaaccatggtgatgacgtcatggtgtttgacggagatcttgaaatcgtggaagccgacgtcctcgaacatgtgcgcttccttcaaggcggaggccaccagcgcttccggagtcgggccaccgtatttggcgtagagttccttgtccagcgagccggcgttcacgccgatacgcagcgagatgcccgcgtcggtggcggccttgcagatgtccgggccgacttcgtcgaacttacggatgttgccggggttcacacgcacggccgcgcagccggcgtcgatggcttggaacacgtatttggactggaagtggatatcggcgatgaccggaatcggcgatttgcggcagatttccggcagtgcgtcggcatcgtcctgactcggcacggccacgcgcacgatgtcgcagccggcggcggtcagttcggcgatctgctgcaacgtggcaggtacgttggccgtgagcgtgttggtcatcgactgcacggagatgggcgctcccccgcccaccggcaccgggcccaccatgatgcggcgggacttgcggcgcgggtgcaagggcgattcgctggtcaggtcgaccggatcaccggttttgcggaacggcttttcgatgggattttccgtattcaaggtattcatcattgcttgtttatcaggtcgtcggcgcgtcggcgggcttcaagctcaagttggttcatttcctccacgtccgtgaacagcgggttaccacgaagctcggcgtccatctggtccagcacggctttgaccgtgtccacgatgccgaggtacggcagccgatgatcaagaaacgcatgcacggcctgttcattggctgcattgagcaccgccgtatgcttctcggaggcggccaggcagtggcgggccagttgcacggcggggaacgcctcatcgtccaacggctcaaaggtccaagttgcggcttgcgtccagtcgcacgcggcggccacattggtcatgcggtccggcgcggacaggcccagcgcgataggcagacgcatgtctggcggcgaagcctggcaaatcgtggcaccgtccacaaattcgaccatggaatggacgatggactgcgggtgcacggtcacgtcgatgcgttcaggcgacacattgaacaagcgggacgcctcgatgacttcgaggcccttgttcatcagtgtggaggagttgatggtgacaaccggccccatgttccacgtcggatgatgcagcgcctgctcgggagtgatgttctccatgtcgacacgtttccagccgcggaatgggccgccggaggcggtgaccacaagcttggcgacttcggcgtgggttccggagcgcagggattgccagatggcggaatgctcggaatcgaccgggttgatctggttctcgcgcacttgcgcgctgaacagcagatgaccgcccgcgactacggactccttgttagccaatgccagctgggaaccggccttgagcgccgcgatcgatggttcgaggccgatcgagccggtgatgccgttcaatacgacattcgcaccggatccggccatggcgatgaccgaatccggaccgccggtcacgcggacaccttgtacgccggcctgtgcgagagccgcttgcagtgctggaaccttggtctcatcaaacaccgcgacttcgggcacatggaactgtgcggcctgttgcgccagcagctcgatatgtgctccgcccgccgccagaccggtgacggtaaatcgttcagggtgacgcgagatgacgtcaagtccttgggtgccgatggatccggtggatccgagaatgatgacggtggagttggaggctatgctcacttttccttcttcgtatcgtcattgttcagtgtggggaacgacaggtcggggatatccgaatcgaagttaccgccaagcgggaacagcagcgggaacgaatcgttggaatcgtgcttatcctgtgacagctgagctgcttccgtgtcgtgggaggcggcaacgtattcagatgattccacagccggacgggagaccgtgctgtctgcaggctgactatcggatacgcgaaccggaatggagttcgtgttacgatccggcttgctggtgggagcaaaggagaccggcatggcagcggacgcagcctcgtcggcagtgctattcacaggttgcgctgccggggcggagggtgccggggatgaaaccgaacccggtacctcattcaatttcagcgcattcggtgtatcaaggctgggcatcttgggagcgaaggacggcgcatccaccaccggaagttcctgagaaaccgcagccatgtgggcgagagcggccagagaggaatcgttctgcaccatatccacgggctgttccgcgaacaccgacggggtcgatgacggagctgcggattcgtatgacgactgtgccggagcaaacgagggggcgctgccagcggtcacaccggaaaccggcgcggacggggcactggcgggaggctcagccgcaacagctgcggtaggagccacggaaggcgtctcggagacgggcttcgccgcagactcgttggacgtatgcaccgggtatgctgcgggagcaaaggaaaccggctgttccgcattggtgttattggtgcttgtggaagcatcgaacgatgcaggagccggcgcataggcgatcggtgccgccgcggccggcgccgcgggagcaaccggagccggagcagtgaacaagctctgctcggcctgatgcagggcatcgaatgattcgtcatgagcagcggcagacggcgcaaaacgttcgtcagttgccgggcgctgcgttccggaagcgaacaatggcgagacgccgttcgcttgaacggtcacgttcgtggcggtctgggcaggagccgtgggctcgccggacacgaaatcggccacacgtgcataggattccaagcgactcagcaactgcacgcaggcgttcaggaagtaatcgacctgtcgctcgtcatagcctttcttgcccttgcgctgggtgaagatcacattgttgaccgtattcgcattgagatcggccaaagaccgtacatcgtcttcggtcacgccgtcaacgcccaatgcggccgccgccttgtccacaatctggtcgaccagacgatccacctgcttcttatcgtacgaaggctgcttgggcgctccggacttgaagcgttcgcgctcgttacgctccgcatggttctggacttcgtgatacagcttctcggtcttcgccttccacgtcacacgcccatgctgtgcgatctcccatgtggtctgcttatcgaccacggcacgttccagacgtccaagcgcggcgtcaacctgtgcgatcacatagccgttcttgcgcaaatcaaaggacacgttctgaatgtcatgctgggtgagattcatgccctcgctgtcatacagagcatgggcgcgctccaagaaagcgtccacctgagcggggtcatacccccacttgcgcttgcccgcacgtgcgatgcccgacttgccgtccccttcacgaagttcctgcgccatcggctattcgacctcctgctggatataaacactctgccacaactttacgtgactattgagacgcatctgaccaagaagaccgaaattcacgattttgtagcagtactgccggtttccttctgcgcgcatctcactgagatttcagaaccccttgccgaagactgtcagggaatatcgtcacagcccatgtctgtggaatgaggggattgcacgaagtgatgaaaaatgaaagtgggcaatgagggactcgaacccccgacatccaccgtgtaaaggtggcgctctaaccaactgagctaattgcccgcaaatgacaacaatagcgtatggccggcactgcgcgacacgtggtgtcgcatacgcgtgccgtagcgctcaatcgcgatgacattcagtcacgcccagcagcactacgcagcacgcgacgccagtcaacacgcttaaagtcaagcgtattgattgaggcttatcagcggcccctgccgaatgcgcgcaggcggatgccgttccagtccgagctgacggtcagcggggtggcggcgttcataccggcggtctgtgcggcggactgcacggtggaggagctggcggcacccgggcggccgggcttgggagtcagtatccacagcgggccgtcattgcccagtaccgcgtaggcgtcaacgatcgtatcggacaattcgtcctcatcatcgccgtcgcgccaccatacgatgacgccgtccacagcggagtcgtagtcctcgtccacgagatcctcgcccgtgagctcttcaatctgggcacgaatggaatcgtccacatcgtcgtcccagagccactcctgaacgatatcgccgggctcgaaaccaaattcttcagcgttctgtgatgccgtttgattcacaggggacacattagcaagtcttcgcgaacaaatgcgttaacgcggccgaaaatcgccgcattgtgggcagacccatgcgagtcgtctcaccagaaacaacgactggccgcgcgtgtcatgcctcgcaatgaggcaaatcgtcggcctgccccttgccaatggccaccaacgcctgatacgcctcgtccagcgtggcgaccttgacgtcgcgcagaccatccggcacgcggccggccaaatccgaacaattcgatgcgggagccaggaaccatgtggcgccatcgcgcttggcgccaagcatcttcagctctatgccgccgattctgccgactttgccgtccttgtctatggtgccggtgccggcgatggtcttgccgccgctctcgttggcgggggtgagtttgtcgatgagaccgagcgtgtacatcatgcctgcggacggtccgccgatgctgtccacgtgcatcgtcaccttggcgtgttgcaatgtactggcgtcaatgcccagttcgtccgcatgggctttggcatacgccagaccgacggcactggccgaatcctgggaaccggccatgtcctgttcgactttcttctgatactggtccgcactctggcccaccggtaccgtggcctcacgcggcatgacctccacctgcggattggcccaaccccagacggcctgcgcgttgatgatcgggtacccgggcacgccggacgcgttcaccgtggtcagcagcagcttgccggaatccttatacgtcgtcacgccggtaccggtgatgtcgataaccgcaccatcctcgaccttgcccagcacgtcttgggtgggtccgggcatctcgatgacgtacgggctgggcagcagcagaatcaccacaccaagcaacacggcgaatgcaccgacgaaatggcgtttcggacgagcggccgcataggcccgagcacggctgattccacgagataggcgcgaatcatgcttcacttcgaacgatggcatgcgcccatcccccgcttccgaatccgcagtcgggctcttctgctcctggacgaagtctggttcctgattcctgtggcgtgcaaacataccctacagtgtaagcggagggccgaaatcagccgaaaacgaacataaaccgaaaatattgctcggccacgagcgaacaggcccgggcagaccctacacttggggtaacacaccgcggcaaagaaggatacgcatggacgacaacgcgattcacgagtggctgatcaaatgcttcggccccattcagggcgagatggcctggcagcagatcagccagttgcctgaggagatccgtgaacagctgatgagtcaggaccccagccgactgcccaatccatccgaagtccagcagatgatggccgcgttcagcgccggcggactcaacacgatgggcgatatgcagcgcactgtcgaggaagggccgatcaacgtcaagctcgccaagtcgattgccttgcagcaggccaacgcctccggttccgcgtccagcgtgtccgccgtggatggcgaggcggctcgccgcgcgatgagtgaggcgaacctgtggctggataccgcctgcgagttcaatcccgcgcccggcgatccggatgtgctgacccgcgccggctgggtggaaggcaccatcgaccagtgggcgaagttcgcagctcctgtggccgagtcgatgaacgacgctttggcttcggtgatttcggagcgtcttggcggcgcgttcggcgatggcgagattgccggcatgttcgccggaccggtgccgattccgattcccgacggcatgaaagatccagcccagctgatgaagctgctgggcaacacgtcctttgccatgcagttggggcatgcggccggcaatctgagccatgaagtgcatggcagtttcgatcagggcatcgcattgctgaagaatccggctggtggactgattgcccagaacgccaccgaatacgcgaagatgctgaacggtgagactcctgcgcccgaggccgatacggccggcacttcaaccgactcggtcaatccgttctccacatccaccgacgcttccgccaatcccattggcttcacttcggccggcaacagcgatactccggcaactgacggcaccgcccaagtctccggctccgatgcttccgccgacgccgccgcgttcgaggctgcgctctccggattcgagaccaccgagaaaattcccgaatctgaagtgctttccttcctggccctgcaggaaatggctcacgcccgcctgtatgcctcggtaccgtggctgatgccgcgtttcgaggcgctcatcggcaagtacgcacgcggcatctccatcgatctggatgcgatggaggaacagctgcgtgacgccacgtcgatggatccggagtcgatttccggcgcggtgaatctcaccaaggtcggcatccccgacactcccgaacagcgcgaggcgctggcttcgctggaatcgctgctggcgatggtcgagggctgggtggattgcgtggtgtggcgcgccggtatggcccatctgcctcatatcgaacagttgcgtgagatgatgcgccgcgagcgcgcgatgggtggccccgccgagcgtacgttcgaaagtctgctcggtttgcagctgcgccccaagcgcatgcgcgaggccgccggattgtgggagatgatcaccgccgccgaaggccctgaaggccgtgacgccaagtggtcgcatcccgatctgctgccttcgctgcctagcgacaagcccgcagatggcgcgtctccgtcatccgacgccccttcaggctcctcttccgatgccaacggttccgcctcccaccctgccgcagatggcaagaccggcgatatcgattgggatgccgaactgtccaagcttctcggcgaagacggagaagatggcggcaacggcaactcggaggatacgcaggcatagtcaaccggccttcggccaattcccgctcctgaatgttcaggagcattcagtatgcatgaacgacgcccgtcacaaaaatcgtgatgggcgtctgtgttgcgctccataaccatccttggtccgcgcatacgacaaatgcagcgaatcctcagctcgggtgatgcccacatacataagccggcgttcctcttccagcgcatcccccgtttccggcgaaccgtacggcaagagtccttccgaacagccgatcagaaacacgtgcttgaattccagacccttggatgcgtgaatcgtggaaatcgtaacgccgggatcgtcgtttgcggcaagtccggtggcgtccaaacccatcgcctccaatagcgcacgtttggacgcggcatcgtcggcgagcgcggatgattgccatcccgaatccttacgaacgcggtatttcagtcttgcattgcgcaaagcggcaccgaataccggctgttgggcgttgatgcgggtgagaatcgcgcaatcggacggcttggctccgttggcgaccaaccgggcgatgcgtgccgccacgccctgcgcctcttccatatcgctctcataagcggttcgggtaacgcgcgggccggattcgcgggcggaaaccagtttcaggtaatcctcacggttcggcgcggccgcaagcacccggttggcgagattcacgacttccggcgtcgaacgatagtcggtgttgagattgacatcggcggcgagcggcccgaattcatcggcgaaacgcagcagatcccagctggaagcaccggcaaacgagtagatggtctgggccggatcgcccacgacgcatacgttgcggttcatcgcgctcttgccgtcaggccctcccccgcccagccacagggtcagcagcctgtgttgcaggggcgagacgtcctgatactcgtcgacggtgagccagccgatggtggaacgaatttgggcggcggcttcgggaaaatcatccatgatatggcatacgagcagcagaatatcgtcaaaatcgatttcgccacgcgaggtcttttcctgctcgtaggcgctgtagacgtcggcgaaccgagcggtgtcaagtccggcgggcggctgccgatgggcgatggcacaggcccgggcataatcttccaccgccaccaacgagattttggcccaattgatttcggcgagcacatcgcgaacggtcagcggatcggcatcggtacgtgcggtggcgcggatgatcgcgcgggagacgacgtcacgctgatcttcgatcacatgcgggaatggagcctcgcatatatccgcccagacgctgttgagctgatgcaatgccgctgagtggaaggtcgcggccgtgactccggcagttcccgcacccgaaccggaacgtccggcaccttcccctacgccgagctggcccaaccgtgcgcgcatttccgccgccgcttttaccgaaaaggtgacggcaagcacccgctccggcttccatgccccggtggcgcaggcataggcgatccgccgtgtgaccgtgcgggttttaccggcacctgcgccggcgataatgcgcaccggcccttgcaacgtagtcgcggcggtacgctgccgctcatcgagcccctcaagaatcccctgcgcctgttccatgcgtccattgtggcacgattcgcgctcacggcacgactcacgcctatggctgaatcgggctcacgacaaaacatcgccagaatcatgcgttttgcgtgtcattctgcggtgcgaatcgccacggatgtattagtgtggaagggtgatgaaacgtagcgattatatgttggcggcactcgcctcagccgtcctgccgaatctgggggtggccggtgtacgcgagaacgtgcaggccagcgcaaccgacgaggccaaaggcatcgatcagaccgtgatccaagatgcctcgggcaagttgtacgacgtatacgccactgacagcaaggaagggcgtacacgtctgatccgccgtgtgaaagcggcgcagacactggcagccgcgcgcgagcttggtggcctcggcttcgatatggaccgtgtggtcgcattcgtcccgggagacgtttcccaacccggccagacgaccaccgcacaggccgtggggcagcagacccaggcggagtccacaccgctgaccccgcgcaagcccggtcccacaggcgagacgaccgtgatgatcgccgtccaccgtgatggtcaggcacgtcctctcgacctgttgacattggatgactgcgcggccgtcggcaccgccatcggagccattcatcgcctgccttcgacttttctggccaatgccaaatatccggtagtcaccaccggtcagattcgttcgcagctgaccgcctggattcgccgcttacgctccgccggccatgttccccaagaaatcaccgacagctgggcgcgcatcatggacaccgagggactatggtcgttctccacctgcacggttcacggcggattctccgacggcgacttcctgttctccggttccaccatcaccacggtgaccaactggcaggatatgcaggtcaacgatccggcccgagaccttgcctggattttcggcaagctcgacgaatcccatcgcaacgccgtgctttccgcatacggccgcatgatgggctctcgacttgacgatctcatcatgctcagggccaacctgtggttgcagatggaacaggtgggcgaattcattcaggcgttgaaccgtgcggacaacaatcgcatcatgcagttcaaggcacaggtcgaacgactcgcacaccagttgggcgtgatcaagcacactccggcatcggccccagccgcagggtcggccgccgccgcgtcgacggagcccggttccccctccacaatcaccgtcggcacattgttgcaggacgaccgccatcaggcacccgcacaaccgcagcagtccgacaccggtaccgcggcggccgaggtctcggacgacacgcccgaccccgatcgcaccggttccgctgacatcgtggccgctggcgacgtggatcttaccccggaagtcgaacccgatgctgaccggaccgccaatcacccgcaagcgagtgtctccggcaccgcaaccggtacgggatcgaccaaaccgcagccctcacatggcgcttcccattcttcggtgacgatcacgctgaaggagctcctcagtatgaacgggcatagcggcacgacgtcaaccgacgcttcccctgcatctcaatccgccgccccgaccgacgatgcggtgaatgacgatactccggacagtttcgttcagcacggagcctcgagtgcccaaaccacggtgattccgctgttggagcgggaagaacgcgctctgcgcgatgcccgtgccgggttggacgggtatgacagcgagggcaatccgctggccgaatcatccacatcatccaaataatgtcgtgtgcggtgttccgcgccacgccgagcgcgtaacaccgcacatgacgacgcagacacgcggcacaatagagtacagaacctcggccggtgacggccacttaccatgatgttcgtcacaaagacggcagaacaaggagccttatatggatatcgaactgggcattcagaacgtggcacgaccggtgaacttcagcaccgacgaatcagccgacaatgtgagccaggccatcgcgcaggccgtggccgacaacgcgacgatcgatctgaccgatgacaagggccgtcgcatcatcgtgcccgccaaggcactcggttacgcgatcatcggctccgaaaccaagcacgccgtcggcttcggcacgctgtgaccatgaatcgcgcataagcgtccttgagcattttctcgaggacgcttttctattgccgaatcaccgatatagcggaagcacgccgcgatgaacgatctcttcgacagtggcctcatcggtgaggttctcccccagtttgttcggtttgcctttgccatgccagtcagatccgccggtgaccagtagctggtgccggcggcagatggtgagcagccgttctcgttgctccggtgaattgcctcggtgccatacctccagcccgtccaatccctcgctgatcaacgcttcgatctggtcatcggacagcagtctgcggttacggctcacatcaccggcatgggcgatcagaatcacaccgcctgcccctttgacggcggccaccacttcatgagaggtcggcgagggcgtgggaatatagtatttggatgaggcgctgaccgcattcgcaaacgcttccgaacgagtccgatatacgccggcactcaccaaagcatcagcgatgtgaggccgcccaatggtggttttgtcaccctccttgacttgggcgagcacggattgccaggtaatcggataatcacgagacaacaattcgaccatgcgctgcgtgcgttgcaaccgtgcggctcgagtatcggcgaacaagtccgtgatgtgctgattcgtgggatcatactggtagccgagcatgtgtacggagacgttctcatccgtggcggtgatttcggtgccgcggagcaacggcaaaccgaccctatgggatgcggcttcggcctccggccagccggcggtggtgtcatgatcggaaatggccacgcccttgagtcccaataccttggattgttcggccaatgtggccggcgtttccgtgccatccgagaagacggtatggcaatggatgtcccacccgacggcgggcggctccaaaggcatcacatatccagtcataccttccatcgtaacctcatctcagcattcccacgcaaggcgcagacaggtcgtcaccttctgccaacggccaagaccagacattcggcactcagctgacaaccgcagaggctaatctggagcgcagcgctatcgaaaggggcatgatgactcgtaacaccgcaaccgacacatcatccagcaccacgaacaccacgccgcttggcttggcggaggcgcgaccgttgattggatggcgccacagtgccacttggacatatctcatcatgctgatcgcctcggcagtggcattgggggcctcgctcattctgtccgccgagactttgcagttggctaggcatccggagtccacgctcggctgcgatctgaactcggtggtgtcctgttcggcggtggcccagtcctggcaggcggaaatcgtgaagttcggcgggctgagctatccgaacgcgttcttcggcatcgccgccgaatcggtgttcattaccatcgcggtgatcggtttggctcgtgtgaaggtgccgcgttggttcgcgacctgcacgtggctgggcggactggccgctttggcctactcgtactggctgagcacacagtcgctgttcgtgattcacgcgctgtgcccgtggtgcctgaccctgatgttctccaccaccatccagttcatggcgttgagccatgcgaccgtggccgtgcagggattgccgtcacgtaaggctgtggcggctgatgatggcgacagcgaggccgatgtcgcggcggtgccggccggactcaataagtattaccgcctcaacatcgacctcatggtcgacatactgtggatcgtggcgatcgtggtactcatcatcgtcaccgaaggcgcggccctgttcgctgcctgattcctttacgacaaatcgatatcggcgaccagcgtggctgctccggtcagtttcacgtcgctgtcggtgacgtccacgcgcagggtgccgccacgtacggtgatatcccagtggctgatgccggtcttggcccgcagcacaacgcctgtggcgcataggccggtgccgcaggacagggtttcgccgcagccacgttcgttgacgcgcatcgtggcttcacccacgccggtgttctgatcgatgtcgtcgacccgcacgaattccacattctggtcggattcgatgaccggagccaccactggtttggtgaccaaatccagtgattcaaccactggcagggacgcgaaggcatcctcgatcaccgcgaccacgtgcgggttgcccatatccacgaacgtgccgcgcgccgagccctcagcgccggggatggtgacctcgtaggcgtcggtttcgccgatcttccactcccccatttcgacctggaacacgttggctccgtacggcctcatattgccgcgtggcgtcagaatcttgacgccggcacgggtgccgaggcggaacggctcggtggagtcggccacgccctcgcgctgagcgaacaaggtgatggcgcgcgtaccgttgccgcacatctccgccaacgatccatccgcattgcgatagtccatgaaccatttcgcgcccccggccagtacgtccgaaagctgatcatcgcttaaatcagacacgaaatcaggccgtgtcaggcgaatcaggccgtcaccgccaatgccgaagtgacggtcgcacaggaatcggacctcatcggcggtgggctcgaatttgccggacttgtcgaggtacaccacgaaatcattgccggttgcgtgtgtcttggttactcgttgcggaagactcatggctttcagagtactctagggagcgaaacaacaccgcaaaacaatcggctttgtgatcggtcgcggcaacatacggttgcaggcatggctatagggaggattcaggcatgagctcttcggctccaatcggcgtattcgattcgggtcttggcggtatttccgtggctcgccaaatcgccaaggatatgccagccgagcatgtgctgtattttggcgattcagccaacgccccgtacggcgtcaagacgcctgagcaggtgagggccctgagtttcgatattgtcgaacggttcgtgcgtcaaggcatcaaggccgtggtcatcgcatgcaacaccgccacttccgccgcggtgaacgatttgcgcgaacactacgatattccgatcatcggcatggagccggccctgaaagtggcgtgcgaccgtggtgacgtgccttccgacccgcatcatattccccagagggtgattgtggcggccactcccctgactttgcgtgagcggaagttcgccaagctgatggatcgattcgattccaacaacacgattttcaaggagccttgccccgacttggtggagattgtggaatccgggcggctcggcgaccatgacctggtgatgcgcacgctgcacggctacttcgaccagtacgacatggagcacatcgactcggtggtgctgggctgcacgcatttcgtgttttaccgcgactacttccgcgaactgctgcccgaacgggccgccgtcatcgacggcaatgagggcaccgtgcgccatctgggcgttgtgctggagtccctgggcaaactggcacccgaagacgcgaccggcggcgtggaactcgccaattccgatctgtccgaacgtgttacacggctttcacgcgacctgctgaatgcgtgatcggatgcatgatgatgaataggaggctgatatggcactgaagaccgcgatgattgatgtgggcggcgggttccgcgcgattttcggctgcggcgttatggaccgcatgctggaggacggcatcgacgtggacatgtgctatggcgtttccgccggggcggccaatatgacctcgttcatcgcccgccaacatggacgcaaccacaccttctacaccaaatacgccttccgcaaggagtatgcgagcgcggagagctatttcaagaaccgcaacttcgccaatctcgactatatctatggcacgctgagcaaccatgacggtgagaatccgttggatttcgaggcctttgaggccaatccgaccggattcaccgtggtggcctgcaatgccgaggacggctcgaccaagtatttcgacaaatcgcgcgtgcgttttgatgatttcgacatcatcaaggcttcgtccgccgtaccggtggcctgcgagccgtatgtagtggatggtgtgccgtatttcgatggcggcatcgccgatccgatcccggtacagaaggcgctggatgacggctatgatcgcgtgatcctgattctgtcccgcttgcgtgacgaagtacgcaagcagcagaaggatctggctccggcccgcatcctcgaacgctcccaccccgccgcagccgagaggctgcgcatacgctacaagacctacaacgacgaactcgaactcgccaagcattacgaagcggaaggcaaagtgctgatcctcgcacccgaagatttgtacggcctcaacaccctgaagaagaacttcgagggcctggaaatgatgtaccgcaagggatacgcggcggccgaggccattccggcgttccttcaggcatagcacaagcccaaaaaacaacgattctgccatagcccattacacaatggcgcaatgacgtcagaccccgtccggcgatggcacaatcgttgtttttccgtgtcataagctcatcaaacgcggtgaagcccctcactgggaggggcttcactgatacatacgccattatgcggtctagcggccacaagcaccgctatttgccggcggcggtcgcggcgtcgttcgtctcggtcgcggtgagcatggccttggtgacctgttcgtacaggtcctggtaaccgccgggcgtggaggcgggcagcaccacggtcttggtgttcttcgattcggacaacgaacgcatcacgtcaagatactggttgaacagcaccacgttgttcacatcgttgatgtccatgcccacggcctgcaggctcttgatctggtcgacgataccgttggcgatctcacggcggtagttggcctggccttcaccctgcagtcgggtcttctcggcttcggcggcggcctgggtctcgatctggatgcgttgggcctcggcgcgctggcgggtggcttccttctcgcgctgggcggcgttgatggagtccatcgcgttcttgacctgcgggctcgggtcgatggcggtgatcagcgtcttgaccacggtgaaaccgaaccggctcatctcggcgcccacggtcttctgcacgtcgaacgccacatcgtccttgcgggcgaaggcatcgtccaaggtcagagcgggaatggcggagcgcaacgcatcctccatgtagctcctgagctgaccggccggatcgcgcagctcgtagtaggcggtggccacgtcgttcgggttcacgcggaactgggtggaggccacgacggtcacgaacacgttgtcaagagtcttggtttccagctgcacgttgagctggttgacgcgcatgttggtcttcatggcgatgcggtcgacgaacgggatacggatgtgaatgccggcgaactgaaccttcaggaacttgccgaagcgttcgatgatgtacgcctgctgctgcggaacgatgaacaatgcggcgcccagcagcacgatgataatgacgaggatgaccagaaaggtgatcatcgctcccccaaaaaatacggacatgactttcctttcactatgcgtcgggaccaccttcggttccggctggtgactcccatcgtatcagccgacggacaaatcgcccgggaattgtacgcattggtgtacagccagcgaccggcaacgtactcggcgacaatctattgccgcgcggcgactaccgctgctcgcccagccgcaggagcgcacgttgcgccacggtggccagcaagtccgcacccgcggcgatggcatcgagcttggcgtagaacgtaggtccgtgcatcggccggtcgccgttgccgacgccgagatgggcgaatgcgcccggtgccttgcctagatagtaggagaagtcctcgccgccgagcgagggctgcgacggctcgaccttaaggcccagctcagtggcggttgacgcgaacagcgccgaccaatccgcgtcattgatgaccgagggcgatccgtactcccattcgaagtccgtggtgacatcgtacgcggatgcgatgccttccacgattgcgcgcagccggtcgtgaatcatgatgcggtcttcggggaatgctgtgcgcacagtgccttcgaggaaagccgttgccggaatcacgttccaggtgctgcccgcttccacgtgggtgacggtgacgacgcggggatgcaccgggtccacgtcctgcccggcaatcgactggatgccttcgatgagtgcggcggccacgcgaatcgggttggccccgccgttgggatgagcggcatggctgcctcgcccatgcacggtgatgcggtatttgtcgaccgcgccgctgtccggcccggcggagatgaacgcggtgccgggctcgccctggttggtgtcatgcgtgccgaaaaacgcctcgacatcgtccagggctcccgtgttgattacggtgaccgcgccggtgggcacctccttggtggcggccacctcctcggccggctggaagatcaccttgacctcgccggcgaagtccgccttgcgctcgttcagcagtagtgcagcgcctagcgcgacggtcaggttgtagtcatgcccgcagccgtgcagatagcccttgttcagcgactcgtacggcacgccggtctgttccaggatgggcagcgcatcgatgtccccacgcaccgccaccacatggccgacactcgcggactcgccctcgccccggataatggcgatgagcccggtcttcagcccgctgtccagaatcctgatgccatgttcatccaagatctccttgatgtgcgccgtggtttcggtctcctgatacgccggctcgggatgctgatggaaccacgtgtagtacgtttccagctgacgctgcagttcagtgttcgtcatattgttttcccccatctttgatgttcagcatggatgccctgcacccataccaccacgttccggcacaggccacgcccccacccacatacgaaaaatctataccacccgccaattcaggcgatcgtgcggtatttggggtggcttgtgggaatcgaatccaacagactcttggtgtactcatcctggggatggtcgaatacgtcatgcaccgaaccggattccacaatccgcccattatgcacgaccagaatcgacgagcagatatgctccaccacacttaggtcatgggagatgaacaggaacgatacatcacgagtatgttgcagctcgctgaacaggttgatgatctctgcctggatggatacgtccaaggcggacaccggttcgtcagccaccacaaactccggctgcaaggccatggcacgggcaatgacgatgcgctgtcgctgaccgcccgaaaactcgtgcgggtaccgattgaggcaggaggagtccatgccgcacagttccagcgtttccaccaccttatcggtgacgtcacgtttcgtggccagcttgtgatgcagcaacgcctctccgatggccgagccgatcttcagccttgggttaagcgcactgtatgggtcttggaacacgtactgcatgcgggtgcgcattcgggccagtttggcattgctgagcgagaagatatcctcgccgccgaacagcacctcaccatcggttttggcattgagacgcagcaccgtctgtccgataggggttttgccgctgcctgactcccccaccaggccgaccgtttcgccgcgatacacgtcgaagctgacatcgtccacggcctttttcacattgttgccacgcgagccgaaaccacgcacccgttcgtagtatttcttcagatggcttacgtgaagaataggctggccctgatgctccttagtctggcatgaatcgtcagtgccgggccgggagcgttcacccacctcggcaatcgaatcgtcttccacggtggcggccaaggtgctccagtcctgtggctgggtgatttcaccgtcatccacttcccgcatgacctcatgcaaagtgggcaaccgcttaagtttttgcccgatgatgggtcgggtcaacaacaaggccttggtatatggatgcttgggatggtcgaagatgttctccaccgtgttgcgttccacgatatgaccgtcatacatgaccagtacgtcatccgcgatttcggccaccacgcccaaatcgtgggtaatgaacagcaccgacaatccgatttcgttcttgagtcggaccaacagacgcagaatctgagcctgcacggtaacgtccaatgccgtggtcggttcatcggcgataagcaggcggggctcgcagcacaaggcgatggcaatcatcgctcgttgcagcatgccaccgctcaactcatgcgggtaggccgtcatgatgagttcggggttcggcagttcgacacgtttgagccatgcaatcgcctgtgtctcggcttccggacggggaacatcggcatgggccagaatggtttcaacaagctggtcgccaacggtgaacaccgggtcaagggaatgcatcggttcttggaagatgagcccgatatcggcacctcgcacctcgcgcatctgcttgacatccaaggtcagcagatcacgcccttcgaacagcacttcgccggattcgatgcggccgggccgatcgatcagattgatcaaagacatggccgtggcgcttttcccggaaccggattcgccgatcaaacagcacacgcgtcctcggcgaacgtcaaagctgatgtcatccacggctttgcgtacggagccgtcatccggataaaagtatgttttcaagtggcgcacaccaagtacgatgtcatcggaatcatcgactttgtcctctttatgtgctgttttgttcgatactatgatgctcataaatgttccctcgtgttacctgcaccgtggtgcatgaccgcatgattcggattattcgatcacatgtcacgaatactgtttggggtcgaaagcgtcgcgcaacctgtcgccaatggtattgatggcgatgaccgtggcgaacaccgcgataccaggcgagatccatagccaaggatgcatctggaaatcgatgaggttgttggccgccgaaatcatgttgccccaggaaggcgtcggctgcatgacaccgagaccaaggaagctcaatgcggattcgttcatgatgccgttggcggtggccagcgtggcttcaacgataagaatcggatacgtgttcggcagtatgtgtcggaacaatttggagcccaggcccagaccgagcacatctgtggcccgcacatacatccgctcacggatggaaagcacctgtcctcgaatcatacgagcaatgctcggccatccgacaaagctcagcatgatgaccacgaaatacaccttggcgtcattgggcactttgaaggcgctgagcagggccgcgatgatgaacataagcggcatgctcggaatggacagcacgatatcagcaatgcgcatgataatgccgtccatccagccgccgaagtagctggatatgacacccaataccgcgccgaacaccactgagacaatcatcgaaatcagaccgatggcaatggagattcggccggcgtacatcacacgggtgaatacgtctcgaccataattgtcggtgccaagcagatgagccagactcggcccctgcttgatgttcatcacgtcgtaatcctcgaacccgtagtgagagagcggaggaccgacatagctgatcagcacgataatcgccaagatggtcaatgcgatgatcgcggaccggttgtgcaggaacgaacgcatcgcgtcacgccacagcgagccaccggtgcaagtcgtatcccgagcgagtttttcatcccgttcggcattggttttgcgggatgcgaatggcagtcgaacgctcacttggcactcccctttgctcgcgtgatacgtacacgagaatcggccatcgtgtacaaaacgtcggcgatgaaattgcccacaaccgtcagaatggccagcagcatggtaatggacatcagcaacgcatagtcacgggtggtcaccgattcgaattggatgcgtccgatacccggccagctgaacacctgctcggtgatgatcgcgcccgagaacagggccggcaaacggaatcccagcagggtaatcgccggcagcatcgcgtttttcaacgcgtgcttgtagatgacctgtgattcgggcaatccttttgctctggcagtacgaatgaagtccatactcagggtatccagcatgctggtgcggaagtaacgggtcaacgggccgaagttcacgcatacgatcaccagcatcggcaggatggcatggtgcagtacatcgaaccaatactgtgctcccgtgtagttggatccggtggtgatcagtccgccgaccggcatgatgccgagattgatggagagagtcttgataagcaccaggcccacgaagaacgatggcagcgacatcaccgcaaacacgacgaaagtgattatgcggtcaaacagcgaatacttgtggcgggcggaatagatgctcaccgcgatggccaaggcccacgcgatgatgaatgccccgaacgacacgaggaacgagttccagatataggtgccgatgaccttggataccggctggttgtattgcatggagaaaccccagtcaccatgcagcagttgacttacccacaagaagtaacgttccagaaccggcttgttgaggccataggcctcacgcaattggtcgagtcgcacctgggtgagtttggtgtctccggagaagaaatcacctggcatcatcgcgaacagcgcgaagaccagtatggatacgccgatgagggtgggtatcatcagcagaaaacgttggagcgtgtaacgtagcatggattaatgagccttatgcctagtgggggtttggatggaaggcaggatgtcactctgcacggcgagacgcctcgtgacacagacctattgggtccatgccgcgaggcgtcatctcgtgtggaatgccgtcactggttcttgatggacagctttgccagctgaatcgccgagtcaccggttccgcggaagaacttgtcaccattctgaatacgatcgttccaggcattgaagcccttgatgtatccaatgagcagatacggcggatcgttgctgagttcctgatagatcttctgataaatcggctcacggctggcgcggtcggacttggcgatgctttccttgaccagcttacgaaccgtggcattgtcgtagccgttatcattgacctgcgggtcagtggtaccgaacggcttgaccgcttcatacggatcgttgatgaccgaggtacggaaggtaatcaaatcgtagtcaccggacttcaaccgcgtggtctccgtgttctgatcggtgaccgtggcctgcaggtcgacgccgatcttcttccactgctccttgccgatgctgatgatcgggtcggtctggtccttggtcacgtagaccaggctgagcttcttgccgtccttctcacgaatgccgtcggggcccttcttccaaccatccttgtccagaagctcgttggccttgtcgggattgcattcgtaggtgttcacgcccttggtggagtatgcccagttgctcggcggagcgtatacattggccacttcgccgtagcccttgtaccaagcggcgacaatctgcttgcgatcgaggccgtagtacagcgcctgacacacttccttggttaggtatggcttcttggtgttgaactcggaataggagtagtacggattggtacggatgttcacatccgaccaaccgaagtccttgagctgggacagcacatcggaatccggaataaacacgtcggtatcggtatcgccattctggtaggactggagcgccgtgtcatcggtgacgaccttgaagattaggtgttcgatctttggcttgctgccataatagttcggatccgccttgtaccgcacttcctggccgggcacgtacttgtcgagctcgtaggggccggcacccagtggcttgtcgtagaactgctgcaggtaatcgagcttgccgcgccggtagtccttgccgtagtacttcttggaccgcacgtagctgccgatggtggtcagtgccacagggttgactttttcggtggtgacggaaacggtcttgtcatccacgaccttgatgccggaaatcgaatcggccttgccggattggtaatccgcaacgcccttgatgccgatgtcggtaaagtcggcgaggccaaagttgtaggccgggtcattttcaagggtcagcgtgaaagccacatcatcggcggtcactggagttccatcagagaacttcgcgctgtcgcgaagatggtaggtgtaggtgaggttgtctttagacacttcccacgatttggccagatcgcccgcggggttgccgtccttgtcatagacgaccaatgcggcgaaaatcggctgattaatgttctcatcccatgcgttgcggtagaagtacggcaggaacacgccacctgggttcttgatggtggcaacgaacgtgtcggtacgcttgttggcgttggccgggctcttggacgggtccgtagcctttatcgtctcgttcttgatggcctgcacgttacccgaagattgagtggcactgttgttcttggaattgccggccgcaccgcatcctgcgagcgcggtggcggcgacgagtgccaccgccaatgctttaatgccgcgggcaataagctgcggcttggttgatattgctatgtttcccctcttgttgcgtgaacgcaatcatgtctcaccggaactgatcattgcggaatcacaccgattcgtccgatgactgattgccagtcaagatgacgcggaagtctgatgtcgcgcatccgttcctctcgcgttccgtttcccgaccttaacgcaaaatgattgcagtctgaccggcgttgttatatcaatcatttatacgaagctatggcttcacgtttttcagtcgttttgtggggtccaagtccgaagaacagcatccccgcgttgtcaagccgccacggactggcaggtcggcagcgattgcggggcccagtgtcgccaaccggccaaggtttggcaggacagcgacgctcacgacacgtcagcgtagtcaagaggccagtccatggcgactcggcgacgctaagacgcctttcagcgtcgttatccggccaaacgctggcaaggtagcgccgctaagcggtttgagcgccgccgtcttgccagcttttggccggttggcgacgctaagcatccatgagcgtcgccaaccggccaaggtttggcggaatggcgacggccgaatggtaggcatggccgttttgcttctgtaatctgtattcgttcggaacatatacgaaaagagccaatggcttatgtcaccgacccttagatatgaatggcggaaacctcagaaagagggctgaggcgaaactacttcagttcgcccaatgcctcaagcttgttcttgatgtcgagcgcagaaggctcgacctggaaggcgccgtccgagtacaggacgacggggatgtgcttctggccgctgatggcgaccgcgcgatccgccgcgccttcctcggtttcgatgtcgtgccagttgaacgcggcaccgagatcgttcagcgcggccttggcacggtggcagtcgccacaccagctggctccgtacacgtcaatggccatgtttgctcctttgatcgtaattgctcgttatggttcgttgtcgtcgcgaacttcgtcgtgagtgatgatacccgtcagaagtgcgcgttgagtttcttctcgcagtactgctgcagccaggtgagcaccgtgctgaacagcaggtagatcaggcccacctcgatgtacagcgccagcggctcgtagtagacggccaccacgcgctgggcggccatgaacatctccaccacggtgatgttggcggccagcgacgtgtccttgaccagtccgatgaacgtattgaacagtgcggggaaggccgaacggaacgcctgcggcagcacaatgcgccgcatgatcgtcacgtacggcatgttgaccgcgtatccggcctcaagctggcccttcggcacggccagaatcgcgccgcgcaacgtttccgaggcgtacgcacccacgttgagtgagaacgcgatcacggcggacggcagcgcgggaatcgtgatgccgatggagggcagaccgaagaagatcacgaacagctgcaccagcagaggcgtgcctcggaacacccacacgtacacccaggcgatctgcgccgcgaccggcactttggccacgcggatcagcgcgacgatgattgccagcagcaggccgagggcgaatgagatcagggtgagcgggatggtcacggtaagtcccggaataaggagcttgccgaaggaatccaccactatcgaccatacccgtgcgtccattgccttgtcctttgcctgtgtgatgcggttattgcgttgttacggtacctgatacggcggccgtcactcctgggagaagtcctcgccgaagtatttctcggaaatcttggtcagggtgccgtccttttgcagcttggcgatggcgtcgttcacggccttgaccaggtcgtcgctgcccttgcggaacggcagctgagcggccggcgtcttctcggacttggcggcgatcttgatgttcgcgtccggcttctgcttgaggtagtcgagcacggcgagaccgtcgttgagggtcacgtcggcacggccggactgcagggcctcgacggcttggccgaagtcgttgacctgcacgatttcggcgcccttctcctgggcggtcttgttccagttgctggtgccggtttcggcggccttcaggcccttgacgttatcgaaggaggagacgttcttcgggttgtccttggtggtcacgaccacgccgtacgagtaggtgtacggttcggtgaagtcgtacttggccttgcgctcgtcggtggcgctgatctggtcggcgaccgtgtcgtacttcttggcatccacgccggcgagcagtgagtcgaagctgccttcggcgaactcggccttgacgccgatctccttggcgatggcggtggccacttccacgtcgtagccggtcagctcgttggtcttggaatcgtggtagctgaacggcgcgtaggtgccttcggtggcgaacacgatcttgccggcggacttgacctgctcaagtgcgctggtcgaggtcttgccggaatcggacgagtcggactctccggcggacgacgaaccacacgcggccagcgagaacagcacggcgacgccggacagcagggccacggccttgcggaacactccatgggtattggacatgatgacgaacccctctcttggttggtctctcattggttgatctattagagaaaatcttgaatgctgtgctgacggcgatggcaatgccgttgggcacgcctgccgcctcatcggaccgtcaggcggccgccggaatcatcagcacgttgttggtggacgacaggaactccgccgtgcgttgctgcgtggggtgctcgaagatctgcttgggatctccctgctcgaccacgtgcccgccttcgatgaacaccacgctgctcgacgcctcgtaggcgaagcgcatctcgtgggtgaccatgagcatggtcatgccgtcctggcccagctgcttgatgacctcaagcacgccggtgaccatttccgggtccagggcggaggtcggctcgtcgagcaccagcagctccgggttgagcgccacggcgcgggcgatgcccacgcgctgctgctggccgccggacagcgtgctcgggtaccggtcggcgaagtccgccagcccgacccggtcaagctgttcgagggcgatcttgcgcgcctgttccggcttgacgccgcgcgagtagatcagtccctcggccacgttctgcagggcgtttttgttgaggaacaggttgtagttctggaacacgaacccgatcttcgaacgcaccttgcggatgtcggcggtgttggtggtggtcaggtccaccggaccgtcgccgaagtcgacggtgccggaatcggcctgctcatggaagtccagaatgcgcagcagcgtggacttgccggagccggacggcccgatcaccgtgaccacgttctgacgcgggatgtcgaggtcgagcccgtccagcaccttggtgccgttgaagctcttgctcaccgatctgatctggatcatccgggctttcctcctgtctgcggtccgcgttgtggtctcgccgattgcattgccacccgccaaccctagtgcaaggccacaggtggcaggtcggcgtggttatatgcgttgcctataaagcgctatatgcgcagcatgtatataaggtacgccatgcggcacgccgcatggtacagattcagcttgtagcacgctatcggttttcgcgattgccacgccccaaccgcgccggttgcgccgtgctaggttcgggaaaggcgcggccgaaccgtcgcgccgatcatcgtcaacgactggtcatggggattcgcgatacatcaggagagggtcatgtccgattacgttcgggtcgccgcacaggaactgcaggactttgcgaccgcagtgttcgaacgtcggggtttcgcccatgatgacgccgcgttcatcgccttaacgctgctcgatgcggaccggcacggcatcgcctcccatggcatgcagcgcatggccatgtacgatcacaagctacgccacggcatgatcgatccgtccgcgcgcgccaccgtggtcagcgatgccaaagcctgcgcggtgctggacgggcacagcggcatgggccagctcatctcccgcgacgcgatgcgtctcgcaatcgccaaggcccgcgaacatggcatcggactggtgaccgtgcgcgattccaatcatttcggcaccgccggcctgtatgcgcgactggcggccgaccaggggctgatcggcgtggccagcaccaacagcaatccgctcaccgtgcccacgcacgccggccacccggctttgggcagcaatcccatcgccttcgccgtgggacgcggcgacgaccagttcgtctacgacgcggccaccagcactgtctcgctcggcaagatcgaggtgctcgtcaaactcggcgaatccatcgagggcgattgggccgtggacggctccggccgcgtcaaccatgactccgccgacgtgatggacaacattcgcgccacgccgcgtatcggcggattgacgccgctcggcggttccggcgagctcaacgccggatacaagggctacggcctggccacggtggtggagattctcaccggcgtgctgtccggcggcctgctgtccctggacatgaaaggccagcatatctgccactgcttcgccgccatcgatctggaggcgttcggcggcgcggccacggtcggcgagcgcgtcgcctcgctgtccgctcgcctgcgcgccatggactcggtggacggccacgacgtgctggtgccgggagacaaggaacggcttgccgcagcgcgcaaccgcgcttccctgcccatcgacagggcgacgttcgatcagcttgcggttattggcaagcgcgtcggggtcacgccgccggcggccctgccgaagacttccggcctcgaatccgaaaccgccgcccgccaataggcgacaaccaatcgcacacatcacacgtacaaggaccacccagccaacaccggagatacgcaatgagccaaacacctgacgcataccatcagcctgtggaatcgccgcaaccgaaacctcaccatttcgagccggccgatgcggtgattccgcaactgggcaacctcaccgcgtccgtcatccgctcgttcgacggcgaggtgtcgtcgattcccgacatcctcaagctcacgctcggcgaaccggatttcgcgacccccgacttcatcaaacaggccgcggtcgaaagcctggcccgcaatcgcacgcattacgcgccgaacgcgggcacccccggactgcggcaggcgatctccgactatctggcccgcagacgcgacctgcattacccggccgaggacatcgtcgtgaccgagggcgcgagcgaggcgatcagcagcgcgctgaccgccctgctgcatccgggcgcgaccctgctgtacgccacgcccgggttcggcctgtaccgaagcatggccgccctgaccgacaccgaggcaatcgaaatcgacaccacggacaccgatttcgtactgaccccggacgcactggagcgtgcgctgcgttcggtcgaaggccgggatgcggtgctggtgatcaactcgccgaacaatcccaccggcgtgaccctgaccgccgaccagttgcgcgcgttggccgaagtcgtcgaacgccatgacgtgacggtgctgagcgacgaggtgtatgcggagatcagctacgaggcgcgcccggcgccgtccatcgcgctgttcgcgcccgaacgcaccatcgtggtggacagcacgtcgaagaactacgcgatgaccggctggcgcctcggcttcttcgccgccccgcacgccctgagtgcgcagctgctcaaagtacatcagattcacgtgtccacggccgccatgttcaccatggacgccgcgcaagtggcctacgaacgcggcgacgaatccatcgaccgcatggtggccgaataccagaaccgtcgcgactatctggtggacgcgctcaccgggctcggctacacgatggcccgaccgtccggcgcgttctacgcgtacgtcgaggtgccgcccatcttcgatggcagcagctacgactatgcgcggcttctggcccggcgcgcgaaagtcgccggcattccgggcgaggcgttcgtcagcggaccgtcccggtacgtacggttcagttacgcggcctcactggacgcgctgcacgaggcggtgaaccggatccgacggttccgggaacaataggacttatcgggctccgacgccacgcgcccgcctgtgttctggttcaagcgctcccccgccactgatcttttcgacgtattccaatcccatcaatcttcagaaaggccaccatcatgacctccatcgccttctaccacaccatcgacgaggagcggccgttcgccgaggcgtgggccgccgaacacggcgtccacgtcgaatgcttcccgttcgagctgcatgaggacacactgcacaccgtcaagggtttcgacggcatctcctacaagcagcgcagcgcgccgagcccgaaccccgacttctaccgtcgcctcagcgagtacggcatccggcagatctccctgcgttcggccggctacgacaccatcgacctggccgccgcccatcgcaacaacatccgtatcaccaacgtgccgtcctactcgccgcccgcggtcgccgagctcacgctcagccacatcatgcgcctgatccggcacgtgccgcagttcgacgagcgcgcctcccacaacgatttctccgtgcacgggctcatctcgcgggagatcagcgaactgacgatcggcatcatcggcgtgggccgcatcggctcgaccgtggcacgcatcttccatgcgctcggcgcgcgcgtgctcggcaacgacatcaacgagaaccacgaactcgacccgctgctcacctgggtgagcaaggacgagctgatcgcgcaatccgacgtggtgacgatgcacacgtatctcgacgccaccacccgccatctcatcgacgcacaccgtctctcacagatgaagccgaccgcctatctggtcaacaattcgcgcggcggcgtggtcgatacgcccgcgctcatcgacgccctgaacaaccatgtgatcgccggcgccgcgctcgacgtgcttgaaggcgaggccaagctgttcggcaacgaactgccctccgaccagccaatcgacaaccagtactacaacgcactccacgccttgccgaacgtggtgatcacgccgcatatcgcgttcttcaccgacgtggcggtcaaaaacatggcccagcagtccctggacgacgcgctggccatcatcaccggcggcaccagcccgcacgaaatcaccccgtacgacaatctgtaaagtctgtaaaggaaggacggcataaccccatggccaagccaatcaccgattcccaaatccgcatccgccgcatgctccccgaggattacgaggaggcgtatgccctgtgggagcgcacgcccggcatgcatctgcagtcgctcaacaacacgtacggcggcatcgcgctgctgctgtccaagaacccggacagctgcttcgtggccgtggacggcgcaggcaaggtcgtggccacggcgctcggcgccacggacggccgcaaaggctacctctaccatgtggcggtcgacgagcagtggcgcggcaagggcatcggcaccacgctcatcaaccgcatctacgacgtgttcaaggccatcggcatcgtcaagatcggcatcctcgtggtggcggacaacatcgaaggccaggaattctggaagaagcagggctggaacacgcgccccgacgtcatctacttcgaccacaacctgtgatgtgcggcacggcgttgcttatgccttgtaacaggccataagcaacgccgataaagacaccgccgagtcccctcttgttcccctgtaggcttcacgagtgttgcccgggtagacaaggaagggacattgccgaatgacgaacagcatcatcgaaatatccaatctcaataagacatacgccaccccggacggcccgtacaccgctttgcaggatgtcagcctgaccattcccgagggttccatcttcggcatcatcggtttgagcggtgcgggcaagtccacgctggtccggtgcctcaacgggctcgaatccaccaccgagggcacactcaccgtgctgggcaagtcgattcccgacctcaagcccggcgagctgcgtgaactgcgtaagtcaatcggcatggtgttccagcagtacaacctcatgccctcgcgcacggtggagaacaacgtggcactgccgctgaagaggtcctcgctgaaccgggagcagaagaaggcgcgcgtcaccgagctgttgcagctggtagggctggaaagccacgccaaatcctatccatcacaactgtccggcggccagcagcagcgcgtggccatcgcccgcgcgctggccaatcacccgcagatcctgctgttggacgaagcgacgagcgcgctcgacccggacaccaccaaaaccattctcgaactggtcgaacggctcaaccggcagctgcatctgaccatcatcgtggtcacgcacgagatgaacgtggtcaagcagatctgcaccgaagtggcggtcatcgacaagggcacgattgtggagcagggcgattcgttcaccgtgttctccgacccgaaggccgacctgacccggcgcttcgtgagcaattccaccggcctgagccgcatctacgaactcatcgattccgattcgccgattctcgaaaccgggccggacgagcggttgatccacatgcagtacgtggacaagaccgtgtccgagggcctggtgtcgatcatctcgacgcggttcggactgacggtcaacatcctgttcgcctcgctcgacatcgtcgacggctacccgctgggcagcatcgtcgccaaatacaagggctccgacgcgcagatcgaccaggcgcttgaattcctcaagggcaagggcatccgcaccacggtcatcgaaccgggtgcggcgaaggccgacatcgatgccgtcgagaccacgacggtcgaaaacaccgacaaggagaacgcacgatgaccatcctggacaagctcttcccgcacgtgatggagaaccccgacgtgttcgtcgaatcgctgatcgacacgttacgcatgttcttcacggcggtgccgttctggttcgtgctcggcctgttcttcggcatactgctcacggtcacgaagaagggtggcctgctgcagaaccggccggtcttcgagttcttcgacaagctcatcaacctgtgccgttcgattccgttcgtcatcatgatcgcgttgctgttcccgctgacccgactgatcgccggcacggccatcggcgtggaaggcgcgatcttcccgctgatcgtgggcatcaccccgttcttctcacgccaggtggaatccgtgttcaacgggctcaaccccacgttgatcgaatcggcccaagccatgggattcggcccgctctcgatcatctggcacgtctacctgcgtgaaagcatctccggactggcacgcgtgaccaccatcacctgcatcagcttcaactcggagatcgccgtcatcggcgccatcggcgcgggcggcctcggcgactacgcgaaccggtacggcttcgagcgcaaccagctcgacgtcactgtggcggccgtgatcgcactgctgattttcatcaccatcatccaaaccatcggaaccattatcgggaggaagaatgaacactgagacgaacatctggaccggccggtcgcgagtcggcaaacgcatccgcgcgggcctggccatcgtgtccgcgctcggcgtgctgttcacggcggcggcctgcggctcggcttcggcgtccgacggcgtcaccacgctgaaggtggcgctgaccacctcgaccgacgacccgctgtgggaccaggtgaacaagaacctggaagcggagaacgccaaggtgcgcgtcaagaccgtggccatgaagagcgccgtgctgggcaaccaggcgctgtccgccggcgacgtggatctgagcgcgcagcagcattacgcgttcctgaacggcgagatcaaggagaagggctacaagttcacggtgatcggcgaggcgtacatcagcccgctgaacatctactccaacaaaatcaagaagatctccgaactgaagaagggcgacaaggtcctcatcccgaacgacgtcaccaacggcggccgtgcgatcatcgtgctgcaggaggccggcgtgctcaaggttgacccgtccaagaacgacccggccaagggcatctaccccgcccaggaagacatcaccagcaatccgaagaacatcgagctggtgcccaccgaccgcaacatgatcatgagctcgctcgatgacgcggcggccggcatcgccaacgcgaacgccgtggtcgattacggcaagagccccaagaaggacgcaatcttcaagatcgacccggaccccaccaaggacgtcaacaagccgtggatcaacgtgatcgtggcccgcaccggagataaggacaaggatatctacaaggaggtcatcaaggcctaccaccagaagaacgtccgacagatcatggagaacgagtccaagggcaccgagattccaacctggtgatcgttggtgttggcgggccggcatggattgattatgagtctgtgtgtggtcttggccggccgatgattcgctgctgataggggatgcggcctcgcttcatatgagatatgaggcgaggctgcatccccttatttgcgtgccggaagtactcttgccgctgtgaatttggccatgcggggccggcaagtggaagcggccgatatcggtcaggaaaacaaacactggaaccaattggaaaaccggcggggaagctcgtataccgtaaggcatgagtactcctgattattacgacgcctatggcccccgcagcccagcgtgacgacgacgatatgccgctgctcaacgtcatgtttacggcgcagctcgtcctgctgttcatgccactgcccgccacgttcaccaacatctggggcattctctccaccctgctcatgttcccgctgttccaacagctcatggatctcgccaccggcaacgtcgacgcggaagaaagcggcaagcagctccacttccagtgagtggtgcgccggcgtatcctatgggtgttggcacaacccgcgacggcacccgtgcaataccgcccgttgcaatatcactcgtggcaacactgcctgtgacggtgtcacatagtcgtatctcatcgggcctctgcctcaatcaccatatggcggacgcattcctcccacatatcggagaaatgcgggatgccgcgcgattttcggccgatttggggctgtcgtcccgcagccgtgcgggacgacacgcacgtcaaacgatacacacagccggcatcccgcaccccatttcgctggaccattggaattccgccattttcataatctcgcgacgacaccatactgcgcaccatttcaccatcaaacgattgacacaacaacggtggcaaccacgccatcggcaccaggacacacagcgagctcgaacctatcacgattcgagcgaaaccttcgttgttaaagaaaaaacgctcaagttcctcctccaacacagagaaacctgagcgcagcaatcaagcacccaacacccgccactacttcgaggcaacgatggccacgtagttgccttgagtgtagcccttgatggggtcttcgacctgatcgttttggtagggcggattggcgagcacggtctggaagaactggagatcgcggtagccgatgcggatcagcaggtcggcgtaccagggaatcggatgccagttcggtttgtaggcgtgcgtgtcgagattgaagaacgaggtaccgaccagcaggtcgtcgatgtcctcgcgtgcaatgtcgtagcgctgcgcgagcttcaggatgatgccaagcgtgctttccgccggcacatcggtgaggatcagtcggccgttgtcggcaaggacttcgcggttgtgggcgaaggtcgactcgatttcgtcatcgggaatgaagccgaagctcgctccgttgtagacgatggtgtcgtacggcgctcccgcgtagtcgcagtcctgcgcggtgctttccaccacattcaaccctttctcgcgggccgtggcgcctaggcttgcggacggttcgacagcctcggccacctcgatgccgtatcgttcgcgcagcagggtctcgaagatgcccgagccgatgccgatggacaggatcttgcccggttcgcgggtggtcagcgcccggtgcagcagtcgcagacgcgactcgtagatattcggtcgcgcgcgccaggtgttgtcgagaatctggccgttgtccttgtaccggtcgaaaaatggttctcccatgggtgttcctttcccatcactcgtcgtggcagcagccggagccgccggccgtcttggcaccggcgccggcgccggaaccagaatcggccggattgcccgcggtcgattgatccgtggactgcccggtcgtgccggtcgaatctcccgactcccccgccgtcgtgtccttcagctgaccatccgactgttcggtcttttcggccgacgccgcctgatgatggtgcgcggcattatcatcgctcaccttgctgctggttccggactgttgcggcgcggaggtgcccgccgcgctgccgcaggcggacaggcccaccgtcagcaggatcgcacagaacgatccgatagccaccttgccccaacgagttgtctgtaatgtagtcgatgtagtcataccctttccttgttcatccgttaacgagctcaagacacgctacttacgcgccaccaaagccacgtaacttccctcctgatagccttcggccaccggctcgcgggcgtcgttctggtagatcaggtgccggcgcagcgcctgccaggtggagaatcgttcgaagcctccgtcctcaagcagcgcgcgatagtcgtcggtagtgcgccagtattccttgtgcggggtttcagccccgtaccagctggcccgcagcacttccgcgatatacgattcgccgggtatgacgaacgacgcctgcaccgcaagtcccaaggcgctggccggcggcacgtcgagtagggcgagcacgccgcccggcttgagctgccggtaatgcgcccggaacaggtcgcgcagcgtggcttcgtcgatgaacccgaaggcgctgccgttgtagaagatcgtgtcaatcgaggcgtcctcgaacggcacgtcctgggcgagcgcctcggtcacgtcgaagccgcgcccgcgcgcttcggccgccagattcgccgacggctcgatgatgcggtccacgtcaagcccgtcgcgccgcagcgccgcctcgtatgagccggtgccggcgcccacggacaccgtgtatccgatgtcgcgcgtgccgtccgccgtgatggcgacttccagcagcgcgagtttcgaggcgaaaatgttgggatggtcgcgttcgaagtcgtcgaagtattcgtgcttgaacgggtcgccggtatcgctcatttgacgttcctcagcagttcgtcgaccttgtcggtgcgctcccacgtgaagtcggcgtcgtcgcggccgaagtggccgtatgcggcggtcttgcggtagatcgggcggcgcaggtcgagctggtcgatgatggcgagctggcggaagtcgaatgtggcggccacggcgcgctggatcttctcgcgggccacggtttcggtgccgaaggtctccacgtcgatggtgatcggcgtggccacgcggttgaagtagccgagctgcacctgcgcgcggcgggcgaggccggcggccacgatgttcttggcggcccaacgtgcggcgtaggcggcggaacggtcgggcttgcgtggatccttgccggagaacgcgccgccgccgtggccggcgatgccaccgtatgtgtcgacgatgatcttgcgaccggtcaggccggcgtccgccttggggccgccgttgatgaacggtgaacggttgatgaccacttcggcttcggacgcgtccacgcccagcgtggcgagcaccggttcgagcacgtattcgcgcacctgcgcacgcacgtcgtccagcgcgagcttgtcggaatgctgagtggagatgagcacgtggcgaatcgcgcgcggatcggtgatgttgtcgttcgcgtattcgaccgagacgagcgtcttgccgtccgggcgcagcagcgggatgatgccgttcttgcgcacgtaggccaggcgttcggcgagacggctggccgcgtagatcggcagcggcagcagcaccttggtgtcgtcggacgcatagccgaccatgagtccctggtcgccaccgaacgtgttgtacgcctcctcgcggctcaccttcgtgtcgtcgccgtagttgccccaggcgccgccgtcgttgctgtcgaattcgcgcggacagatgttgttgatcacgccggcgccttccgggtcaaggccgctggcggcgtcggtgtagccgatatcggcgatggccttgcgcacgatggccacatggtcgagcgtcctgggtgccgacacctcgccttcgacgaccacgagcccgtccttggcggacgtctcgacggccacgcgcgagtccgggtcgacctcaaggtaagcgtcgagaatcgagtcggagatgatgtcgcacaccttgtcgggatgtccttcggtcacggactcggaggtcagcagtctggtcattggtggttccccttctggtttgattggtggttgctattggttggttattggcgttcgtttgattgacggatgattgccggcggccgcccaccgggcctcccccgaagtccggccggccgatcgtccagaacccggtcagaacgtggcgatgaagcgttccagcgcttgttcgccgaagcgcagcgcctcgatgggcacgcgctcgtcgatgccgtggaagttggcgatgtagtcgaatccctcgggcaccttgagcgggatgaatccagccacctgaacgttcgggttcacggagagcaccgccttgctgtcggtgccgccggacgagaggaacggcagcacctgcgcctcggggtcgagttcgccgagcacccgttcgatgccggtgaacagctccccgtccggcgcggacaggtagcctttgctgcggtggatcttggccacgtccacgcggtcgccggccagggtcttcagcgcgtcgagcacgtcgtcctcctgcccggacagcgcacggccgtccaccagggcgctggccttgccgggcacgatgttcacggtgctgcccgcgtcgatggaagtgacgttgaaggtgttgcgcaccgaggagccgacccaggctttggcgaatccggtggcctcgatgagctgggccacgtgttcgggcgagtcggcgggaatgccggtaagttcggcgagccggtcaagcagcagccgggttacggagttgagcgccaccggccactgatggtcggcgatgcgcaccgccgcgcgggcgatatgcaccacggcgttgtccgggttgatctgcgagccatgcgactgcgtgccgcgcgaggtcagggagaaccattgggtgcccttctcccccgtctgcacgtagtagacgcgacggccgttcacgctgccggagaatccgccggtttcgctgatgatgtagcccacgccgtcgaagacctccggacggttcgcggccagccattcggagccttggaagccgccggcctcttcgtccgcgaacagcaccagcttgatgttgcggcgggggcggatgccggcccgggccagggaacggacggcagcgagcgtcatcgccaccatgttcttcatatccacggcaccgcgcccccagacgcacgccgtgccgttgtagtcgcggatgacgccacccagcgggtcgacgctccagtcgtcggcgttggccggcacggtgtcgagatggccgtgcacaagcagggacggcagcgtggggtcctcgccggcgatgtccgcgatgaggttggcgcggccgggcttgctttcgatgatgatggagtcgatgccggcctcggccagtcgctcggcggcccattcggcggccgggcgctcgttggtggtgccgctgccatcgttgcgggtgtcgaatcggatcagccgctggaggaacgcgacggtttcgtcgccggcatcgatggcgtcggcgacggcctgtccggcaacactttcgacgttctcgacgctctcgacttttaccgcagtctcgttcccgagcacgtccacatctactacgctgatggtcaaagcgatccccctgtgtgatttcccgatgatgttcgccggccgctctcccctggtcgggcggcaggcgatgtgttgaattgactcgaatcgtatgggatgccggcagcctcgtcaaacggcaaaaccctcgcgtttccgccgttttggggtataagcaaaatcatgaatgggtgccattgcggccccagcgttcacgtttgcggccgcccgcccaccgcgctataagctcaccggtgggccgggtataagcaacgggtatacggccgattccggatgccgacggcccataatcatttcattgatgccatcataagttttaccgatgggttgcacggaacggcttcgctgcgaacctgatagattgtgagccacatggaccggccggggatgccgggaatagggaccatcacggttcccaccgttatcgaccacataaaaaggggaattcatgtctgatcatcaattcgacacggcgcaggtgcatgccggtttcgacccggccgccaacgccgattcggtgacgccggtcatttactcgaacgcggcgttctggctggagaattcgcagcgaggccatgacgtggccaatggcgatgtgccgggcttcctgtattcgcgcgtatccaatcccacggtctcgttcctggagaagcgcatcgccgaactggatggcgccaaagaagccgtggcggtcgcctccggcatggcggccatcacctatgcgctgctcaacacggctgagggcggcggccgtattatcgccccctatgacgtgtacggtggcaccttcgactcgctgcgcacgctgctgccgcagttcggcgtgaccacctcgtttgtggagaacatcaacgatctggatcatatcgagtcgctgatcgagcagggctcggacggcgagggcggcacggacgtcaaggcgattttcgcggagtcggtctccaacccgaccaccgtggtcacggatgtcgaggcgctggccgaactggcgcatcgccacggcattccgctggtcatcgacaacacgctgcccacgccgtatctgtatcgtccgctcgaacatggcgccgacatcgtcgtgtattcgactaccaaggcgctgagcggccatggcaacgccatcggcggcgtggtcacttccggcgattcgttcgattgggccaatggccgctacccgcagttcaccgcgccggagtacattctgggcgaggccacgggccgtgagccgcgcagcttcgtcgaggccgcaggtccgctggcgttcatccgccgtctgcgtctgaagtatctgcgcctgaccggtgccgtgctgggcccgtttgaggcgtatctgcagctcatcggtctggagaccttgaccgagcgcgtgtccaaggagaccgcgtccgccggcaaggtggccgcgtatcttgccggacaaaggcatgtgacggccgtcaactatgccggtctgcccggcggcgcgcagtcggaactggtggccacgaactatccgaacggcatcggctccgtgctgtccttcgagctggagggcggccccgaacagaccgccgcgttcatcaaccaggtgaagctgttccgttatctggcgaatatcggcgacgcccgttccctgatcgtggacccggtgaacaccacgcaccgcgagttcaccaaggaggcgcgtgccatcgtaggcgtgagtcccacgaccatccgcctgtcgatcggactggaaaacccggacgacctcatcgccgatctgtcccaggcgtttgatgccgtgtatggggagtaatcacatacggcacaagaagagggcggctgccacatggcagtcgccctcttcttgtgccgttcttggctcccctcctgaggggagccaactcacttattatttattcctcaccttccctgtgcacatcaaagtgcagtttggtcagcagcagtttgcggtaggcggcgaagtcgtcggatacgcggtcgcgctgggccaggtcgatcggcacgatctccttgatgcggcccggacgcggcgtcatgatgaccacgcgattgcccaggtagatcgcctcgtccacatcatgcgtgaccagaatcatagtcatgtggtacttctcccacaagtcgagcagtcggtcctgcagatcggcgcgggtgaacgagtccaaggcacccatcggctcatcgagcagcagcactccggggtggtcgatgagcgcgcgggcaatggccacgcgctgggccatgccgccggaaatctggtgcgggtaggcgttgccgaacccggtcagccccaccttctccagatactcgccgacctcgtccttacgttccttgtacttgccctgggccttcagtccgaaggcgatgttctcctcgaccgtgagccacgggaacaggctgccctgctggaacacgtagccgcgttccgggttcggcccctcaatcgggcggcccttgaacgtcacctcgccgcgctgcggccggtcgagtccggaaatcaggcgcagcaacgtggtcttgccacagccggaagggccgatgatggagatcagctcgcccggtcggatgtccagatttacgtcggacagagcctgggtgaccgagccgtcggagtccacgaagtcgcgttcgatatggctgatgctgataatcgggttcgtggcgttttcggtgtccacggcattgcccgccgtcgccgtcgtttctgcgattgcagcgctcatttgaccagtccctcctgccagcgcagcacacggccgcgcaccagttcgatgagtttcataatcagggagaacagcacggccatgatgacgatcgccgcaaggatttcgttgtaggcggaccatgccttcgcctgatcgatgtagtagccgaggccgccaggctggcccatcatttcggaaatcacgagggtcaggaacgagaggctgttggccatgccgatgccggtgaagatgctgggcatcgagtgcggaatggccacatggaacaggatgtagcgcgtgtccgcgcccaacgtgcgcgaagcttcgacaagcatcttcggcgtgctctggatgccctgcgcggtcaggaaggccaccgggaaccacgagcagatgaccagcaggaacatggcggcaatgaacggcgtgggcataagggtcagggcgaacggcatccaagcgaccgccggaatcacgcccgtgatcttgagcaccgggaacacccagtagtaggcgcgggcgaaccagccgatgagcacgccggtcaccacgcccagcaccacaccggtcacgaatccggccgcgaacaggcgcaccgaatagaacgtgttgagggcgatgtagctgccgtcggtcaggaacggctccagcacctgggaggggccggggaagaacggctgcggcaggacctgcagtttggtgccggtgacgtcccacagagcgagtgccagtccggctgcgaaccggaattgggcgcggtagcggaatcgagccgcatccttgggattacgggcgtcgacgatgccgatgaccacgtacaccagtgtcaacacggccagcagcgtcagatacagttcctggccgttgagcaggaagatccagatctgcccttgcttgaactcgacgggggcgctctgcgggaagatcacgttgacgatgacggcgatgacgaccccggccgcagtgagcgccaccacgaacggatacggcaggctccgcgcggcgcgctggtcggcggccggccggcttacggcctgtgccgtcgcctccgaatgctccgctacgggatcggcggcggagacggatgccgcccgcgctgattgcggacgtgccgggtcccgcgtttcgagccttgcggccgaacgcggctccacaaggttggcggtgatactgctcatgggtggtgttccttccgatgacgaacgatgaacgaacgaatgatggtgaatgagaaatcgaaatcaatgcggtccctgcaacaacagggcggacggacctgaacaggaccggacggtcaatgccgtccggccctgttcaggtcctaccgtcataccattgatgcaatcggatggccgctggccgcgctcactgatcaatcttctggtaggcctgcttggcaaaggcggacgggtcgttggtctccaggaagccgatcttcttcagtccttcggagaagtagtccacgtcgctttcgatctgcttggcctcgtcgggctgcacggcgtagtcgtagtccttgaagagcttgacgatcaggtccttgtcgttgatggtggagtacttcttcgccatgatgatgtcggcggactcttcaggatgctgggcgatgtagtcgcgggccttgttgagggcgcgcaggatggcgctcatctcgtcaggcttctccttgatgaccttgttggagccgtagaggaagcagcagaagcgcttggcaaacttcgggttcttgccaaggtcgaagatgatgtcgacggtgcccttggcctcctggatggtgggcagcgggtcccacagggcggccgcgtcgatctggccgttctgcagtgcctcgaattcgaggttggcgtcatcgaacggcaggtacttcacatcgccgttcttctggtccacgttcaggcccgcgtcgccgagccacaggttggcggccatgtacggggtgccgccgatctcatcgacgccgatggtcttgcccttcaggtcctcggcagtcttgatcggcgagcccttcttgacggcgatcttgatgcagcccttgtgcagggcgcccaccacgctggtcttcacgccctgctcgatggacgggaagaattggaagtcaccgttggtcactgggaagcggcccgtgtcgaggcccaccttgcgggtttcggcatcggccgtgaccagcttggcgttgatgccctcatccttgaagaatcccttctccagggcgatggcgatcggcgagctgcacagcgagctggacttcgggaattccacggtgccgtacttgtagtcggcggtcttggagttggagttgtccgtggtggtggacgcagcattgctgctgctaccggtgctgatgccacagcctccgaacgtcaaggtggtaagcagtatgccgaagatggcagtggctttcatggtaagacgatgctcggtaagcatttcgccattcccctctctgagccaccccgtctcacgccggggtacagaactccccccgaaatggctctctgtgtggtaacgcttgggagcgaaccgctcccgttcccgccatcgtcatgtctcatacccaaccgattcacgccctgcgcggaagtactttcatcgtagacccccgagtctcaggaaccgcgagatttcaacgttttggggttctggatatccgatagggcgatatatggccagcttatagcgaagaggttttctatcaacctggcttataaccaggctgatagccagatcagtcgctccccaatgcggccaatgtgttcacaacggaggtggcgagcagatcggcgccgtcggcgagcgcatcgagtttgacatagaaggtggggccgtgcatggcacggcccttgttgcccacgccaatgcggaagaacgcgcccggcgccctgtccagataataggagaagtcctcgccgccgagtgtggcgttcggtccggtcacggtgagtccgaggctttcgtcggtggaggccacgagcgccaaccaacgtggatcgttgatcacggcgggcgcactgtcctcccagatgaagtccacggtgacgccgtaggtggcggcgatgccttccacgatggcctgaacgcgattatggattatcgcgcggtcttcggggaacgcggtgcgggcgggcggcatgcgtgcctcggccgtggatggtgatgcggaatttgttcaccgcgccggtgttgatcacggccggcaccggtggggttgcctgcggccccgcgggattcctcggccggctggaagatgagcttcaccgtgccggcgaaccggttgcggcgtccctgaagcaagagcacggctccgaaggcggtggtcatgttgtagtcatggccgcacccgtgcatgtatcccggggtttcggaagcgcacggcagcccggcctgctcctgtatgggcaggccgtcgatgtcgccgcgcaccgccaccacatgcccggcggcccggcaccggctccgcggtggggtccgccgtgccttgcatgcgtgacaccaagccggttttgagtcccgtgtccaaaatttcgatgccgtgcacggtcaggatctccttgatgcgggccgtggttttgacctccccgtacgacggctcgggatgccgatggaaccaccggtagtattcctcaagttccggctgcagcccctgcactcggttgtgttccttcacggacatatccgctcctccctatcgattttcattcggataccatgccgttcacccggatatggcaccatatgcgcaggtggcccgcacgattggattcgtgcgggccacctgcgatggttttgcttgaaattccagaccggcttccctgtccgtcagacctggcccgacctcatggttgccgagcgcggtcgattggataatcggccgatatcaggcgatcagcttggaaatctggctgtcgttgtcggcgtcgatggtctgcttgacatccagcggcagggcttcgtacgctttgtcgagggcctggccgaggtcttcgaccaaatcgtcgacgtcctcgataccgatggacagtcggatgagctcgtcggtgatgccgaccttgaggcgttcttcgcgcggcagttcgaagtgggtcatgcgggcgggcagttcggcgagcgattccaccgcgccgagggagacggccaggcgaaacacgtgcaggttgtcgagcaccaccgagggatccacgccctccttgacctcgaagctcagcacgccgccggcacccctgagtcccttgaccgtaagctcgtgctcgccgtcctcgcccaggcccggatagtgcacgctggccaccagcgggtgcttgagcagatactgggcgatggccttggcgttcttctgctggcggtccatgcgcagggccagggtctggatgccgcggcgcaccgcgtcgcattcggccggagccagaatgccgccgagacggttctgcgcgaagtagatgcggccttccagatcctcgctggaggtgaccacgaggcccgcgatcacgtcggagtggccggccaggtacttggtggcggagtggatgaccacgtccgcgccgaggtcgagcggctgctggagatacggggtcacgaaagtgttgtccacgatcaccagagcgccgtatttgtgggcgatggcggcgatgcggctcacatcgttgacctgcagcagcgggttggtgatggtctcgaagtagacggcctttgcgggggcagtgtcgccgttgccgctgatggcgcgttcgagacggtcgaggtcgccggccgtgttcacggtggtgacctcaagaccccaacgggtgaagtggtcgttcaactgcgagtagctgccgccgtagacgttgtcgccggccacgatgcggtcgccgggctggaagatggagagcacggcgtggatggcggccaggccggaggagaaggcgaagccgcggcgaccgtgttcgagctgcgcgatctggtgctccaggaagtcacgggtcggattgccgctgcgcgcgtaatcccagcgcggcacggagtcgaccgaggggaaggcgtacgtcgaagagttgtagatcggcgggttcacggctccagtgtcgttgtcgtcgaccggcagaccatgaacgagctgcgtgttgaaccttgccataattgtccccttatcagtaggttgaagcgtggtggcggcacggcgggcggtctcggccgacgccccgtgcggcatggttacgaccataatgcaaaagcccatcgcctaccacggcgttgctatatgggttggttatggatgggtataagagcggaaaccctctaccccggctgcccgagtccatgccccgactcaggcactctttattcgtattgttctcaccttttccggcgtatacgaacgggccggcaccgaatgtcagcaccggcccgtcgcaggagtaatgagcagtaatggcagtgttattggatcaggcgaacacccccgaggtcaactggttgaatacgtccgcttcagcatagttctggaggtaacgggagcaggcgatttcgaaggcttgatcaaggtcttcgataaggtccactgcatcctcgatgccgatggcgagacgcacgagttcgtcggtgatgccgatcttcaaacgctcctcgcgcggcagttcgaagtgggtcatgcgacacggcagttcggcgagcgattcgaccgcgccaagcgagacggccagtcggaacacgtgcagattgttgagcacgtcggccgggtccacgccaggcacgacctcgaagctcagcacgccgccggcgcccttgagtcccttggaggcgagcctttggtcgcctgcaccgggcaggcccggatagtggacggacttgaccagcggatggaccagcaggtactgcgcgatggacagcgcgttctcctgctgtcggtccatgcgcaggcccagcgtctggatgccgcggcgcaccgaatcgcattcagtgggcgccagtacccctccaagacggttctgggcgaagtacacgcgattggccaaatcctcaccggagacgaccacgagaccggcattgacgtcggagtgaccggccaggtacttggtggcggagtggatgaccacgtccgcgcccaaggtgagcggctgctgcaggtacggggtcacgaaggtgttgtccacgatcgacagcgccccgtaacggtgggccaccgtggagatggcgcgcacgtcgttgactttgagcagcgggttggtcagggtttcgaagtagacggcttgggcaggcgcgatgccgttcgcgcggtcgcccttgacagcggcctccaatgctgcgatgtcctgggtgttgacggattcgacgatcacactccaacgggtgaagaactcattgagctgcgaatacgagccgccgtagatgttgtcccccacaacaatgcgatcgccgggcttgaaaatgctgagcacggcatgaatcgcggcaagtccggaggcgaatgcgaagcctcgcgtgccttgttcgagttgtgcgatctgcttttccaggaagtcgcgcgtgggattgccgcttcgtgcgtagtcatagcggggcatcgcgtcgaccttctcgaaggcatatgtcgttgagttgtagatcggcgggttcacggctccggtgttgttgtctccaaccggcagtccgtggacgagctgagtattgaacctggtcattgcgcaccccctttatggtgttctctatggctgctgtgcacgaggccgttccccgtgcggcacgtctacgacgataacgtatcggacacttgaatggaacggcgttgctatatgggttgcttatggaccgttcaaatgcggtcgcggcggtcacgtggatacactgggagccatgaagattgccaaggccttgacccgtttgaccggtcctgaaaccaccccggtgttcgtgctgttgcacggctggggttccaatgaatacgatttgcccgatctgctgaactattgcggtgccggttcggctgattatgccagtttgcaggcacccatcgcctatggcatgggatatacatggttcggtgcgtgggcgcatgaaggtgtgccggagggcgaatcattggacaagcaggcggctgaggccgcccaagccattgatgcatgggttgcggagcatatttccgccactcggccggtggttgccatgggattctcgcagggcggcctcttggccgcgcatctgctgcgtttcaatccgaagcgatatgccgcagccgtctcctgctctggatggctggcaccggggtccgttgcgggcgatgccgaattggcttcgttgaagccgcccgtgttctacgggcatggtgctgcggacgacatcttcccgaaagccgatgtgacggcgatgggtgagttctggcgcgagcacggcacgttgaccgaacaagtgtatccgggcatggcccattcgatcaatatgccggaaatgcgcgatattcaacggttcttggaggccaacggattcattcggccgcagatttggtagtcaccacctcacatggcgtagtctacgtgggcgaattcggggaccttataccatttgacggggtagccggcaccgtgggcgcagaagaccgagtcgggggtgttgtccagatcggcttcgggatcgtaggcggcggctgcgatgacctgttcggcgtcatggcatggcttgtagccgccgaaggtggcggagaaacggccatggccgtgcgtgtactggttcacgtccatcgcatagtcgcgcatttcggacaccggcgcctcgccttcgatcacggcgtattcgtcatcggtgaccggggattcgaagctgccggccatgcgctggatgtcgctcatggcacggccgatcatgtctgcgggcacttcgagccggaaccggtaccacggttccagcagtcggcagttgccctcccctgtggtgtccggccggctctcgaccggcgtctcgggccggccactgactcctgccctggcttccatcagcccttggcgaatcgcccggtacgtggcttgacggaagtcgccgccttcggtgtgcttcagatgcgcgcggccggccaccaaagtcatcttgatatcggtgagcggtgcgccaacgagcacaccgagatgctcacgctcggtcaggtgggtcagaatcagccgttgccaattgcggtccaaatcattttcggacagggccgaggccacagcgactccgctgcccggctcccctggttccagcaggatatgtgcttcggcataatgacggagcggctcgaaatgacctgcgccttcgatcggcgcagtgatggtctcacggtacaggatggagccggggccaaaggacacatccagaccgaaccggtcgtgcagggtctgctggatgatttccagctggacagcgcccatcaattgcacatgaatctcggccagccgttccacccacaccacatgcaacaacgggtcttcgtcttccagctcacgcaatgcggtgatgaccttatgcaaggtcagatcatcgaactggggacgggccggcaagctattgtccgccgcggtctggccggcggtgtcgttctcctcattgcggccggttcccgacttggcggcatcatgctcggcatcgtcctgattcgcgctgtcatggccggctcccccacgtttggccgctcccgaggtgccggccgtatcggattccgctccggcgggcaacaccgtgtaggtcaacacgggttgcagcgacggcgattcggcgtccggttccgttcccagcccttcgccggggaaggtccgcgtcagtccggtcaccgcgcataccgagccggccggcacttcggtgaccgtctcgaatttggcgccattgtagatgcgcacctgatcgactttctcggaccacgccatgtcatcatcctcctgcgctggcgacggtgtcgacgccgcggcgcacgaggatgaggagacgatctccttggctttgagcgcaccgccggtgacgcgcagccacgtcatacggttgtgctgaccgtcgtgggcgattttgaacacgcgtgcggcgaaggcggccggccattcacgttcgcgggtgaacgtctccagcccgtccaggaattccttgaccccttcgagtttcaatgccgagccgaaatatacggggaacagctcgcgtacggcgatcatcgatcgcaatctgcccacggacagcgcgccatgttccaaatagtcgttcatcgcctcctcgtccagggtggcgatgtcttcggcgaacgcgtccaacggtaacgcgctgccctcagcggactgttccattgccggcaacggatatatcgcatcgctcagacgcctgcgcaactgagccaacacggcctcgcgggcaaatccggcggcgtcgcacttgttgacgaagatgaacgtcggcacaccgtatctggccagcagacgccatagtgtctcggtatggccttgcacgccatccgtgccggagaccacaagaatcgcgtagtcaagcacacgcagcacacgttcggtttcggctgcgaagtccacgtgccccggcgtatccagcaaggtcaggcgcaggtcgccgtgttctaccaatgcctggtgcgcgaaaatcgtgatgcctcgcgccttctccaaggaattggtgtccagaaacgcatcgccgtgatccactcgccccaatttgcggatctcaccggtacggtagagcagcgcctcggacagcgtggtcttgcccgcgtccacatgcgccacgatgcctgccactatctgtttcatcagctgtgctcccttcccgatgcgccgcatgttgccggccgcctaaccaatatatccgagaaaatccgggagggaaaaattttaccgtcagaccgggctgccggtacaataagtcaccgaacaccgactgatatgaggagcctccgtgaccacttccggcattaccgttttcggccaaccatcccagcccaatcatggtgccggcgggcgaatcgccatggacgatgccctctttcccaccgattatgtggcgctggatctggagaccaccggcttttacccgaacagttgcgccatcacggaaatcggtgccgtgcgcgtgcgggaggggcatatcgtcgatcaattccagcagctggtgaatcccttgcggccgattccgcgtcagatcaccacgctgaccggcatcaccgatgcgatggtggccgacctcgatccgattgacgaggtgcttccccgattcatcgcatggctcgctaccccggctgccggtcccaccgttgagccgattgtcggtcataacgtcagcttcgatctgcgattcctggattacaacacccggcatatcgccggctgcggctttgcctgcgcggattatgacacgatgcagatcagccgcgccctgttccccgcgcagcggcatcaccgtctggctgacctgatcgtgcgcttcggcatcgcggacaatgaggaacaccgcgcattaagcgatgccatccagacccagcagtgcttcgaatggatgcggcattatgtcaccgagcatcacgaatccgaagcaatccgttggaagcaggcgccggccagaaacagcaccgaaattctccaccagcagctagtggtaaagcggtagttacagcccgtattattcgcacatagaggaaaactattagtcgctgggctagagaccttatagtggacggattcctctcgcatatcggagaaatgcgggataccacacggttagcggccaatttggggccggcgtcccgcaaccgtgcgggacgccacgcacgtcaaacgatgcacacggctggcatcccacaccccattccacagaaccattggaattctgccaatcccacaaaccggtgacgacaccgtacatcaggttctgtgggacgccagaggaaaaacacccgaaatccgctggcatcccacaccatgtcacaccgcacctgcagcatcgcaccacaccacatcacgccgacacctattcgtgccccccatttgcataattcgacgtttttggaagatggcgcacacatgcatgtgcccccatttgcatatcaaacggttgacgcacaaatggggacacacaaccacaactcagaatcctcgaaattccgccaatcctgagatttcatcccccaacacggcaatcgccgcctctgccaccattttcgcatcaaacgattgacgcaacaatggtggcgcatgcccctttgtatcggtatgaatcagtccctgccgtcaggctctccccctattgtgagggccgactggcagggactgaacacgcataatcacatgagcacgccatgccaagcatggacatctcagtacgaacagaacctattcgcacacgttacagcccgtattctttggcgatgacggaccagaggtcggcggcggcctgatcgacggtttcgttgacgatggtgacgtcgaattcgctttcggcggcgagctccactttggcggtttccaagcgtcgggcctgctgttcggcggtttcggtgccgcggccgatcagacggcgcttgagctcttcgaagctcggcggcgcgatgaacacgtacaccacttccaagtcgagttcggcggcgcgctgcttgacgcggcgagcaccctgcaaatcgatttccagaatcgttggcatgccggcagccagatgctcctcaacaggcttgagcaatgtaccgtagtgggccatgccgtgcaccacggcggtttccaggaactcccccgccgcttcgcgggtcaggaactcgtcttcggtgaggaaccagtagttgacgccatcaacctcgccggggcgcggagcgcgcgtggtggcggagacggacacccacacttcggggtggtcggcgcgcagcttggcttccacggtgcccttacctactgcggtagggccagtcaggacgattagacggccggcatgggtgttttcagtcatgggttcctccggagatgatgtggtgtgcagcgattatgaatccaatgtggtaacggctcaccggcgagatgaccggtaactgttacagccccgacgaacagggaagaatatgaatcgtgatgcgacgtatgcaatgagatagatacgtacgcatgccgcgacatctgattccgttctgattactggttttctgcgccttcggcagtggcttccatcagcgactgacgtacgtcaagcgcaatcgactcggtagcttggctcagtgcggcgatatccggcccatgcgaggcgataaagcgggacacggtaaccagcacgttgccgcgcgtaccgcggaacacggttttcagatccttggcctcggcaccctgccaaccgtaaccgggggaaagaatcggaccggtgaacttggaggggtccacgccggaatcctgcatccattggccgatggtggcaccgatgatcagacccaccgagcccatgccttcgatatccacgttatgcttctgcgcggtggaggcgatgccgtaggccacggtacgtcccttgtaatcgccgctctggcgcaacgcggtctgcagactcatgccttccggattggaagtcagggaggcgatgaacacgccgcgtccgttttccaacgcttcggtaatcaagccgttcaacgagcgcgcgccatagtacggcagcagcgtgatggcgtcggccagcaacggtgcaccgggcttgaaataggcgtctgcgatggcggaaatcgtggtggacaggccgccgtgcaggcagtccacgatggtgatgacgcccatttgtcgtgccgcgtagagcacgcgctcgagcgcttcgaaacctttggctccgtaacgctcgaacatcgacgtctggaatttgactgctgcggcgcgcccgttggcggcctgcagcatacgcatggagaagagttcggcgccttcggcgtcgacgttgtatccccagtcggtgaggagcttgcgatgtgggtcaatgcccacacacagcggtccgtatttggccattgaattgctcagtcgcagaccgaaatccgaacgttgtgcctgcaattcctcactgctgggtgtagtcatcagaactcccgtcgctccaattcgaacagctgcttcgaatgctcctgaatgctcatgatctgataatcattatgcttcacggcctcgatagccagcagtgcggcttggaactcggtgatggtggtaaactgcggcagatcggctgcaatagcggcagcacggatggagtagccgtcggaacgggagccgcgcgagttcggcgtgttgaggatcatgtcgatcttgccttcctcaatgagctgaaccacgttcttgcccacggagccggcggcgtgatgcacctcgaccggggcttccggatcggtgtccacgcgggtgctgatcttgtccacgatgttcgactcgatgccgtaacggcgaagcacggaggcggtgccctcggtggcccagagcttgaatccaagctcttcgaggcgcacggcgagcagcggcagctgacgcttgtcggtgtcgttcacggaaatgaacacgttgccgtgggtcggcaggccaccatcgtaggcggcgagctggctcttggcgaaggcgtgcgggaagtcgcggtcgaagcccatgacctcgccggtggagcgcatctcaggtccgagcaggatgtcgacggtcttgcccaccggggtgcggaagcgcttgaacggcagcacggattccttgaccgcgacctgctggccggggtggatgtcgccgccgtcgcccttgggcagcagcagaccgttggcgcgctggtcggcgatggtttcgccggccatgatgcgggcggcggccttggccagcgccacgccggtggccttggaggcgaacggcacggtacgggaggcgcgcgggttggcttcgatcacgtacagcgtgttggccatgaaggcgtactgcacgttgatcaggccctgcacgtggcagcccttggcgatggcgtaggtgccttcgcgcaggcggcggatctggtcgtcggacagggtggacgggggcagggtgcaggcggcgtcaccggagtggacgccggcctcctcgacgtgctccataatgccgccgatgtacagttcctcgccgtcgaacagggcgtcgacgtcgatttcgatggcgtcctgcaggaacttgtcgatgagcagcggggagggcaggcggccggagaccacggtatcggccttggcctcggcaagcgcgcggtccacgtacttggtgagctgcttgtcgtcgtagacgatttccatgccgcggccgccaagcacgtagctcgggcgcacgagcaccgggtatccgatgcggtgggcagcgtccatggcctcttcgaggctcagggcggtgccgtaacgcggggcgttcatctccgccttcttgagcacctcgccgaacagctcgcggttctcggccagatcgatggattccggggtggtgccgagaatcggcacgccggcggccttcagacgcgcggccaaggacagcggggtctggccgccgagctggacgatgacgcccttgaccgggcccatcctcttctcggcctcgtagatttcgagcacatcctcgaaggtgagcggctcgaagtagaggcggtcggacatgtcgtaatcggtggagacggtctccgggttgcagttgaccatgatggtgtcatagtccttgccaagctcctgcacggcgtgcacgcacgtgtagtcgaactcgatgccctggccgatgcgattcgggccggagccgaggatgatcacggcctcgcgc

SEQ ID NO: 321 - DNA, 54530 bp, Unknown
  R42_10m  MAG No. k141_4968
cacggtatgacggcaatggtgccgcaggtttttcgacgcgatacacccgcaacgcaagaccagaatcgacaatctgctgaatcgcggattcatattgcgccgcccgagcgccacgagcgatgtggccaaaaataaatttataccgcaatacacacttttcctagggttgcaattcgcgtatcctacatttttcctagggttgcgattgtccaaaattacatttttcctagggttaataatgcagaatactgcacttttcccagggttagtaccctgaccttccctaatcacacggtgttgtaaaggcgtcgcggtattggccgggggtgagtccggtgcggcgcttgaagacgaacataatagaatatctcaagcatcgatgaatacggagatgatcacaatggctgattacatcggaacagtcaacaaccaatcttcaacacagcccaacggtcacaattcacatagcaacaccaccgagtcgctatggcgcggcacggattatggcaaatggttcgtagcggattcatgcacgtcgctgtcatcaagtatccaaggtttcgcaatgccactcatcgcgcagaccgtcacgggctcaccggcacaggcgacgctgctggattcaatcatgaccatgatatcgtcggtattgcggctgccaggtggcgtggtacaagataagtacgaccgcaaaaaacttatgattgcgttcggcctgattggtttcgcactgttcggcatatgcgcggccctaggatgggcgggattactcatatacccggtgctgatggtacttgcgatatgcctcggcatacgctcaggcctcctaggaaccacgagcaacacgatgctacgaggcatcgttcccgatcaattgctgcccaaggcgtcaagcctcaatgatggccgcgatgccgccctcgaactcgccggcgcaccagtaggtggcgtattgatcggcggcggtctatggctgccattcgcagtcagcgcgctgctgaatctattggaaaccgcggcggcgatgcggatcacaaaatactggcatcgtggcgggcggaccaatacggagggccgcgcccttgccgacgatgaggccgatgagaatggcgatgcggccaacatcactcaggccgctgacgagcaggcaacgaccacgacatcatccgcgtcacagtattggcgtgagatgttttccggattccgctggcttcttagcgagcgattcgaacgtcgcctgattttgtcgagcgcgctggcgttcgcgtgcttcaactcgttcctgctgattacggtgctctcgatcggctccgacccatcacatgtggtgtcagccagtttcatgaacgtttctgtgtctgtgggcgtcatcgttggctcgctcatctcttccgtgctggttcagcatgtgcgcggcggcatagtcgccgtatcgttctacgtgctgatgagcatcggcgcgctcggcgcagcgctggctccgtggattcttgcgcgtatggcgtttctggcaatttcgctgctggccctaccggccggcaatgcggtaatcaacggattccaatcattgctcatcaacaaggagcatatgggccgcgtattcgccggcatgggcatgattgagacgattgctgccccggtgatcacatttctgtccggcatcgccatgcaacactggggttactcagtcacgtccgtggctttgggcttgtgcatcgtggcggccgcgatccctgccgtgacaatgagggaactggtcacactgcctaagccggatggctgggaggaccatatccgcaaatccgggctcaccaagttctgacaacaagtaagggcgactatctcccggatttgtgacgctcggcaaccgtcagcgtcacaaatccgggaagaggaaggtggatacggtttcagccgcgcgggcagcaaggtggacaaatcgttgccgggatggaatcgcggcaagtatgcaaaagcctcccattcgcgcgcgacgcataagcgcgcaaatgggaggcttcccaaccgcagcatcatatgcagaaataaggagagtaaggcatatgctgccgcggtcacaccccgccgggaacctgccgcaggccgcgtccggcatcgaaagccttgcagtcgatgcgtgcggccggccgttcccggcgcggtggccatgtcagacgtcagtcagacgtcatcacttctgccagccgatgtcctgcggcaggttgccggcgaagccggacgggccgtagttggccagacccttcttcgcaccgaggtacgaagccgggttggagaccgggatggtgccgtacagcttgagggcttccttctcggcggcgttgacggccttggtctgctcgtcatagtcggagaggctgccagccttcttgacgagctcgtcgatcttcttgctgcccacgtaggagaagttggacgggccgtcggaggtgtacagctgcggggcggacaccacgaaggtcatggcgctcggagcctgccaagccatcggcagcacctggtagttgccggaagacacggtgtcggagaacttggactcggccacgttcacgaccttgaccttgatgccggccttcttcatcatcgcctggtaggcgttggcgagggcctgctgggtggcgttgtcaccgaagaaagtgaaggagatctcaagggtcttgccgcccttggcgtagtagccgtccttgcccatcttgtagccgtcggcctcaagggttttcttggcgttgtccacgttgtacttggcctcggcgggcaggttgttctcgtagcccttctggaacggcagcagcagctcggagcccggctgctcggccttccagttcaggccctggaactgcacgttgttgtaggtgttcacgtcgaaggcctgagtgatggccttacgcacctgcaggtcgtcaagcggcttggacttgctgttgtactccagcacgcgggtcttggtgctgtagccgatgcgcagctgggcgtccttgacggaacggatggccttgatgtcgtccttggtgttggcctccacggcgtcgatctcgccgttctggaaggcgttgagggaggcggtgtcggccatctgcttgtagacgatcttgtccagcttcggcttgttgccccaccacttctcgttcggcacgaaggtgacctgggagtcggagaaggagtcgaccttgtacggaccggcggcccactcgttgtgcgggttcttcacccagccctgggtgaaggtcttcgggtcggcggccttcgggttcaccagagcgccgaagacttcctgccacgggtagtacggggtcttgtaggtcaccttgacctgcttcgggctgtcgccctgctcaacgctggcgatacggtcgaagccgtcggtgctcggcgggttgtagtccgggttggagccgttgttggcttcccacgtggccttgaaggcggtccagtcgatgtcggagccgtcgttccacttggccttcgggttgatgtcgtactgcacgaccatcgggtccttgctcacgagcttcatgtcggtcaggaagtccgggttcaccttaatcggggagccattgacctggtcggtcatgagcaggctgggctggtaccagctccacagctcggacatgtagccggtgttgccgtcggaagacaggtagttccagttcgggccgacttcgacgatggacagggtcagcgtgccgccgtccttgacgttgtcacggctctggtggttgtcgtaacgctcggtgaccttcggcatgggcaggtcgccggtgtacgacgaatcgatgccggccggcggttcggtggcgctcgaggcattgctggaaccgttgccattgcccgcgccgcagccggcaagcagcatggcaagcgccgcagtggccgcggcgagcgcggtcagcttacgtgtcttgttcattgttatttcctcctctatatggttccgaccgtcatgcgaaatggcatgcaacctgatggccgctcggtcgggaagtgtcatacggccgcagcgccgggcgttcgccgcggcagcgggcctgttgttcggcgctcagcttgggcatgagcgggcagcggcccatgaacgggcagccttcgaacgtctcggtggggctgggcacctcgccctgcagcacgatgcgctggcgggtgcgttccgccttcgggtccggcaccggcacggcgctgatgagcgcctgggtgtacgggtgcaacgggtgctcgaacacgtcttcggtgtcgccggattccacgatgcggcccaggtacatcaccgccacgcggctggagatatggcgcaccaccgacaggttatgggccacgaacaggtaggccacgcccagcttgttctgcaggtcctcaagcaggttgatcacgccggcctggatggacacgtccagtgcggagaccggctcgtcgagcagcacgagcttcgggttgaccgacagcgcacgcgcgatggcgatgcgctggcgctgaccgccggagaactgcgtggggaagcggtccacctggtcggggttcagctccaccagacgcatgagttcaccgatgcgttcgcggatctgctctttggagtagtgctggaccttcatcggctcggccaggatgtcgtagatcggcaggcgcgggtcgagcgaactcatcgggtcctggaagacatactgcacggccgaacgcagctcgcggcgcttctcgcgcggaatcttgtgttcgagcttggtgccgaacatctcgatctcgccgtcctgcggctgcttgaactccatgatctccatgagcgtggtggacttgcccgagccggactcgcccacgagcgccacggtctcgccttcgcgcacgtccagcgtcacgtcgtccacggccttgacctcgccgatcttacggcgcaggaatccgccggcggtcagcgggaaggtcttgcgcatgtgcttgacgtcgagcaccatcttgcgttcgtcgcgcgggatgccggcgaacttcgacttggcggcctcggccaccgtgtacacgtcgtggaaggtcaggcccttgtccacgatctcctgggtgcggtggcaggccacgaactggcccgggcggcccggcaccggctccatggccggctcggtggtgtggcatatgtcggtggccagcgggcagcgcggcgcgaacgggcagcccttgggcatgttgaccaggttcatcggggagccaggaatcggcaccaggcggctgttgcgttcgcggtcggaacgcggcacggcacccagcaggcccatggtgtacggcatggccgggtggtcgaagatggagtcgacgtccgccttctcgaccgggcggccggcgtacatgacgacgatgtcgtcggccacgccggcgatcacgcccagatcgtgggtgatgaagatgacggccgcgccggtttcacgctgggccttgcgcagcacttcgagcacctgggcctggatcgtcacgtccagtgcggtggtcggttcgtcggcgatgatcacgtccgggtcgttggcaatggccatggcgatcatcacgcgctggcgcatgccgccggagaactcgtgcgggaaggacttcaggcggtcctccgggtccgggatgccgaccaggttcatgagctcgatggagcggtcgtgaatctgctgttcggtcatcttcggattgtgggtgaccagcgcttccttgatctggtcgccgatggagaacaccggggtcagagcggagagcgggtcctggaagaccatggcgatgcccttgccacggatctcgctcatctcaagatcggacttgctgagcaattcctcgccgtggtaggtgatggagcccttgacgctggcgttcttgtccagcaggcccatgatggccatggaggtcacggacttgccggagccggactcgcccacgatgccgagggtcttgccggggtacaggtcgaagttcatgccgcgcaccgcgtgcacggtgccggcttcggaggcgaagctgacggtgaggtcgcgtactgaaatcaccggttcggatgccatgccttgcgctcctgtggtgttggggttggtgttggttgttacgttgcttgcgttgcgttcgtcgctcatgatgcccgtctcccctctcactcggccttgccgccagaacgggagtacgggtcgatggcgtcacgcagtccgtcgccgatcagctgcacggagaaggtcaggacgaccagcaccacggacgggaagatcagcacccatggcgaggtctgcaccacggactggccggcgttgagcagcgtaccgagcgaggtgtcgggcgccttgatgcccaggcccaggaagctcagcgaggtttcgctgttgaccgcaccgatcacgccgagcacggtgttgatgaccagcaccgaacccaggttcggcaccagatgacgcacgatgatggtgaaggacggcacacccatgaacttcgccgcgcggatgtattcgcgatcgcgcaggctcagggtcagcgtgcgcagcgtacgggcgtagccgatccaaccgaatgcggtcaggccgatggccagccacagccagtcgctgccgccggccgccatgccgacgatcagggcgatgagcaggaaggacggcacgacgagcagcatatccagcagccacatgcccacgcgctcgaaccagccttcgaagaacgccacggccgtgcccaccagggcggcgatgatcgtggtgccgaacgagctgaagataccgatggtcaacgaacggccgaggccgcggatgatcatcgcgtacatatccgagccaccgaccgtggtacccagccagtgctgggcggacggcggcgaggcgagggcggcgaaatcgggctcatcgtagctccactgggagaatttcgagccgaaaatcgccaaaagaatcagcagaatcagcaccaccagacccaccacggccgaggggcggcgcatgaagcggcgcacgtacagctgcatgcggccggtgcggtggaagtcgtcggcgctggaagcctcctgggcgttcctggcgtcggcggactgcggttcgctgccctgcggatcggtgagttccatatcctgggcggcggcgtcggagaccatgttttcgttgtcgttcatcatgttagatcgtcctttgcgcggggctcagctcagtcggatacgcgggtcaagccaggcggagaagatatccgccagcagcgcgccggacagcgtgcacacgccaccgaacgcggccacggccacggcaccgttgatgtcgttgttggcgatggtctgggtgaagtacatgcccaggccgttgatggcgaacacgttttcggtgatcacggcgccggtgaacacgccggcgatggagaaggccacatccacggcggtcggaatcagcgaggtgcgcagtgcgtggcggcgaatggccgcgttgagcgtcaggcccttggcgcgggcggtgcgtacgtagtcggcgttcatggtgtcgagcagatacgtacgctgggtgagatggtagcccaccatgcccggaatcgtcatcacgatggtgggcaggatcaggtgctgcagatagtcaaacacccaaagcaccgggttggagccttggtaggagtgcaggccggtcacgtagaacgcgcggctgcccacgatgttgttgaagttgatggccagcagcaccaccatcaggcccatgacggcggccgggaccaccaggaagaacgttgcggtggtgttgagcacgcggtcctgccacttgtactggcggatggccgtgtacacgccgatgctcacgccgaagaggatggagagcacggtggcgagcgtcaccagctgcagcgaagcggagatacgggaggcgatggccggcgccaccggcgactggtccgggctcaggccccagttccactgggtgaggatgcccttgagccagcggaaatagcggatgacgaccggcgtctggtcgttgatgttggccagatcgagcgaccggttaatcgacgcgatcggcggatgcggattgcgcgacatgtagttcgaacgcggatccatgaatgcgctggccaggaaatacgtcatcgatactgccacgaacagcatgatcacgtagttcacaatgcgcttgatgatgtacttgaacacccaaccacctcccagataactgggaaagtgatacccccccccgctcaaaaccacaaattgagtccaatatatggaatatgggtattgacttttccgactttttcctgtacagaaaactgcgaaaacacttactgtgtattgggcaaacatccgtttgttaattttgtatttcctgagcctttgctggacatgccttatactttcgtgtcagcagtccgccggcccggatggtgacagtccccgccgccggcaacggattatccatcagcatcatcagcatcagacaggggcatcatgacgacagacgccagcgcacgggccatcaaacccgaacttctgcgtacgtacaccgaggatttcaacaaggaccgcgccaacctgatcgcggcggacgcggcggtttcggccggcgtgctcaaggcggccaccgactatcgcggcgtgcgtgcgctgccgcgcgacttctccatcgaactcaagcagggttcgatcaccaatcaggagcgttccggccgctgctggatgttcgcctccctgaacacgctgcgctacgagcttatgcatcgctggaaccttgaggacttcgagttctccgagacctacctcttcttctgggatgcgatggagaagtcgaacacctacctggagaatgtgctgcgcacgctcgacgagcccaccgactcgcgcctgttcgaggccatcaactggggcccgtccgatgacggcggctggtggcagatgttcgccgcgctggtgaacaagtacggtctggtgcccaagagcgcctacccggagtccgagaactcccgtaattccgatgatttcaagcagtacctcaactccaagctgcgcgagttcgcagccgagctgcgccgccgttcggctgcgggcgctggcgaggacgagctgcgcgcgctgaaggacgagtacatgggcaccgtgtaccgcatctgcgccgtgtcgcttggcgagccgccggagaagttcgacttcttcgcgcgcaccaaggatgatgatgaggataagaagggcgaggcttgcaagtgcaaggccgaggtcgacgcagacggcaagaccgaatcctgcaagtgcggcgactcctgcaaatgcgagggcaaatccgacgccaaggcctgcaagtgcgataagaacaagtccgacaagccgaaaaccggtaaggacgagcgcccgcagattcgcgagatcggcatcaccccgcttgagttctacaagaagtacgtgccggtggacgtcaacgatttcgctacgctggccaacgccccgctcaagaaccgtccgttcaaccggcgctaccgcatccgcttcagcgcgaacgtggccgaggcgggcgatatggagttcgtcaacgtaccgctggacgtgttcaagaaggccgcgcttgaccagctcaccgccggccatccgatctggttcgcctgcgactgcacgcagttcgccctgcgcaaggacggcttcttcgaccagtccgtggtgcgcgtcgaccagctgttcggcaccgagttcaccggcgacaaggcccacggccttgaatacggcgacagcccgagcaaccacgccatgaccttcaccggcgtgaacctcggcgaggacggcaagccgaaccgctggaaggtggagaacagctggggcaaggacgccggcaaggacggctactacgtcatgtccgacgcctggttcgaccgctacgtcaccgagctcatcatccgcaaggaatacctcgacgacgccacccgcgccctgctcaccgccgaaccggtcgagctcgacccttggcagcccctcacccgccgctgccgctgacgttccgctggcgggagcatatattcgaatgccccttctctctgttcagagagaaggggcattacgttatgcgagtacgcccggccgcacctattcgagactatcgcggctgagctgagcaaaagtgccgtcatcatcggccaattgccggtaggttccggcctcgctaattgttccgaactagttatccacagagttatccacatctcacgcaagctagagccacataccccggttttcatagcgagcatgtgaccgctgcgctacggtggcgtcatgaacgacatattgcccactccaccgcccggcgtattcgacgacgaaccgtccggctggacccggccccacacaccgggcgttgcgtctgcgcgcaccatcaatcctgagctacgttcatcaccacgtatggcgagttccgcgccaactgtgattacaggtcctgtgtcgccagcaatgagcgaaaccctcacccaacgtaagcgggaaatgcttaaacgatgcacggacgccgcgcaacagctcgggcaaccggtgctcttcggcatggccacatcgctgatactccaatccgtgccgcttcccaaggattgcgatatcgaccccgccgagctccataccgtctccgactcacaccgcacacgaatacgtgccatcgtgccgccaacgacaccacacatctggaagccgctgagcgatgcgcacaatgtgcgtatcaacaaacatgtgtacgcactggatctgatacacacttgggcacaactcgccgctcatatatcgctcgaatcgctggtcatacttggcgacgcaatccttacggcaatcgcccgcaagccgggtctggcgaacggccgcactgctgacggcatttatcaggacttcgtgcggcaagtcactggactcccgaaattcaacgcaaaatccaagtgcatgatcgctcttgcattcattacgccccgcgtggactctccgatggaatcaaagacccgcatcgcgacgacgaaatacgggcttccgccagccgtgacaaattacacggtgcccggcgcgacattcagcaacggcgcgccgataacgctcgatctcgcttggcccgaatttcgcgtcgccatcgaatatgacggcgatcatcatcgcaccgacaaaaaccagtggcggcgggacaacgacaagcgcgaactgctgcgacatcatcattggatcgtcatcatcgccactgccgcgaacatggccgatgagccatcccaagccgaactcgcctaccgggtcgggcggcagttggcattgcgaggtgccgtattcgatttcactttgacggcaacgccactcgatgagatcgcccggcggaggcgacgaagaatataacgtttatcgcgaaagtcgtacagtatccatgttgcgccgacgctgcgcgactcggtgtccgtgtccgatgtcccggtagcgatgtcaatcgatttatgtgtggaccgggccagatttcgctgtcccggttctccatttcgcccctttttgagcaaccaagacaaaatttcattcacctatcaccccaccgtgcaatattcgccatcgtacatcggcggaattccggggttttgggattacggataatgggcgtttacaaggggggctgtcccggttcccgaaaagaagccgaaatcacgaaccgggacagcgaaatctgtcccggtaatcgcgtcaatcggttgccgtcatcaccggaacatcaactgcgcataggtcgaacgcttcaatgcgcaacaggcatgcgaccatatcgcgatagcgatattccgacggaagtatgggactcaccacgcgaccaatattatttgccgagctttggagcctcgtggttggcgtggcggatcacggcatcggggaaaccggcgtggatgtagtcggacagcatccgcaatagcctctcgtcaaaggtgtgccgctcatcgctgctggcatcgaccaggatgaaatcccatgagtattcggtgtcaccgtcgttgatgatgagtccgcggccagtgatttttgcggccagcaacgcggcgatctgtatggcgcctcgcttgaccaaggccgattccgcttgagtcaggttgcccgaaaatgtgacggtatacatcatcagtccccccttctttgttattttctagaacagcaatgccttattgtaaacagacagcactctgccataatccttttttcaatatgcggcccatggcattcccagcattaaaaaaaaagaaacccggcggagggggccgccgggtgagagagaagagagaagaagggttcagttatggggttcgaagaacctcgccaccggtatgaacttcattccgttgacatcttctatataaccgccccatgcttggcgaattgatgtgcttgtctgggaaaagtcttggcggagtgtgacgaatttgtgacgcccgccgacaaccggcctcgcattgtcggggcttgaccgcacatacggcaacgggccacctcgcaacacttcatgtgcgaggtggcccgtcagctacgagctagcaatgccgaatcactcggcggcgagtttggccttctcggcggccagacgctcggcttcggcggcacggcgagcagccagcgcttcatcgaagcgagccagctcctcttccacggcctcggtcggaatcttggcgaagatcggtgcgggcttaggcaccacggcgccgacctcgatcgcctcgctcttccacgggtgcacgttcacaccgagctcgtaatcgccggtgatgatcgggtacgtgaagccgggcttgtcgagatcctcgacttccttgagctcaggcagcggcgagaaggtgccggtgccgccgagcgcctcccacaccctctgtgcggagtgcggcaggaacggcgcgagcaggtggttcgcgtcagacacggcctgggcggccacgtgcagcacggtgccgagacgagcctggtcgtccttaatcttccatggttcggtggcggaaatgtacttgttgatgtcgccgaccacacgcatcgcctcggacagggcgtgcttctggtggtgggtttcgatggaggagccgaccacgtcgaacgcggcggaagcctcttccagaaggccacggtcttcgttggtcatcgaatcctcgtccagcggcggaatctcgccgaagttcttgttgatgaggttggccacgcggttcaccaggttgccccacgaggaggcgagctcctcgttgttgtggcgcacgaactcggcccaggtgaagtcggaatcagaggattcggggccggccacggaaatgtagtagcgcacggcgtccacggggtagcgggcgaggatgtccttgacgtagatcacgatgccgcgggaggagctgaacttcttgccttccatggtcatgaactcgctggccaccacctgctcaggcaggttgagcggacccatcgggccggtttcgccgcccttggagcccttgccgttgtacgccagcatttcggacggccagatctgggagtggaaggtgatgttgtcctttcccatgaagtagtaggccgggcagctcggatcgttccaccattcacgccacttctccgggtcgccctggcggcgggcccattcgatggaggccgacaggtagccgatcacggcgtcgaaccacacgtacagcttcttgttcgggttgtcgatccagcccttcaccggcaccgggataccccagtcgatgtcacgggtgatggcgcgcggcttgacctccttgaacaggcccagcgagaagttgatgacgttggtgcgccagcccttgcgggtctccagccatgccttgttggcttcggcgagcgccggcaggtcgaggaagtagtgctcggtctgctcgaagcgcggggtttcgccgttaatcttggagacggggttgatgagctcgtccgggtcgagctcgttgccgcaggcgtcgcactggtcgccacgcgcaccttcggcgtggcaaatcgggcactcgccctcgatgtagcggtcgggcagggtacggccggtggacgggctaatcgccacctgctgggtgcccttgtagatgtagccgttctccaagcactgcttgaacatctcctgcaccacgtgctcgtggttaccggtggtggtgcgggtgaacaggtcgtagctcaggccgaggtcgcacagatccttggcgatcacgcggttgtaacggttggccagttcctgggcagtgagaccttccttctccgcctcgacgagaatcggggtgccgtgctcgtcggtgccggacaccatgagcacgtcattgcccttcatgcgctcgtagcgcgcgtagacgtcggagggcacaccaaatcctgcaacgtgaccgatatgacgggggccgtttgcatacggccaagcaacattcaccaaaacatgactcataaggcttgattatccggcgcggcggggacacgcccggatagctgccgcgccgccatcctcatcccactcacctatccacccgtaacttcccccacatacttatccgtacaccgcttgcgcgcttatccgcatacgcattcgcacacgtatccgtacgtgcatccgtacacacgtccacgcacccatccgtacgcacgtccacgcacatccgcacacacttccgcctgtcgatatccaccgagttatccacatcattcgcgcacctagtgaagttatgcacttatccaccgttttcgcttatccggtggcgcgcaagccgtacttctgcatattgttcgatcatggatatcacagcaggtccgatgacggacatcacaacagtcacctcgccggcaaccgcgcagcccgcggtgccgccgatactgtttaccaagaatctgccgggaccgctcagccttaaccgtctggccgccttcggcgcgttacgtaagctcgacgattccgccggctactggatcgagcattcgggcacactgtatggtcgcgcaaaaatcgtcgcggaggtcgccccgtttggcactgtggtgtgttcgatgaccgccgcttgggtatggctgggaggccccgactttccgagcaccatagacgtgatctccacatcgcacttccgctcggcatccgtcagccgccgcatccgcgtattcaaaagattgacgttgccggagcaaatcatcaagctcggcgggctgcctgtcaccacgccagcccgtacggcttgcgacctggtgatgagtcctgaagacatccccgatccttccaccgtcaacgcgctggtgtgccaactgatgtccgcgtaccagtttcggccaaacgactgtctgcaaatcgtcaaggagcatcggcatcacaagtatgccggacgcgcacgcatgttttttgaatcggtgcagaaggagattgacgaaccggctttggagcaatgcgcatgacgaggggattcatcgccaaaggacatcgtagaggccgctatgccgctcaccgtttacggcatttgcggcaggcgcaacggttgcctcgccacgcggcggcggcacactcatccgaatccgcatcgcgcgcaatctcggatatgaccgcgccgcctgaaccacccatcagacttacgcccgcggtggcatgttcgcccgatacggatgttgccgtgctctggcacatcgcatatcacgtgcccgaactgcgtaaatggctggttgccaatcccaaagccgacgcgcctttgctggaattggtctcgcagcgtggtgggcctggggtccggcaggcgttggaaatattgttcgagtcgatggaagcgtaacggggagataatcgccggctgctgcgctatcccttgattttcagcacagccgcatacacctgcttgcgattggccaacgatccgtcagccagtggatgctcctgcaccacttgcgcgatggcgtccttgatacgcaggccttcctccaaagcacggtcgatggccagcacggccatgtcatccacgctcaacgtactgggcgcggccgcttcggcctcctcgttggacgcgccgccgatgaccagcaccatctcgccacggggcggatcatcaatcacactttggcgaatctcgccaatcgggccgcgacgaatctgctcataatccttggtgagttcgcggcacagggccatcgggcgattcgggccgaacgcgtccagcagatcgtccatcgaatcggcaatgcgatgaggcgtctcgtagaacacgatggtgcggcgttcgggcaacagcgtgcgcagatactgcacgcgctcggaatgctttcgcggtaggaagccctcgtagcagaagcggtcggtgggcaggccggagagggcgagcgcgtcgagcacagcggaggggccgggcgcgcaggtgacgggcaggccgcgttcgatggcacggcgcacgatggccaagccggggtcgttgatggtgggcatgccggcatcggacacgacgagcacggtggcgccggtttcgacctggtcgagcaggccgtcggccttgtcgcgctcgttgtggtcgtgataggcgatgacgcgaccgttcacatagacgccgaggcgacgggcgagatcgtagaggcggcgcgtgtcttcggcggccacgatatcggcccgctccaagagggccaccagacgggcggaggcgtcgccaacgttgccgatcggggttgcggcgagcaccacggtgccggcggggacggtcacggccgattcgcgggattgggtggcggcggattcgccggcatgaacttcatcattgcgttcaggcacttgcgtcacgctaccgtcagcgtcatactgctcattcaactcatctgcgcttgtcatactcccagtattgcccataccacagagcaatccacgacaatccatggcggaatcgaggcattctccctttgcaggggctgatttcacatgttccggaggtctacttccgtttcaaggggctcctcatccggtgaagcaccagtacaaacggctttgacgcaacgctattccgccattttggcggcgtatctacttgaccatcagcccctcgaaacgcaagtagacctccggcaaaccccaaatcagccccttgaaacgcgagatggcagaatttcaacgaagacaaataaaaagaccctctgcggtggaatgaatgcagagggtctcgtggagctgacggtagtcgaaaccgcgacctcttcgatgcgaacgaagcgctctaccaactgagctacagccccttggatgttactttgctccgcaaagcaactcgcaacaatatagtacggagtgcggtcaaacgcaatttgacgccgaagtgtcgcagacggggtaaatcacccacaccgctccgcatggataccgcggtggcacccggcaacgtcatcatgcttccagcacatgcagcactttcttttcgttgtagaacgcgaatacgatgccgcccaagccgcacagcacggccgcgcacacggcggcgatgcgatagcccgcgccggacgccatgccgatggtggagacgccggtgaacagcagcatggccacggactgccccatcttcatcgcaaaggtgcgggccgcgtagaacatgccctgacggtcctggccggtggtcttggagctggcgtcggcgatattcgccacgatggcttgcggcagaatgccgaacgcggccatcggaatcgcgccgaccaccgagagcgccaaaccctgggccatcgccggaatgaagccgagcgcggccgaaccaagggcgccggcaaatgcgaacgcacaggtgaagatcacgaaggcaaccagcagcaggcgcttcttgccgaccttattggccaagatattgaccggcagatagaacagcacggagacgccggtcatgagcacgaagtagatggtcgtggtggtttccggcagcttgagcaggctggtcacgaagaacggcagaccggtctggaaggtggtgatggccacccagtagaccacgtcggaacacacgaacttgcggaattcgccgtcgccgaacgtctgcttcagggattcgatggccgattcggaggtgggctgggagttgacgtagtccttctcgcggatggccagcggcggcaccagcatgcacacgaacgccacggcggccatgatggtgaaggtcacgcggatggcggtgatacgccccatcatcggcacgaacgcgccccaaatcaccggcgccacgtacgcgatggccgtgccggccacccaagtgaaggagatggcggtggagatggtgagttgctgcttggagtcgtggccgagttcggcgatgagcgcgttgtacggcgtgcagtagaacgtgaggacgatgtagtagccgatcacggtgacgaacaggaacgccgcgttcacccagccggtgccgttgatcggactccagaacacgagtacggtgaccaccgcgagcggcagggcggcgaatttcaggaacggcatacggcggccggatttggcgtcgcaacggtcggagagggacgccacggccgggtccacgaacgcgtcgaagaatcgggcgaaggcggtgatgccgcccaccacggtcacgatgccgagaacgaccaggccctgcggcacgaatacggtctgaccttgggagatggtctcctggtcaggttggtagaaatacacgagccagttggagatgatgccggaaagcagcgcccacccgaactggccgaccgcaaacgcccacactttggcgatggggagatctttgatggctgatttcgccggtgcaacttgcgcgcccgttacacttgctgtagtcgtattgcccattccccataacctccgaatcaacattgacacagtgtcaaaaaccagtatacaccggggttttacactcaattccctgcagggcaaaaccgcacaccacaatccacaccccgagccgccttcccctcagccatccgcaggctctacgatgagagccatgactggtctggccgaacgactaccgcacgtcgccgctttccccgaagcgctgggcaccgggttgctgctgcataccgatgtcgcactggacgacgggctcagtaactgcatcgatatgttcatcagcacctatgaagccgcattgtcccggttcaaggatgattcgacggtcggccggatgcgcacggccacgcatggcggcacgttcgattttcctgattgggcattgggtttatttggcctgtacgaccagctgtttgcgtcgaccaatgggaccatcgacccatgcgtgggcgaggatttgattcggcttggctatgacgagtcgtattcgtttacgcctgcgccagatgccgctgaacatgcaggcgcgatccacgaacgagccatttggtcagccgacgttgagcggcatggcacaacactggtgacgcgcggaccggtcgcgctcgatttcggcgcgtgcggtaaggggtatttggtggatttgcttgtggggatgttgggtgatggcgcgggtcaccctcaacccattcaatacgtcatcgacgccgggggtgatttgctagtgcacacggacgaaccaatcaccatcgcccttgaagatcctgccgatccggccaacgccgtaggtacggtcgaaatcagccacggcgcattctgcgcgagctcccccagccgccgccactggtctgacgccgcaggtcaccaacttcaccatctgctcaacgccatcgacggactaccggttgacgatgtagccgccacatgggtggccgtcacgccgccatcgagcgccataaccacgaagacatcgacgcatggcagcaatgcctcgacaacggcaaaccgcgataccgacgattcgtcgaacaccgttgcggcacacgtccctgtcacactggccgacggcctcgccaccgccctgttcaccaccccggccacccagctgcgcgctcacttccccttcgaatgcgccattctcaacgccaaccgcaccgccgcccaatcccccaattttcccggcggctttttcacacactaatgcacgaaatcatcagtatcacatccctcgggtggaccgatgggttgctcccctcagtcagctacgctgacagctcccctcggagaggggagccgagtatagctaatccgctaatccgctaacgcaggaaacaatccgtcagtcagcgagtgcgaactggctgttgtagaggtcggcgtaaaaaccgcccgccgccagcagctcgtcgtgcgtgccgcgctcgatcacgtcgccgtggttcatgacgagaatcatgtcggcgtcgcgaatcgtggagaggcggtgcgcgatcacaaagctcgtacgccccacggtcagcgcgtccatggccttctggatcagctcttcggtgcgggtatcgaccgaggaggtggcctcgtcgagaatcagaatcggcgcgtcctgcaccatcgcacgggcgatggtcagcagctgcttctggccctgggagagcgacgacttgtcgtcgagcacggtgtcatagccgtccggcagcgagcggatgaagtggtcgaggcccacggccttgcacgcatcctcgatctgcttgttggtcacgccgggcttggagtaggcgatgttctcgcgcacagtgccgcggaacacccacgtatcctgcagcaccatggagaactggtcgtgcacgttccagcgcggcacggacttggtgtccacgccgtcaatcgcaatcgagccgccggaaatctcatagaagcgcatgagcaggttgaccatggtggtcttgccggcaccggtcgggccgacgatggcgaccttctgcccggccttgacggaggcggagaagtcgtggatgatcggcttgcccggttcgtaaccgaactgtacgtggctgaattccacgtcgcccttcacttcgtggccgttggtcccaagcaaagcggacttgccggattcgtcctccatctccggctcctcaaggaagccgaacacgcgttcagcggccgccgcgcaacgctgcaggttctggaaggcctgggcgaactgcgccaacggctgggtgaacaggcggacatacatcatgaacgccacgatcacgccgaactcgatctgcccgtcgagcgcgagcgccgcacccaccacgcacaccaccacgtagccgaagttgcccacgaaattcatgagcggcatcatcaggccggaaaggaactgcgacttccagccggactcgtagaggtccgagttgtacttctcgaagcgacgaatcgaatcggcctcgccgttgtatgccttgacgatgaggtgaccggcgtacatctcctccacgtggccgttgacgtcacccagcgccatctgctgccgggcgaagtacttctgggaggacttcatgatggccatcatgatgatcaggccgatgaggctggcaccgatggcgcacagggtcatgatcacgttgttgtagaacatcatcaccagcgcgcccacgaacagcgtcaccgaggtaatcagcgagccgagcgactggcccagcgtctggccgatggcgtccacatcgttggtgatgcgcgacagcacgtcgccgtagctaaccttgtcgaagtatttgagcggcagtttgttgattttgaccgagatggactcgcgcagtcgctgggcggtgcgctgggtgacgttggccatcatccagctttgcacgtagccgagcacggcgtagcccacgtacagggccaccaaagtccaggcgatgtggcccaccgtgccgaaatctaccgagttcatcaccggtctgccgttgacgatggcgggcagacctttgacgatctcgttggtcatgtccttgagcttgtccgggccgacgatctggcagacggtgccggccgcgcccaggatgagcgcgatgatgatgacgggaagatagttgcggcagtagttcacgagtttgcccatgactttgccgaaatcatggggcttttcgacggcacgcctgccgcccattggtcctcttggcatttgttttactccttaaaagtccgtattgacctccctctgatgagggaggtggcgcgaagcgccggagggagagaagccgtacgcgactacccctcagtcagctgtgctgttttattcgctcgcttatcagctcgtcttcgcctgggaacagcccactgggctgttccctttacggctcagcccctgacatggggagctaccgctgccgcccccctacgccgtaagctccgactggctgagctgggattcggcgatctggcggtatacgtcgcagttgtcgagcagttccttgtgcgtgccctgacccacgaccttgccgtcgtcgagcacgacgatgcggtcggcgttcatgatggtgccgatgcgctgggccacgatgagcttggtggaatccttggcctcgcgggcgagcgcgtcgcgcacttcgcggtcggtcttgaagtcgagcgcggagaacgagtcgtcgaaaatcaggatttccgggtgacggtacaccgcgcgcgcaatcgacaggcgctgcttctggccgccggacacgttcgatccgccttgggcgatcgcggcggaatacccgccgtccatgcgcgccacgaactcgctggcctgcgccacgtcggcggcggccttgacgcgattcagctgctcggccggtatatcggcaccttccgcggcctcgccagcggcgatcaacgcggcctcgcgcttgcgcccggccggggtggaggtatcggccatctcgacctccgccgggtcgcccggctgatcgccgtagctcacgttggaggccacggtgcccttgaacagcacggactgctgcggcacgtagccgatcttgtcgcgcagggccttcaggtcgtagtcgcgcacgtccacgccgtcgaccaacacctggccttggctggtgtcatagaagcgcggcacgagattgataagagacgacttgccggagccggtggagccgatgaacgccaccgtctggccctgttcggcggtgaagttgatgccttccagcatcgcctcgcgcgaatccgggtaggtgaagctgacgttgcggaattccacggtgcccctctggccggttttggccacgtcggcggcggttttggtgccgttctcgacgattggctcagtgtcgagcacctccatgatgcgctgcgcggacacgtcggcgcgcggccagagcacgaacaccatgctcatgagcaggaagctcatgatgacctgcacggagtagttggagaacacgaccatgttggagaacacggtgagcttgtccttgagcccggcggcgtcgatgaggtaagcgccgatccagtagacggcgagcatcaggccgttcaggacggtgttcatcaacggcatcatgaacgccatgacgcggttggtgaacagctgggtctcggtgaggtccttgttggccttggtgaatttggcttcctggtagtcctcggcattgtaggcgcgcaccacgcgcaggccggtgaggttctcgcgggccacgaggttgatgttgtcggtcagggtctgcatgaccttgaacttcggcatgaccatggccatcatgacggtgatggacaccagcaggaccgccacggcgatgccggtggcgagcgtccattcgaagccttcgccggcgatcttgcacacggcccatacggccatgatcggcgacttgacgatgagctgcaggcccatggtgatgaacatctgcacctgcgtgacgtcgttggtggaacgggtgatgaggctggcggtggagaacttgctcatctcggccgggccgaaggactcgaccttgcggaattcgagcgagcgcagacgctgggtgaacgaggcggccacgcgcgcagcgatgtagccggtgatgatggcacacgccacggatccgagcgagatgagcagcatcttgccgcccgcgatccagatgtccttcatgtcgctgcccggcgtctcgaccagcgtggtgatgtctgacatatagtcgggcagtttcaggtcgaagtagacctgcccgacgatggtcaccagggcgatgagcatctgaccgatctccgctttggagaggtatttcatgatgcgaaacattggtttccccttgtgttggttgggttggttattggttattggcgattggttcttaagttggctgggttatcggtgattatcggttcacgatgtcttaatagtttccattgtttgattacttacactgtgagatattatacgcacttctgtatgttcgctgtgagcgtcctcaattacctttacctccctctgacgagggaggtgtcaccgcgcagcagtgacggagggagagacccgccagcgggaggaagctagtctcgctcagcctccgcgcgcttagctgccatgtgttcagccacgcgcttgtcccgctccacgaatgcctcacgcacttgttcagccgtcggccgaggccgccccggatggcaaatcgacatatatgtggtgaactcagacaccaggtcaacgaattcgcgcgtgcgccgctcccccatttgcgagaaaatccagcaaattgcggaacgcatttcctctatcatccgatgagactgctcgcgcccggaatcagtgagattcacgcgaataatgcgccgatccttggaatcaatgtcacgcgtgacccagccttttttctccagagacgacagcacagtggagatgcggccggaactggcctgcagcgccgatgccaattgcgatggcgtttgcgtccccttcatggacagctcccggagcacgaactgctcaccatgggctccacgagtgaattccctctgcatcgtcgaacgattgccccacacgctggcatacagttcactaactgcttcctgctcaaatcccataagagcaccatccattcccattcgccacacggcagagcgccgcaaacatccccaagaatatctcacaccgtaaacaattcattactagaaactatttttggaacgcataatgcacacactccacgctctttgatattctgaaagccgcatagatattcacttcggggcgtcgtctaagaatatttgctgggccaacggtagcgacgttggcattgtgctccatgaggtatctggtcgaaaaggcggacgaagacagaccagttgggcggagcgcgcccatacctcaaaaccattgcaattattggctttgaccattttcgtggagtcacgaaaatggtcatgaaaaacataaggacacacccatgaactgcgacgaaatcacacgcaaaaccagcgaactcagcactatcgcacacaccaccgaggactccaaagttgagtattggtatgcacgcgagctaatgacctatatggggtacgacagatgggaaaacttcagcaaagctattacacgagccaagcaagcttgcgacaattccggcgtatccgttgaatcccatttccgtgacactacgcgagacgtgactctcggcagcggtgccacccgctccatcgcggacgtcaagctcacccgatacgcctgctatctcattgctcaaaacggtgatccaaagaaagaagaagtggcacttctccagagctattttgccgttcagactcgcaaaacggaaatcattgagcaacgcatgggagaaatcagccggctcgccggccgagaggcccttgccactgcagagaagaaactctatccgtatacccaaatcacacacaacaaaaccgcacaagagcacatgtacacgcccaaccacgccgcagaacgccggcaaggatgtgatacaggccacagaaagcgttgtaccgcctaggcaatgcaacaattgtccgctatgctctgaaggcagatggcggcacggatgccatcccaaagagggggtatgaccatgattcggggtatgaacctatgcagcatcgccggctgcacgcacgaagcagaagaagcgggcatgtgcaacatgcatttcacatcggcgctggttcacggagcgctgcactacactgcggacggacgtccgtcgcactgctgagcgcaacaacaaagcaaaacaaccagtaacgctcaacggcttccacatgttcatgctctaattgcatgtacttgcagacacaatggccggtctgagccagctgccctcgcatggagcagctggctcagaccggccattattgttgctttgtactgtttgcactgtattgcgcctgcattgcgcaagctcggggtagtgcccgaaaagttgcgcactttggatcgtggccgtccatggcgcgatagtcagttcgcttccacgaggttgtcaccgagccgggacatgtcgagatagcggcgggtcgaccattcgttcgcggtgacgtgacggatgcgggcgcatatgagcatcaacgcgctgttcccgtcggggaagccgcccaccacgcgcgtgcgccggcggatctccctgtccggccgctcgatcatgttgttcgtgcggatcctcctgcggtgcccgtccgggaactcgtccagcaggtaggtcgtcgtctcgccgacgccctcgcgcaggcagttcgcggcggccttgagcctcctggattccatctccgtggcgacctgttcggccttggccagggcggattcccgggattccatggcgaatatggccttgagggcggcggacgcccattcgcggtgtgtcggcggcgtcctcgagagcacgttgcgcatgaaatgcaccatgcaccgctggtatctcgccttgggcagcatcgagccgaccgtggcgacgagtccggcgcaccggtcgccgaccaccaggcgcacgcccttcaggccgcgttcgatcatggagcggacgaactgctcccagctgtccctgtcctccttcatgccctcggccacgccgatcacctcgcggtgcccctccgcgttgactccgatggcgaccaggacactgacgttctcgaccgagccgccccatgaacgcttgtgccacacgccgtccacgaacacgtacgggtactcgtcctccaacggcctcgtgcgccacgcctcgatctccccgtacaccttcttgagcttgtcgctcagggtctgggacggcatcctgtcgccccacagcaattggctgatgtcgtccacctgccgggtgctcacgccggccaggtacatgtcgatgagggcctcctcgacactctcctcgcgtctccggtatcgttcgatgaccgcggactcgaagaccgcgcccttgagtttgggcaccttcaacgcgagcctgccggccttggcggtcaggctccggtcgtagtggccggccctgtacgccttccgctccccggtgcgctcgtacttggcggcgttggcgatctcgtcggcctcggcgtcgagcatcgcgttcaatagctcggcgaccttttcggcgaccaagcggtcgagcctggtctcgagcaggttctggtcgatctgtatgatgttcgagggtcttggttccgtctcctggcttccaatcgcggttttttgttttggcgaatgaaaatcgtacacaggacgcgggccatgccctcttacgtcagacccggaatccgaaagtgcgcaaaaaatcgggtgttatcaccacaaacgacgcacaaagtcatgagccattcgaattgcgctggcccaatcgctacgaatcatatttgccgtagcccttaagtgaatcccactgcatcgagatatcgcgcccgctatcccttccgataacgccgaccacgcgtgttgccttcagcaatcagctttccttgcgcaactaaaccgtttaggaatttgcggactgttctgttatcgagctctgttatcttggcgagttcaggtacagtcacatagtcaacctctgtcaagagtcgattcatcgccgacagcatcgctgcccgcgaatcaatttcacccgatgcggttgcatctgctttcttaccatccacacgttccccgccaatgagcctcgcaccctcttcggcatctttctcaactacagatctcacgctagcaaaaccagaaccatccacggtcttcagcgcaggaacaataggaatcgtcgcctcgaatatgtcaccatcgcggaactcaggctctcgctcagtatattgccgggacgctcttatcagattccgcagtccgctacccagctgctcggctatgccggtctgcacaaacacattagcgataatcggattctttggcattggcgtgaactcgcccagcttcattcgaccttcaaagaatgagcgcgaagcattaaccgtccggatggattcattatcaatggtgacacgcgccaccaccggactggaatactcccgatgcatgaggctgtttgccaccaattcacgggcgatcatcgtacgcgggctcactcgcttatcgccctttaacacaaagcggtcaggcagattccgctcagtaaattcacggagttgctcgtacgaatcgaacaagttggtccgcaccataagtcggtcatcgtatcggtcaatattgtctcgccgaaccacggcatcagtaatatacgctgggcaaaccgaggaaatgacttcatccttgcccaagagcagcactgcagcaagattaaagccctcttcgccggtcgtgtaatcacgatcgtatagcttggcgctgcggaacagttcttcgtcagacatagttccccaagggtgcccagctcgctgagcgaccgccagctgccgcattcgcgcaatcagctcaggacgcaaatcaaacggagtcacgtaacggaaaattcgccgttcggaatagtagttctgcttgcgaatatacatttgactaatctggatatcgctttcgatgtgtgtatccacatcagcaatgcgatcaaacactgcgcccttgaaccgcacaaccgaagaactcggagctacccaaatacgaacaataatccgttcgtcgtactcgatatgttccgtttccaccattggagccggttcgaacatcttacgattagacactacgttgacaacgttgcgctctatctcactaacgcgcttagaatcgacgccgagcacttgaccgtcatcgtcaacgccaagataaatgctgccaccagaacgattggcgaatgagcatacagtctcaaaagtatccgtatgaggcaattcgctgcagcgcttgaactcgaccatagatgattcaccggcctgcagcacttgcataagttcatcctgcatcatcgcattccgcccttcatagcgataattcatacattaggacatggcacttatcgtattttagcatctaattagtacattaggacattgttttatgtcctaatgtactaattaggcggctaattgtactaataattgcacactgatgtactaatccgatgatcgaatgcactaattgtccgcgcaaatgcactaatcggatgaccgaatgtatcaatgagacctataggcagccgattggctgacgatcagcccagtcattggctatcggccgctagccagtcagccgccaacagccaacagccaacagccacccaactaatagccgccagccaatcagcccgtccaatcactccttgtgttccagtgcggccttcaaatcgcggctacggtagcgttcgcgcagcatagagaatccaccgaagcccacaagccacaccaggccggcaatcgcggaattgcgcgtatcgtccgcaaggaacaacgtcaggtagatgaacacgaagaacacgattgccaccgtattgagcaccttccacgcgggcatgacgaacccgtccgcgatgaaatcggcggaacggcgatacctgcgatgcgccagcagcgtcaggatgtagatgaacaggaacaccgcggagctggcggacgagaacagcacgaacgcccccgagatgccggggatggcgttgacgatcggcgacagcaggatcagcgccgcggacaccaggatggcgcgggccggcaccttgcggtcggacaccttgccgagcttgttcagcatcgggttcggcgacacctcggacagctggtacaggtggcggccggcggaatacaacagcgaattgagcgacgaggacgcggcggtgatcaccacgaagaacaccagggcggacgcccagttcaacccggcatactggaacaccatgatgaacggggaggcgaaggagccgtcctcgttcggcttgaacgaggtccacggcacgatgcacatgatggccacgagcgcgcccacgtagaagatgagcacacgcacgatgatctcgttgacggctttgggcagcacctcacgaggattcttggtctcggagacggtgacgcccacgaactcgagcagctcataggcgaagaacaccatctggaagctcatgaggaaggccatccagccgttcggggcgaacgagaagccggagaacaggttgtcgagtccggcgtggcccgccgggctcacatgatccacgccatgaatccgcgcggccgggtaatggtagccgatcacgatcatgaccacggcggtgacgatcatcgcgccgatcagcgtgatcttgatcatcgagaaccagaattccacctcgccgaacaccttgacggcgatcaggttgacggacaccagcgacaccaggaaacacagttcgatcagccatttccaatgggtcaggtcgatgccgaacgtgtcgaagaaggtgatgaagtacgtggagacggccgtgatctcggtcatgcccaacagcacgagcgcggcccaatacgtccagccggcgaaatgcccccatccgttgcccaggtagcgggtgatgaaattgatgaaggtgtgctggctggggtcgcggtacatcatctcgccgatggcgcgcatcaggaagaacatgatgacgccgaccaggatatacacgaagacgatcgaggggccggtcagcgccagcgacttgcccgaacccaggaacaagccggtgccgatggtgccgccgatggcgatgaactgcacgtggcggttgttcaggccacgctccatctcgttggtccggtccaggctttcgacagacttgagtttgcccgtagcctgccgtgtaccaccattcacattcgtatcggccatactgatttcatttctcttctccgccgcccgattgttacgcaccggacgcgatactcgttcaaaacaagttcggactgtatcaccgaaatatgtcgtgaaaaccgctcagctcaagaatacatgcgatgatactgtaaatattcagccaagaagttcaatttaccaacaccaaattgaacttctacctctattccacggacttgagcgagctgaccgggtctacgcgatcgagcactgggttggtgaacagctgcaccagcagcgcgaacgccagcgtcgccaccacggcaatcgcatagctgtaccagtgcacttccacttcgaaatacagcgacggcatattcaacgcagcagtcagtaatccgcctatccacctgccaagcggcagaccaaccaccacacccataccggtcaatatcatcatctcgcgattcacgtagttgtgcacctcgcggtcatagaagcccagcaccttcagtgtggccatctcgcggatgcgttcggacacgttcgtattggccaacgtaaacagcaccaccagcgccaggccgccggcgagccccacaatcagcgccaccacggcacccatcaaatcgaacttaaacgtggcggccagatgcgcacagctcacggccttgagcaccgacgattcctcgcccaaccgatccgcatattcggcctgttcggtctcggaacctttcagcttggcgagcatcgcgttccacgtcaaggtcgaggcagtgccatctcccgaagccgaagacgtcacaccgccggccgcaaacttctggtcgtacagtcgctcactgatgtacacatcagagccaataagattgcgcgtcacggccgtgacctgcaccttggcccggctgctaccgccattgcccagcgtgacggtgtcgccggcatgaatattcagcgagttggcggcggactgcgatacaatcacgccactatcgtccagcgctacagtgccgccacccgctttgccgaagatattgggcagcccaaaccatccatcatcgccggcttgttccagcgtgaccatatcgttcaagatattcagcgaatcgttgggcacggtcatcagctgcacggtttcgctttcctgcgccgcattgctcatctcgccactatccacgcgcagattcagcgtttcggtggtttggccatcttgtgccacctgcttgcgcatcgcggtggcgtcatcgtcattggccacgaccatcaggtcgtactggtagatctgctcgtattgtttgacgccaatcgtgtcgacggtgtcattaatcgcaaatccgcagataatcaacgctgtgcaaccggccacgccgcccacggtcataatcaagcgcgacttgaatcggaagatattgcgcgcggtgactttgccgaggaagttcagccggctccataccgggcgaatccgctccagcaatatgcgagcgcccgctttcggtgccttcggccgcatcagcgcggcgggcgtgtgccgtatctcctcgcgacaggcgagcgcggtggccacgcccacgccgaccacgaacagcacgatgccggccgaaccgtacagccagtcgtattcgagtcgcacaccgggcaatatatacagtccctcaatcaccaccagcaggaatgccgggatgccaaggaatccgaccagcagaccgatgccgccgccgaccaagcaggcgagcaacgcgaacagcagataccggctggacacggcgagtccgccatagccgagtccaaggtaggtgccgataagtccgcggtcttcctcgaccatgcgggtcatggtggtcaggctcatgagcacggcgaccagcaggaacacaatcgggaatgcgcggccgatggattcgatggaactgacgtctgatttgagcgagctgaatccgtcgatcgaagcgcgcgtctgcacataccaacgtgcgttggccacatcgtcgatgcgccgttgctgcttggcgaattcgctttccgcttcgcttcgcttcgcatcgagttcagactgcgcatcatccagtttcgccttgccgtccgcgagctgttgttcgccttcttccagctgccgctcgccttcttcgagctgctgcttgccgctggccagttgggcggcctgcgcttcaagttgcgccgactgggtttcgagggttgcggcattcgcttcgagttccgcggatttggtattgagctgtgcctctcctgcagccgcttcctgttccttggcggtcagttgcgcgttctgctggtccaaggtggattgtgcgggggcaatggtttcgtttaatgtgcgctgcaaatcggctttctgctgggtcagactgtctcgctgcgtttgcagttccgtttgcttggcggccagctgttgccgcagctcactgattgacggcacttcaggcagggtaatgccaaggcgcgcgagcagttgcttgatggcctgccatgtgggtgagttgaagtcgatattcgggtcaagttgcgccagtagattgtcggcctgttgaatcatggacagcatctgatcaatttgtgccacgccttggtcgatttgggtaatgccctgttcgattttcgtgcgattggcagtcagttccgtttgcgccgcatcgagctgtttgcgagccgaggtgagctgcgctttgcccgattcgagctgggtgcgcgcttcggctatctgctggcgaccttgcgcgatctgttgacgggccgatgcaatctgcgcacgtccatcggcgagctgccgttcgccatcggtaatggttgtcctgttgttctccaattcggtacggctatctcgcaatgtcgttttgttggcttccagctcggcccagttgtcgtcgatctgcttctgggcttcgtccagctgatcgttggcctcgtctttggcatcatccagtttgcgctgcgcgctggagacgatctgttgacgacgggctttctggcgtgtggcctgtatctgatgttcgatacggtcggccacggttttgatggcttcatcgtaggcatcggaaaacgtgtcaaaatcggacgcaccagtgacggcaaccgatatcgcagtgtatatattgccggtcacgccgtcgccgggtgcaaagaacgtatagtcctcggatgaggtggaccggaaggaggtcatgcccgaatagccgtctggattgctgaggtcgcgcgggtcgagtacgacgccggtgatggtgagtttcgtggggaactgcggggattgctcggcgtcggcgtccgtattggcgtcggacttcgcatcggatgccgaggcattggcggcgacacctaccgtatcggcattattggaatcgtcagtctccgtggccgctaccgatatgacggatgaagaggtgtcttgtggcgtcacagtaatggtgccgccaatcttgagtccgctatcgttcaggaattgctgcgtaaccgccacttcgccggccttgttcggcagtttgccctgccgtatgtacggctgatcaagcccttcggtaccgatttcctgcatggtcacggttttcttggtgccgtccaccaacgtggtcaccgtctgagaacgttcgggctgcacggtttgcacaccgtcgattcggcgcagtgccgttgcatcatcatcggtcaggccgtatgtggatagcacctgcaggtcatgcagtccctgctgatcgtaaaaacgaccggccgccagaaaagcatcgcggcatccggcgtagatgccggtcagcacggccacgccaagcagcgtgatgacggcgatcgagacgaacctcttccagctgcgcagccagcaacgcaacgtgtctttggcaaataccgcagaaacgcccgctcctcgaccgtcgttatcgtcgaggttcggccgtttcacagactgtttcacaggttgtttcacgaatcgcctcgcttgtttcacggggcgtttcacagagtgtcttgcagtgagcatcgccaattacctaccattcgatatcggcgatgggccgcggcgttgcgttgacctcctcgctggtcaccttgccggagcggaagcgaatcactttgtgagccatcggtgcaagcgcggaattatgcgtgatgatcattacggtcatgccttgtgtttggcaaatatcctgcagcaactgcagcacttccttgccggtctcgtaatcgagcgcaccggtcggctcatcgcacaacaacagcttcggctttttggcaatcgcgcgggcgatggatacacgctgttgttcgccgccggacagttgcgcggggaagttgtccatcctctcccccagtccgactttgcgcagcgtttcctctggatcgaaatggtcagggcagatttgcgaggcgagctccacgttttcgagcgcggtaaggttaggcaccagattgtagaactggaagacgaagccgatatcgttgcgccggtaggtcaccagttcctttttccgcagacccgtaatatcgcgtccgccgaccactacgcggccggttgtggcggtatccatgccgcccagaatgttcaatgccgtggttttgccggcaccggactgccccagaatcacgcttaattcgccttgttcggcggtgaagctggcctcgtcgagcgcgcgaatcacactgctgccagaaggatattccttgaccacatggtcgaattcgatatacgccatcgcacacctccaacgcgctcgtggcagccacctagccccataggccccgccagaacttcctgctatactcaagtaaaacaacactgtgtcggttctgcaaccaacagttggattgtgggttgtcggaacttggggagaaggccatgtccaaagaattgacggaaagccgccgcacccgttacacgagacgtgccatgcaggacgcgcttatcgagttgctgcgcgatcagccgctcggctccatcaccgttaaagcgttgtgcgagcgggccgatgtgaatcgttccacgttttacgcgcattatgcgagcatcgaggaactgctgcacgacattgaagacgaaaccatggcctgggtcaccaccgcactcgaacagctactcgcccagccagatcctgccggcatcgagcatgttattgagcgcatctgccagtacattgccgacaatcgcaatcatctccaagtgctgatgagcccgaaagcggatatcggtttccagcagcagctgctgggattgatttacagccagcgcggtgtaggcgaacagttgcaatcttcggcgggttacccagccgaggcgcagatgcgtatgcgattcgccgtgtccggcagcattgggcttttgcaatattggctcgccaccgatctcgcggcctctcccgaatcggtgtcccacaccatcttcaccatgtgtatgcctgccacgcagtgagcacagtgaattcagtgaactcagtgaactcagtgaagcgtgcggtttcataagcatcgctcgctatagcttcgcctgctcaccggccgcgcccacgcccgcgcttgcaatagcgcacaaatagacgattgaccatttctgagacgatacggcggcatagaataacgaacgttgcgcatcacggcaagccccgcgtgcgccaaacccaagaaatgtgagagaagagcacaatgagtactactgatgcgcctaagaagccgcgcgaaaccgacgacgtgccggtgccggccacgctgcgcaagtcattgaaaaaccgccacatccagctgattgcgctgggcggcgccatcggaaccggcctgttctatggttccagtgaatccatcgcgctggccggaccctcgattctgctcgcctacttggttggcggcctcgcgattttcgcgattgtgcgtgcactgtctgaaatgtccgttgaggatccgaaggcgggcgcgttcagctactatgccacccgctactggtccaagcgcgccggctttatttccggctggaactactggttcaactacatcctcgtctcgatggtggagctatcagtggtgggttcgtttgtgaactactggttcccggcgattccgacatgggtatcggcggccgtgttcttggtgatcatctgcgccgccaacctgctgggcgtctctaaattcggtgagttcgagttctggttcgccatcatcaagattgtggccgtgatcgccatgattatcggcggcctggccgtcatcatctttgtcctgcccaccgcatccggcgtgcgcgcaagcttcgcgaactggttcaccgtgggtaacggcttcttcccgaacggcctgatggggcagaattccgacggttcctggaccggcctgctgatggcactggttgtggtgatgttcagcttcggcggcaccgagctcatcggcatcaccgccggcgaaaccgaggatccgaagaccacgattccgcgcgccaccaatgatattatttggcgaatcctcgtgttctacatcggcgctctgggtgtgatcatggccgtagtgccgtggaacaccatcgatggcaagtccagcccgttcgtgcagatcttcgattccgtgggcattcacgcggctgccggtattttgaacttcgtgtgcctgaccgctgtgatgagcgtctacaactccggcctgtacgccaactcccgcatgttgtactcgctggccaagcagggcaatgcgcccgcttacttgggcaagctcaactcgcgcggcgtgccagtggccggcgtgctgacgtccgccgcgatcaccgccatcgccgtggtcgtggtgttcgtgtggcctgagttcgcgttcaactacctgatgtcgattgccaccattgccggcatcatcaactggacgatgatcatgctcaccgaaatgaagttccgtaaggtggtcgccgcgggcggcgctcccgaggattccgagctggccggtctgagcggccaggaggcactggacgcgattcacttcaaactgccgtttgccaaggtgaccccgtgggtggtgctggcgttcctggcgctggtcgtggtgctgatgtgcttctccaccagctaccgcatcgccgtcatcgccggcgtgatctggctggccatcctcttcgccgcctaccagctcactcaggcgaagaagtaaggctccatttgcgaatagctctcactgatgagcactcagtgagagctattcgcaaatgggatttattcatgaaacagctcatcgatgccgacgagctgaacgtcggattgagacgccgcagcatcgtcgaccagtgattgatcgaaaccgccgagcgaaaacagcaggtatgttcgctggccgataccggttcgcgcagcacggtctcgcagtagattcagcacggaacggtccaccggcgcattgcggaatttgcactcgcccacaatggcagcatcagacgcattgtcaacggccatcacgtctatctcatcctgacgatcccaccaacggccaaccgcacgcgcacggaagggcaaccgtccagcagcactctcacgccacatccattcacggcacagaccctcgaacggtttgccggcaaaatcatgtaataccggcttgatacgacgctcgtatacgccttccacatcgccccgctccaattccgaacgatacggaaagacaaacgaataccagaatcggaagaaattgtcgctcagctgatacagcccacgcgaacctttcgcccgctccttaggcttcgccgtgactgggaactcacgttccacaatccccagttccataagattggcgagatacgacgatactgttgcgtttgccatcatcgtgtgtgtcgcgatctcattcagcgaagttgcgccgagcgcgatcgcccgtatcacgctgttatatttcgcagtttcccgcagttcttcgtgcaacaaaaattcaacctcgctgtatagcggagcaatgcgtctcagaatatgccgcttgacatttgcgtctatggtctcatctgggtcaaattcctctaggtaacgcgggataccgcccagtattgcgtaggccagcgccttatcctcgctactatagttggggaagaattgcgctgcatcccaatatggcatcggcagcatcttcaggatgccggtcgcacgaccatatagcggcgatttttctcccaacagctccttttcgatgaagctcatggcactgccgcaaatcacaatcatcagatttgcatgacgcaacgtgtggtcccaaagattctgtagcactgacggcaatgacggatcagatttgaccagataaggaaactcatcgaatatcacaagcctgcggccgccatcgctcggctctggcagccgggttaactcggttaacgccctttcccaagaaggatattgactcagataatccttgcccggggcacccgcctcgaacatgagacgggagaacgatgccagctgttcatctttagtggcattctgcgccgcgaagaataaggtttccttgtcttttgcgagttgaataagcgtctctgtttttcccacgcgcctgcggccgtagacgaacacaagctgtgccctacgctcagtgaaacattcctgcagttgcttgaggtcatcgtctcgtccgatgaatgccatgctgcccgcctcctttatgccatacgccggcgtatttctatcgcatcacgatttattgtatcacgattagtataatcgtgattatacaagctgtgacgaggtgcgggtacgggccaatcggcatcgacgagaccagccgcaggggctacaattacatcaccgtggtcgccgatctcgtggagcacgatgtcatcaacgtgacgccgggcaaggacccggccacggtcgaacggttctcgcgtgatttcatggaccacaacggggtcccggaatatgtgcgtctggtcgcctgcgacatgagcctgggcttccggaagggcatccgtgagcatctgccccatgcgcggcggatcgtcgacaagttccacgtggccaggcacgccaacgaggccgtcgacaaggccgggaagacggaaggccgctccaacccgctgctcaaacggaccaagtacctgtggctgcgcaacgaggaaagcctgaccgaactgcaggtggagaccaagcgcaacctgacgaggcaacggttgaagaccggccgcgcctgccggatgcgcgaggtcctgcaggacatccacacggacagccgcaccccgtccgaggcatgggtgcgcctgcatcgcctgtgctcatggatgatgcactcgaggctcgagcccatgaaggacctcgcccgcatgatccgacgccacttcgccgagatcgtcgcctacttcgagcacccgtacaccaacgccgtgctcgagggcgccgacagcgtcatccagaacgtcaaacgacgggcgagaggcttccgcgacatggactacttcgccaccatgatctacctgacctgcggcagactcgacctcaaagccgtcaccaccacttgaccatcacccaccacaaacagcgaatagcctcaatttgttatctttaccgcgcttgcgtagacagagaacgctcagacctcgaagatcgccgcatattcgcgagagaacccgcctagtcaatgagatatggattgaaaacacgctcggtgacggggatatggagcatcagcatggtgccgtaaccaagaaccaccagcaggaacagtccaccgggcatgtagaaccagctggccaccagcagcgccacgaacacggcatccacgatgaccagggccacggtcatcgcgatgtgggagatgccgaagatgaaggcgttcttcaaggtgccggccacggtgttctcgaagcgtgcctgaagcgcgaacacccattcgaagccgataagccagaggatggtcagcgcgaatttgatgatgagcagcggcgtgatctgcaggacgatccatgaccagaccagtgcaatcagcaccaccaagaacggcagccacagcagtgtggctttgatgaagttggctttgaatgacttgaagtagttggcggttacgcctttgccctcgccctcgatggagcggcggcaagcatcatggccggcggtcagggccgcaccgatggtgatgagcggaatcgaagtgaccagcatcagaatgttgatccatacgccgtcaacaagattgctccacgcgcgcatgaatttcgagtccggtgccagccagttcatcaactactccttgtgtcgcctgtggctcccctctctgaggggagctgtcatcgcagatgactgaggggagacttgatggagctcaggatactcccctcagtcggcttccgccgacggctcccctcaaagaggggagccggattggtggagctcagcccttgacggctccgccttcggccctgcaattacggactcgcctacgacgaggctcatcattagcttcgccgctgtcgcggctcagcctggagcctgctggaagcccactgggcttccagccatgggctgacgacgcgagtcgtcagcccttgacggctcccgccatgacaccagagactatatacttctggcataccaagtagaagacgatgatggggatgattgccagcaccaggcaggccatcatggcgcccatatccacggaaccgtagccgcccttgaggtattgcacggcgaccgagatggtcttgtacttgccgaggtcgagcgtcaggtacggcagcaggtaatcgttccagatccacatggcttcgaggatggccaccgagacgatcgacggcttcataatcggcaccacgatctggaagaagatgcgcggcactgacgcgccgtcgatcatggcggactcctcaagctcctgcgggatgcccttgatcacgccggtgaagatgaacacggccagaccggccccgaaaccgaggtacacgatgcacaggccccacggggtattgagcttcagcatgtcggcgatcttggagagggtgaacatcaccatctggaacggcacgatcatgttgaacaggaacagggtgtagagtagcttcgcagcccagttgttcacgcgcacgatccaccatgcgcacatcgaggtgcacaccagaatcagcaccaccgagccgacggtgataagcagcgtccagccgaaggaggcgaagaactgcgtggtctcgatgccgcgcacatagttctcaagtcccacgaacgccttgccggcaggcagggagaacgcgttcttggagatgtacgccttctgcttgaaggagttgatcagcaccaggacgatcgggaaaatccagaacagggagacgacggcaaacagcacggtccataatgcgccatgcttcacaggcttgttctcgttcatcaggctgccacctccttgctcgtggtgagcttgttctgaatcagggcgatgaccgcgaccaggatgaagaacagcacggccttcgcctggccgacgccttcccagcccatacggccgtagaaggtgcgggtgatgttcagcgccagaccttcagacatgttgctcggcgcaccgttggtcaatgcgaggttctgatcgtagagcttgaaaccgttggtcacggtcaggaaggagcacacggtgatggacggcatcatcagcgggatgatgatgcggaacatggtctgccgtccgttggcgccgtccacggccgcggcctccagcacgtcggtgggcagggcctgcaggccggcgatgtagatgatcatcatgtagccgatctgctgccagcacaccaggatgaccaagccccagaacccgtaggacgccttataggtcagggcgcggccccagtgggccagtacgccgttcaggagcagcagccagatgtagcccaggatgatgccgccgataaggttcggcatgaagaataccgagcggaacagcgtggagcccttgatcgccttggtcagcatgtaggcgatggcgaaggcgatcacgttgatcacgatggtggtcacgatggtgaacgcggtggagaagccgagcgcgtgcaggaattccttgtccttcagcgctttgccgtagttcttaagccccacccattcaccgtcggtaacggtggtgaattcgcagaagcttaagtagatgcccatgatgaagggcaccaggaacccgatgatgaatgcggcgaatgtggggagcgcgaacagcgcccaccatctgcgtatcgccttgccagccatgctgatcatgacttttcctcctccttgagtccgctgcgttgcgacactgcatcgtgcgccggctgcggagttcaactcaatgcgagcctgccgatcgagaaccgcatgcacggcctgttctcgttcaagcctatgttcatagtaaacgccgaatcattatatgtcaaacgttgtcattttcagcgtttcaagctcgagcatactccagctccagcaatcttctttcaactaagataatggctatataaagccaatctgacgccgtcataaacactttgcaaacgtttgtaatacaatcgttgtcatcgccgcaaatcaatcaatcagcatgtacactggagtcagttgtgcatgtgtattgcgattttccattcaacgcaagggggctgcaatggctacgagcattcaggatgtcgcccgcgaggccggcgtctccatctccaccgtctcacgttccttcaccaggccggatctggtgtcggccaagacccgcgagcgcgtgctcgccatcgccgacaaactcaatttctcactctcccgctcggctgcggccctgaaatccggccgcgccctgcgcatcgcagtactgatgagcggccatatccgcctgtggttcaccgcctcggtcatcgaggggctcaacgaggtgctgcacacgcagggctacgatatttcggtattccagatttccagcatcgaggagcgcaaggaattcttcgagatgttgccggtacgccgtaacgccgatgccgtgattgtggcgtctttcgatatcgacaacaacgaaatcgcgcaactggcttcggtcggcgtgccgatcgtcggcatcaattcagtcgagcccgaagcccgcggctttaccgccgccgtcaatatcgacgacgtgcagggctccacgctggccgcccgccatcttatcaatctcggacatcgccgcatcacctatatcagcaccaatcgcgaggtgtcgctgagcttctccgtgcaaagccgattcgactcattcaccgcctgctgccgcagggaaggcatcgagccgcaggtcatcgtctgcaaggtcgatgacgatggacgttatgaaatcagcgacgtggtcgaccaactcatgagccaagacgagatgcccaccgccatcgcatgccaggaggatggcatcgctttgccgcttatgttccagctggagcgcaatggattctccgtgcccggcgacgtctcgctggtcggctacgacgatagtttctacaccggcgatatcggcctgaccaccatccgccaggatccggtggaaatggcccgcgtggcagcccgcatgacgctcgatctcattgacgaaaagccgattgagcaaccctacatcgtgttcccggcccagctgaaggtccgctcctccacctcccgcgttaagtaggctcacacaacaaagcccaccatagaaaaagtgtgaggcaaccgcacaataacgctcaatcgcacattgtggagaatggcgaaaaatcgccgattcatggccccacagcgtgcgattgagcgggtgcgtgcctcacacttttctgcggcggacgattttgtgcgagactcagcaatacaaagcggcgcccctggagaaggaaaggcaggggcgccgcggattgttacttatcggctatgggactctatgagactcagtgcgaggcctcgtattcggaagcccaaccgtccacgaaggcggtcttgacggcatcccacttgccggtgccctgcgcgtactcgagcagcgcctggccgaccttgttcttccattcctcggacggcatcatggtgaagttccaagaaacctgggtcttgccggactcctggtcttccacggcggcctcggtcagcgggttgtcgcttttgacgtcatcgaaggtcttgaacggggtggtgaagcccatgtcctgagagagggccttcttgccggtatcagaggtgatcacccacttgaggaagtcctcggtggccttcttgtcggcgtcggaggccttgtcattgatgcaccagtagttctcggaaccggtggtcagaccctgcttctcctcgcccttgacgccgatgtagatcggcatcatgcctacctgatcggcggtcatgccggccttctgcaggtcggtccaggcccaggtaccgttctggtagaaggcggcctcgccgagcgcgaactcggagttcgcatcatctccggtcttggcgctcagctgggtgggttcggtggtggagtcggtgatgtacaggtcgaagatcttcttgtagttcggcaggtaggtgcccttgatcttggccggctgctcggtgacgttgtcgtccttgaactcgtagtaaagcggcagattggccaggtgggtcttgaagcgccagtcggagctggagtcgaagccggcggaggtgaacgcgcccttgatgccgagctcgtccttgcgggcctgcatgtcgtcggccacggccttcagggtgtcgaagttgtcgatttcgtccatggacgtggccttggcgccatccagcgcgaagtacttgttgaggatgtccttgttgtagatcaggccgtaggtttccatcacgtacggcacgccgaccaccttgtcgccatccttcagggccacatcctggttggtgagctccttgtacacatccgtattggacatgtcggcggtgtacttcttccagttctggtagccgaccgggccgttgacctggaacaaggtcggggcttcggttttggcgatttcggacttcagggtctgctcgtaggtaccggaggccgcggtctgcaccttgacctcaacgcccttttccttggtgtattccttggccagagcggtccactgatcagccgcttccggcttgaaattcaggtagtagaccttgcccttggcgtcatcgccggaggtcgagcttccgcaggccgccaaagcgccgagggacatcgcagcgacagccgccatcgcgactgctgacttgactgtacgattcatcatcgaacctttctctttcatcgtcgacccggccgtccccggtcgggacaggtacgctagcacgcacctttacgactatcgacatgcactattgtgcaacggtttgcttctttttgcaaacgatagcaatatcggcgcgtcataaatcatcattttcaggccattgtcaacaaatatcccattaattcagtcatttttgcctcattatcgcaatgcaagcgttcgcaactatgagagcgctaacatatctttcatggcgatcgattgccacttatacccatcaaaaaacaacacgccgacgctatcgtttgcaaatcatttatcgacataccgcaattcccgccacaaataataaaggcccgcccgcagtagcgggcaggccagcgcaatcgcagcgcaaccggggctaggcgttccaccgttcgatgacgttatctcccttatagacgctgagcaccgagtagtgcgccgtatccaaacgcagcaaccgtgcgaaatgcgggtccacgcccagccattgcgaggtgaggatgcgcaggatgtgcgcatgagccaccaacagcacattatggccgtctttcagcagcggcgtaatctcgtcgatggcgctcttggcgcgtgccgccgcttcttccagcgtctcgccaggcccggcatggaccggcacctgttcgcccgaaggcaaggtctcgacccagtcgccctccagcgtgggcgtcagcgagcgcggcccgtcacgccacacatcccattcaaaaccgctggcctcactcacctgctggcgcgtacgcccctcggctcggccgtaatcccattcagcgatgccgtccaacacaccgtggtccgcaaaaccagccaattcagcggtttggcacgcccgcttcagcggactggaaaacacacagctctggctgaatccttcggggaaggcctcgcgcaggcgccttccggcatccgctgcctgctgctcgccgaccgcggtcaacgggatgtccgtgcgcccggtatgctgcccggattcgctccacacggtctggccgtggcgcagcaacaccaaaaatccattgccgccacgagagttctcgacggcaacggtgccgttcacgttctgttcgctcatgcctccactctagtctgcgctcgttcatgactccaccattaacgcccatcttttgcgctgagatgattgagatgctattagactgagagtcatgagcgacgaaacgaacaccgacttcccctccagcgccgaccgcgcggtcgacagcctgcaccgcatcgacgagaaggtcaacaggctgcgcgaggaccggctcaacgaccctgattctctgggcgacaagctcatcaagtcggcagtcccagcgctggcaggcttggttgccggcaaagcattccagatgatatgggacaagggcacaagcaaacgcaatctgcgcaagggactggcggcagacgcgccgcaaagtctggcaatgagtctggcattcgccgccgtttcggccgcactcggcgcagtggtttcgcagctgtcggatcggggctccaaggcgttcgtcgaccaccgccatcgcaagcccagccgctaatcccccggttggatgatggtttctgttggctgactgatgactcatcgctggaatttcgtcaaggaaccatcagtcaatcgacaggaaccatcagtccagcacagttccgccacacaatatcggcatttcactgtgaggtaatccaccgtggcgtccggcgtctgccgtgcgacaataaagccatggttaccaacgcaacaatcgaggctcttctgggccgccgctccatccgtaagttcaaggacgaggccatcgacgacgatacccgcgccacgctcgaaaccgtcgcccaacatgccgcgtccagccagttccttaacgactggtccgccatccgtatcaccgacccggccaccaaagccaagctcgccgaattcggccatcagccgtatatcgccaccgcgccgttgctgtacgtgttcgtcatcggcgagcaccgcaacgcacgcatcgccgaacgcaagggtatcgatcccgcttccgacgaattccatctcaagtacagctatcgcttcacccaagctcagaacgacgcagtgctggccctgcacgccatggagaccgccgcctattcgctgggactgggctgcgtgattctcggctctctgctcaacaacatccccggcccttatcgacgtgctgaatctgccggaatacacgtatccggtgctgggtctggccatcggcaagcccgatcagaacccgaccgtcaagccgcgcatgccgcgcacgatgcagttcttcgagaacacctacccggctgacgccgatggcgtactcgaccagctgcccgccttcgacgaggaagttcaccggtactacgatctgcgccaagccgaccgtccggtggacgctttcagcgatcaggtcgccacgatcagtcggcaggatgtcagccatcagacactgctcgacaaggccgccgctcagggcttccgtctggatcagtgagaccagaaccaacgagatagcctcggataggctcgtcactgagtcgtctcggtctcagcactgcgacgactcagttccaacacctcaacatttcatcaccggataccggcaaaattgcacaaccatcccgccggtgtcgcaccatcaacaaacgttcacatatcagtcccattatgcggacaaccaacggccagttttgcaagaaaacccgccaaaccagcagtatccgcaccagtggtgggaatagactgcatgtggccgcaatgactacgaaccggaaaagagggactggatgcggacggtttggcaagtctttctacgcgattgcagacgtatcttacgcaatcccgttgccgttgtggtgacgctcggcgtagcaatgctgccctcgctgtacgcatggttcaacattctcgccaactgggatccctattcagccaccggcaatctgcaagtggccgtagccaatgaagaccaaggcaccaccaacgatctggtcggccatctcgatgcgggccggcaggtcgtcaagaaactcaagcagaacgacgaactcggctggcgcttcgtagacaatgaggaacaggccgtccacggcgtggagaccggcggatactatgcagccatcgtgctgcccaaggatttcagcgccagcttggtcgaatcggtgaccggaacctccaaacagccgaaaatcaagtattacgtcaacgagaagaagaacgcgatcgcgccgaaaatcaccgacaccggcgccaccaccatcgatgagcagatcaactccgccttcgtcaccacggtagccaccaccgttgcctcggccatttccgaaaccggagacgatctcggccaagccactggcaaagtccagcacgatacgatcgatgatctcaatacggtgatgtccacgctgaacaccgttcaggattcactcaccgacttacaggacacgctggcccaatcagacacgattctcgccgacgccaaacagaccaccgcctcactcaagcagaccgtcgcggccgcgcagaatgcctcccgccagtccggcacactgttggcggaaacacaggccgggtcacaagccttctccaccacactggtcggcgcgctcgacagcagttcagcacaactctccggactggccatccacgtcaacaacgccgccggcagcatcaccggctccttcaacagcgcgcagaactccgtcgacaccatcaccaacacactttcggccccactgaacgccacccaaacgtcaatcagcgatctgaaagacgcgctgaccaaagccggcatcggcaaagacaccaccgacccggtcggccagaacatctggaaacaaatcgatgcgctcgactcattgatcagcaaacagcagacacagctcaacaccttccataccgacaccacacagttcatcagctccggcaaagacgccaccacgaacctttccggagccatgaccaacaccaccaccggcggcatcgcggcgctgaataccgcgcgcggctcgctgaccggcaccgtaatgccgtcgctcacctcatcattgaacagtttcgccgccctgaacggcacgctggatggcacgttgacttcgttgtccggcaccttggatcaggccgacgggctgttcgaccagcttgtcgataccctgaaccaaacgaaaaccaccatcagcagcacgcaggattcgctgcgccaggcggccagcgatgtcgccaccgtacgcaccgatatcgccacgctcgatagttccgccgcttaccagaaaatccgggatacgctgcatctggatgacaagggattcggcgagttcatgggcaatcccgtcaccctgaccacgaaagtcgtgtacgccaccgacaattacgggtccgcagtcaccccgttctacacgaatctggcactgtgggtaggcggtttcgtgctgattgccatctacaagcttgaggtcgaccgcaaaggcattcgccgtatcaccgctacgcaagcatatcttggccgctggctgctgctggtcaccatcggattcctgcaagccgtcattgccaccatcggcgatctggtgctcggcatccaatgcgagcatccgctgctgttcatcttggccggaatcttctgttcgttcgtctacatcaacattatttatgcactggccgtggcattccgccatatcggcaaagccatcgccgtaattctggtcattgtgcagatacccggtgcctccggcctgtatccgattgaaatgatgccgaacttcttccgcgaactgcacccatggctgccctttacctacggcatcaacgcgatgcgcggcccgatcgccggcctgtacgcgaaccattactggctcgacatgctgcacctgttctggtatctgccggcggcgcttttcgtgggacttgtcgtacgccggtatgcgatgaacctgaacgcgctgttcgaccatcgtttgggagataccgacctgatgatcaccgagcacaacagcatggtgaacgaacaggtgagcttgaactccgtattccgcacggtgtccgacagcaaggaactgcgcgatatcatcgctcatcgcgcgcaccggttcttcgcgcggtacccaaagatgatcgttgccggtctgacattgctgaccgtactcccgttcgtattcctggtactgctgttcgtcacccaagagaaaatcgccatgctgacctcctggattctgtcgattattcttatcgacgcctatctcattgtggttgaatacgcacgcgaaacctacgccatgcagcttggcgtcagtgccatgagtgccgacgagttccgcaatgtgatgctcaacggatatgtgtggcggcgtttccacggccacggacgtcacgaagcggcgatgggcagcaatccggatatcggcgaaaccactgaacgactcacactgttcggcgatcaggccgccgagccgactgcgcacaccgcacagttcgagcagtccggtcagtccggtcagtctgggcaaggaggcgcacgatgaagcttatctggaaaatattcgtacgtgacgtgcgccaagccacccgcaatgtgatcgccgtaatcgtggctatgggattggtgattgtgccggcactgtacgcctggtacaacatcgccgccagctgggacccgtacggcaacaccaaggccttgaaggtcgccgtggcaaacgtggataagggctataagtccgatctgatgccgatcaccatcaacgtcggcgaaaccgtgaccaatacgctcagggccaatcatgaccttgactggcagtttgtggatcgtgctaaggccatcgatggcgtgaactcaggcgaatactatgccgcgctgattattccaaagagcttcagctccgatatgatgacgctgttttcaccgaagatcaagcacgccaagctcgaatactatctcaatgagaaaatcaatccgatcgctccgcatatcaccgaccagggtgctaccaccgtggccacgaccatcgaccagacatttgtgaagaccttggcgagcgtggcgctggatttggtttccaacgtggccgattacgcgcaaagcccgcaaatggagcagtacgtcaacaacgcctccagtcatattgccaccatgtcgtctcgtttgaccggcactgcgtcgcagatggattcctatgccaatctgctcggggccgccaacagcatcattgattccaccgataagctgctgggatcaacaggctcagctgcggccacaaccaaaaaggcgttgaaacagacccgcaacggcgtctccagcctcgacaaggcattgtccggagccaccgatggcgtcggtacggcattgcagcaggccggttcatcctacgacaccattgccaagcagatcgatgccgcttttgccgatgtgggctcacaatcctcgcagatatcaaacaagctgaccgatatgcaatccaaagtggaggctcaggccgacagctttggaaagtatgccgccgctttacgagatctcgccaaacaagcggcttcactgcccgtgggcggagataccgttgccgctcaactgaacgcggctgcagaccaagccacaaaggcgcagcagagcatgcagcaagccgccaccgcgttgggcgatgcggccacgcacatagcaaatggtactgccgatgccgatacagcgcgtcgagatctgaaatcacaaatcgccgccgccaaacaatcgattactcaggcttcagacacgtacaagagcacgctgaaaccgcaactgaacaatctgacctcgtccatggacgaagtggccacgcaggcaagttccgtaatcgacgggcttgcgtcgaccgtcagcagcgtgtcaggtctttctggcggcgtttcagacagcctgacggatatccagtcggccttgactgacgcagctagcgctttgacccgttcggcgaagaaactcgacaacttgtcttcccaactcgcctctatcaccagtggcggcaccaacgacctgtctgtgatttcctctgcgaagcccgatgccattgcttccatgctggcggcacccgtagcggtcgaccgcatcgcgctctatcccgttgccaactatggttccgcgatggctccgttctacacgattctgtctatctgggtcggtgcgatcattctggtcgccatgttgaaagtatcgatttccgaccatgagaaggcccgtatcttagggttgggcaatgatctgccgctcggttcgggagtgggtcttcgcgaggccatgattgccgggcggattgccggaccggccgccgcgttggatgtgctgaagaagccgcgtgccgagtcttccggcaatgcgcggcagttcggtttacgcttgcaccacgaatatttcggccgatacatgattttcggtttccttgctttgctgcaaggtacgctggtgtgcctgggcgatatgttctatctcggcgtgcagtgtgagcatccgattcagtttttgatggtcgggtggttgtctgcactggtgttctcgaatattgtgtatacgctggccctatcgttcggtgatatcggcaaagccattgccgtggtactgctggttatgcaggtagccggttccggcggcacattccccattgaaacactgccgacgttcttccaggtcgtttctaaatggctactgttcccctatgcggtggatgcgatgcattcggccatggcgggctcattcggcatggaatactgggtttccatgggcaaactggcactgttccttgttccctcattgctgttgggacttatgttgcgcaagccggtaattcgcttcaacgattgggttatccgcaaccttgaaagcaccaaggtgatgtgagtgttggacggagtgtgtccgagcgccctgaacgcttagcagcctacgacctggcgtgtttggaccgtaacctgcctcagatacggcgttggcgaggcctgtggagcttctgacgctaacgtctacgtggcttgtagccctttttacgactgtgtggcttgagttgctggttcagcggtacatgccggtaactggattgtggatcgcgatgtgtgaggtgccagcatccgcaatattcgcaacggtacacccatagctcggctccacgctcgatcaggctttgatcagcggcacgctgagcctgcgccttatcgtggtacatgattttattcgacgtggcgcaacgtttaggggtgaagtaatgcatagcagaagccagtgtagagcgaccccataaccaagccagtttctggctcccctctggaggggagctgtctgcgcggcggaccggggggccgggcgttgggctcccacggtcgcggacgcgccgcgccgttcggcctcgccgtcggggctggccgggaatggtcccgggcgtgggtctcatgggtatgcggggaggtcccggtgcccgtgcgggttcgggccgg

SEQ ID NO: 322 - DNA, 23504 bp, Unknown
  R42_10m  MAG No. k141_5544
cgttcggcgcggtccgcatacaggtcgtagatggacgtaccttcgtccagcggcggattgccttcggtggaggtggtgagcaggccggtggcggggtcgatgtcggtgacggtcaggtggccgtcgtcccaatcgtcgctgtgaggcaaagcgatgttggtctcgaccggcacgtcggcgttggacaggtaatcgggctcgtccggggtgtcgtcgtggaccgggtggacgaagtcggatcccaacctgagcgccttacgggtgagattgatagtgtgctgcgtgaaggaattgataaccgacaagtcttgctcctgtaaacctttcagtgtcgtccagccatgaggcgaacgcttctcaaagttcaaattgtaatcgcccaaaccgaactcgtcaccttacgcaaccgtaggattctggcgggttaggggagtgcgtggcaaaatattgcacaggtcccgatattgttgagtaaccgtgagctacgaaacggtgattgtcgatagttattgagcggttggttgctgatcgatgccaggtgattgttggacgacttccgagcaattcatccgcaatgcacatggacacattcgtatttctcactaatttcgggttcgtttctgtttcgattggcggaatctcaagtcatggtctttgccttccgactacactttctatgcggataaccatgtccattctgaagtagaacaagaaagggctctcatggcgcaaaacccagaagccaccgtggtgttcggcgttttgaacgaaacgtccgaaacggaatcccgcgtcgcgctgacgccggatatcgtcacccggctgaagaggagcggagtctcctcgattattgaggccggtgccggcattgccgccgaatacaccgatgaggattacgaaaaggccggtgcgaaggtgaccagccgtgacgaggtgctcgccgaagccgacgcgctcggttttgtggaccgaccgtccgccgagaccgtggccaagctcagggccggccagtgggtcattggcatgctcgggtccttcaccgatgccgattacgtggccgcgctcgagaaggccggtctggtgggcatcgccatcgaaaagctaccccgtaagctttccagcgcccagtccatggatgagatgacctctcagaactccgtgatgggctacaaggcagccatcaccgccgccgatgcttacggctccttcctgccgatgatgaccaccgccgccggcacgattcgcccggccaaggcgctggtgctcggtgccggcatcgccggcctgcaggccattggtacgctgaagcgtctaggcgcggtcgtcaccgcgtacgacgtgcgtcccgcctcccagggcgaggtcgagtccctcggcgcgaagttccttgatctgggacttgacttctccaagggccagggcgagggcggttatgcccgtgcgctgagcgccgaagagcaggctcagcagcaggctgccgtcgatgagaaggccgccggctttgacatcatcatcaccaccgccaaggtcccgggccgtaagcccccggtgctgctcaccgcagccggcgtcaagggtctcaagcgtggtgccgtgatcgtggactgcgcagcatccgacctcggcggcaacgtcgagggttccgccgtcggcgagcaggtcaccgagggcggtgtcaagctgattggcgctccctacctggcctccggcgtcgccaccaccgcatccaacctgctttcgcgcaatgtggccgacatcctcgtgcacttcgtgcgtgacggcaagctcggccaggatctcaccgaagaacttgacgacgcgctggtggttgccggccgcgccgccgccccggcagctgctgccgatgccgagaagtccgagaagtaaggaagaaggaataccatgcctactctcgtcgtttccattaccctgttcgtcctcgcgctgctcatcggtatcgaggtcatcggcaaggtgcccgccaccctgcacacgccgcttatgtccggcgcgaactccatccacggcatcgtcatcgtcggcgttgtgatcgtggcagccgaagccaatagcccactggcctacgtgttcatcttcctggccgccgtgctgggcaccatgaacgtcgtcggcggttatgtggtcaccgaccgcatgctcgagatgttcaagtccagcaagaacgagaagaagggggagtcgaagtaatgacctccgcaaccgttggcgccatcgacatcgtcgcatggttcgtctacctgttctctgccgtcctgtttgtggtcggtctgcatttcatgaattcgccgaagaccgcccgcaagggtaaccagatctccgcgttcggcatggtcgtggccgtgctcatggcgttcatcgtgcttttcgccaagggcttcgtgaacattgtcgccgtggtggtgctggtcgtcggcatcctgatcggtgccgtggccggtgtcgtctccgccaagaaggtgaagatgaccgatatgccgcagctggtctccgtgttcaataccgtgggtggtggcgccgccgcactcgtggccctgaacgacatcctgaccaaggaaggcaccccggacatcgtggtgctcatcaccgctggtctcggtattttcatcggttctgtgaccttcaccggctcgctcatcgctgccggcaagctacagggcatcaagtgggtcaagaagctgaacctgccgggcaagggcgtatggaacattctgttcgccgtgctgtctgtcgcctcgctggtcatgctgtgcgtccagcccgaacagcgtctgctgtggtcgattctgaccaccgtgttcgccctgtgctacggcttggtcttcgtgattccaatcggcggcgccgatatgcccgtcgtcatctctgtgctcaacgcctgcaccggtacggctgtggctatgtccggtctggcgattgacaacgttgccctgatcgtggccggcgcactcgtcggttccgcaggtgtgaccctgtccatcctcatggctcaggccatgaaccgtccgctgctctccgtcttggccggtggcttcggcggtggtgctgacgccgccgctgctggcgacggtccggaaggcaccatgaaggagaccacgccggacgatctggccgttcagctcgtctacgcgcagaaggtcatcttcgtgcccggcttcggtctggctcaggctcaggcccagcgcgagctcgctgaccttggcgaactgctcaagggccatggcgtggaagtctcctacgccattcacccggtcgcaggccgtatgcctggtcacatgaacgtgctgctggccgaggccaacgtaccctacgaggaactcgtggatctcgatgagatcaacccgcagttcccgcaggccaacgtggctctggtcgtcggcgccaacgatgtgaccaacccggctgctcgccgtcctggcaccccggtttccggtatgccgattctcgacgtcgacaagtcccagaacgtcgtggtcatgaagcgtggccgcggcatgggctacgccggtatccagaacgaactctacttcgaggacaacacccagatgctgttcggtgacgcgaagaagagtctgcagtccgtcatcgccgccgtcaaggaactgctcgcgtaaccattcttggctcccctcacagaggggagccaagcttctatatctactacagcccaaacacccgcttaacaaagccgttaacgcgacgccaatagtggtccggatcggtgctggcgctcatcgtgtggtcggcgccgggaatcagcagcttctcgcggtcgatgctggcgcaggcgttgtaattgatgtccagatacttcgggttgacaaaagtatccgctccgccatgaatgaacatcatcggaatagtcgcgtgccgtaatgccttcacacaggaggcgtcctcaaaccggtatccagccttgcgtttagacacatgactggccactttgaccagcagcacggccaacgagtgcggcaaacggaacatcgcctcggcattatccgtaaactgcgagaccacggaactgtatccgcaatcggaaatcgcggcgacgacgttgcgggggagtcgcgcatcgccggccgccatcatcaccgtggcggcgcccatcgaattgccatgcaacagaatgcgtgcatccggatcagctgcggtgatcagcgaaacccagcccaacagatcgtcgctttccagcaatcccatacccacgtaacgcccttcgctcaattcatgggcgcgctgcgcgggtagcaggaccgtaaaaccgagttgcgcatagcgatgcgcccatttggccatttccgcgggctctccggtatagccatggcagcagatcgcgtatagatgcggctgtgggtcggaacaatccgggtccaacagccagccgtggagtttccatccatcatggctgcgcagcgtgaccgattgcttggcctcctcgaaccaccgggtggcctcaagctgctcggacatgtcgaattcgatgcctttcggcgtctcctcgtgcggcatgttgaacatcgaacgtttggccttggtgtccagcgcgaacatgaacatgacgttggcggccgcggctgtgacgccggctccggtggcggctatcgcggcaagtgccgcagccatacccctgacaacgcgagtgtgtgcggcgatgacgtcatggccatcctcattgatgacgtcgtccgaacgagtcatatcaacctcccgatacggtactcaccatcgtacgttatttttcgaaatcatccccaacttcgtgaaagaccgtacactgagtgtcgctgagcgtacggttttcacgaaatggcgaacgatttcgtgaaaaccgtatgatgagaacgggtaagcgtacgttcttcacaaagttagggattatttcgcggaaaccgtacgttgacgtagctgggacggcctatatgcagtgtcatcgaagcatcattacgcaaagtccggggttggcgtatacttgacaattgttgctttggcgagggaagtgtgcatgctgacacatgacacagattccgttatcgactcggcgtatttcactccttgtagggtgtctttcggcgcgtcgtggcgtctgagcgagacagtacgaaacgaagatacaaggagtatccattatggctaccaccattaagcttgagggcgaggcccgttccgagttcggcaagggcgttgctcgtcgtctgcgcgttgccaacaagattccggccaccatctacgccggcggcgaagagcccgccttcgtgaccttgccgatgcgcgagaccaccctggccctgcgtcacaccaacgccctgttcaccatcgccttcgacggcaacaccaagatggccgtcgtcaaggacgtgcagaagaacccggtcaagcgcatcatcgagcacatcgacttcctcgaggtcaaggccggcgagaagatcgacgtcgaggtgccggtgttcgtggaaggcaccccgaagggtgctgccgtggcgttcgtcgacattcaggagctcaaggtccgcgccgacgtcaccaacctgcccgagaagatcgtggtcagcgtcgaaggcctgaccgacggcaccaaggtgttcgccaaggatgtcgtcctgcctgagggcgtcgagctggacgtcgaggatccggaagagtccgtcgtcaccgtcgaggtgccggaggatgccaccgagtccaccaccgctccggaagctgctgccgccccggctgacgccgccgctgctccggctgccgacgccaagtgagtcggtcgcttcgatagcgaacaattcagaacataactgaaacgtggaagcccgcagccgttgagaacggtgtgggcttcttcgttttttcaccatgtgaactctgccacacgagtaacacatgggtgtgcaaaagtatgcaacagagttcgcgccacaagcgcacagcacacaccccatatggtggctttcgggccgccaaagtcaagaagaagtagctagtgatgactgaaaacacgcaccacgatccggcagcactcgacaagctcaccgaaccgttcaccgtactgccgaacgacaaccccgcatccgatgagaagcgccagtccctcatcgacaagccggctttcggccaggtgttctccgacaacatgacccacatgacttggaccaagggcgaaggctggtccgaccgccgcgtcgaaccgtacgcaccgctcaagatggacccgggtgcttccgtgctgcactacgcacaggagtgcttcgagggcctcaaggcttaccgtcatgccgacggctccacctggctgttccgcccggatgcgaacgccgagcgtttccagaactccgccaagcgtctgtacctgcctgagctgccgattgacgacttcctcggttccgtggccgcgctggtcaagcgcgacgccaactgggtgccgtcccgccgcgagtacacgctgtacatgcgtccgttcatgttcgcttccgagccgttcctcggcgtgcgcgccccgcaggaggtcgactactgcgtgatcgcctctccgtccggcccgtacttcccgggcggcgtcaagccggtgagcatctgggttgaagacaagtggttccgcaccggccctggcggcactggtttcgccaagtgcggcggcaactacgccgcctccctgctcggcgagtacaagggtgttgagaatggctgcgagcaggtgtgctttgtggacgccgccaccaagacctaccttgaagagctcggtggcatgaacatgatggccgtgcacaaggatggccacgtggagaccccgtccctgaccggcaacattctgccgggcgtgacccgtcgctctctgattcagctgctgcaggacaagggccacgacgtggtcgagaccatgatcgccctcgaccagctgctcgaggacatcaagtccggtgaagtcaccgaggtgttcgcttgcggtaccgccgccatcatcaccccgatcggtcgcttcaagtccgagaagttcgacgtcaccgtcgccgacggcggctccggcaagctcacctgcgaactgcgcgacgagctgctcggcatccagctcggcgaagtcgaggacccgcacaactggatgtggaaggtgtgctgaactagcaccttttgtttccgactaagaccccttagaatgtcaacaattccaaggggtcttggcgtattggaaatgttcctggctagagaggtacagatggatttagcaacatttcgcaacaaataatatgatttaggtcttctgcacgttgcgagggttggttatggttcatccagatgagaacaggagcaaacctatgagcaagatgagtgacatgacggaatactatgcttcagcctaccgtttgccgtcaggcttcgagcattgctcgaaactgaagccggtggcagaggcagcgacggcgttgcgtcggtggtgagacaagacatgagcttctggcgacgctgggggatgttcaatgtcagtaatggttcaaggtttggactgctgacgtcgctgagacaccttagcgtcgttaacgggtcaggttctggcgatcaaacgacggtaaaaaggggcttagcgtcgttagctgtacataagttggcacggcaacgacactggagcgcgtgatcgtcggtgccgtgccaaactttggccaacctccgacaaatgagaaggactaacgtcggtggctgctcaaagtttggcgcgctggcgacgctgtaagaaaaaaagtgtggagtcgaaccggcaatagcatttattcggtttgttctctagtccaattgcgtcaggcaaggcctgttgtaggctcgggtacgacgggctgtagcgccgaataaggatgaacgggaacagaacgaagacggactgagacgaaccgaagcggtaccagaggggagcggctcatgcaggtggtgttggagaacaacatcgtttttgtggtcatcgagtatttagcaatcctgtgttggggattgtcgggcggacttgccgccattcgcaagggctacgacatcttcaccatcatgctgtgcggatggcttaccgcactcggcggcggtcttgtgcgcgacgtgatgctcggtgccctgccgccggtcggcatcaccgacaaaggctatgtgctcaccacgctgttttccggcattatcgtggtggtggcccacccggagatcaccaaactcaaatggacgatgactgtcatcgatgctctgggcctcggactattcgcagtcagcggcaccgcaaaagctctggcctacggttcctcaggcatgacagccgtattccttggcatgttcacagcactggccggcggcctcattcgtgacatcttcatcggcgatgtgccaatgattattcgagacaaacacctctatgccgtgccctcgttcatcggttgcattctgaccgtgcttgtatggcgtggtgtgcactacggttggttcgacatgtgctcggaaatgctgctcgacgtgctgatcgtcatcatcgtggtggcgctgcgcctgctctcggtcggcttcaacgtcaccttgcccggagccgtcgagcgtcatcgcgtctacctgcccagcgaaagccgatatctcaagcgcccggtcatccatccgcacgccgataccgtcgatcccggcgataccaccaaggacgaagaagacaagcctcaggatgattcaagaccgcctcagggctaactgccttcaaagaggtacatttggccttctgcaaaatgacaactgctttcaaagaggtacctgaagcacgaaacgtcgagtataagcgttgcaatgacggcgtttatacttgggctttctcggattcggtacctttctgaacggagatgtcatttcgcaagaccgccaatgtacctctttgaatggagatataaaaagtcccgcaagccagatgacttgcgggacttgctaaaaccttaagaggcttatgctcacagagcgttgatcgcaacagcgaggccggacttgcggttggcggcctggttcttgtggatcacgccagcgccagcagccttgtcgagcttctgggcggcaaccttgtaggcggcctcggcggcagccttgtcaccggcggcgatggcttcgcgggtggcgcggatggcggtcttcaggccggacttcacagccacgttgcgaaggtgcgccttctcattggtgagcacgcgcttcttctgcgacttaatgtttgccacgtttactccaaacgatgtgtgttataaggacatacaaaaggtagaggatagcatgagccccggaaaaacccgcgcaatgccacgccgaatacagtccctcggctacactaggtgaagtttgagtatatgccaagaggaggaatgcgttggtcgtccaacacaatcagccgggttccacggatcagtcggtgattcgcaacttctgtatcatcgcgcacatcgaccacggcaagtcgaccgtggccgaccgcatcctgcagttaagcggcattgtgcccgagcgcgagatgcgcgatcgcttcctcgaccgtatggatatcgagcaggagcgcggcatcaccatcaaatcccaggccgtgcgcgtgccatggacctttgacggcaccgaatacacgctcggtatgatcgacacccccggccacgtggacttcacctatgaggtgtcccgcgcactggccgcctgcgaaggcgcggtgctgctcgtcgacgctacccagggcatcgaggcgcagaccctgtctaacctgtacatggccatcgaccatgatctggccatcattcccgtgctcaacaagatcgacctgccgtccgccgagccggacaagcatgccgaggagatcgcaggtctgatcggctgcgagccgagcgacgtgctgcgcgtctccggcaaaaccggcgaaggcgtggccgacctgctcgaccagatcgtcatggacgtgcccgccccgcacggcgaccccgaggcccctgcccgcgcgctgatcttcgactccgtctacgatccctaccgcggcatcgtcacctacatccgtatggaggacggcgaactgcacgaccgcgaaaaggtccacatgatgggcattggcatgacccacgatcccatcgagatcggtgtgatcagccccgatatgacccgtaccaaggcactcggtgccggtgaggtcggctacatcatcaccggtgcgaaagatgtgagtcagtccaaggtgggcgacaccctgacctcggccgtccgcccggccaccgagccgctgcccggctaccgcgaccccaagccgatggtctacgccggtttgttcccgatcgacaacgcgcaattccccgaactgcgtgatgcactcgacaagctcaagctcaacgacgccgccctgatctacacgccggaaacctccgtggccttgggattcggcttccgctgcggcttcctgggtctgctgcacatggagatcgtcaacgagcgactctcccgcgagttcggcctcgacctgatccagaccgccccgaacgtcacctacgacgtgaccgccgaggatggcagtcagcatcatgtgaccaacccgagcgaattcccggacggcaagatcaagaagatcgtcgagccgatggttgccgccgacatcatcacacccaaggaatttatcggtgcggtgatggatctgtgccaggaccaccgcggcattatgggcacgatggagtacatctccaccgatcgtgtcgagatgcactaccgcattccactggccgaaatcgtgttcgacttcttcgaccagctcaagtcccgcaccaagggctacgcttccctcgattaccatgaggatggcgagcagtccgccgatttggtcaaggtggacatccttattcagggcgagaaggtcgatgcgttcagtgccatcgttcaccgcgataaggcgtattcgtacggtgtgatgatgaccaagaaattgcgtagtctgattcctcgccaacagtttgagattccgattcaggccgcaatcggttcgcgtatcatcgcgcgtgagaacattcgtgcgttgcgcaaggacgtgctcgccaagtgctatggcggcgacatcacccgtaagcgtaagctgctcgaaaagcagaaggccggcaagaagcgtatgaagatgctcggccatgtggaggtaccgcaggaggcgttcatcgccgccctgtccaccggcgaggactccaacgaccgcgacaccaaagacaagatccgcgccgctcagaagaccgagggctagtgttcgaggtctacatccacgtcccgttctgcttgcggcgctgcggttactgcgacttcaacacctacacggctacggatcttggtgcgggggcctcgcgcggcaactatgccaatatggtcattcgtgaaatggccctgaccaagcagtggcagctcgaccacggcatcgaggagccaccggtctccaccgtgttcttcgggggtggtacacccacgattctcgccgcccgcgatctggtcgccatgctcgatgccatccgcaagatctggagcatcgcgcccgacgccgaaatcaccaccgaagccaacccggacacggtcaacgaatattacatcaatgagctcgctgccggcggcttcacccgcgtttccttcggcatgcaatctgccgtgccgcacgtgctcaaaaccctcgaccgcacgcatacgccggccaacgtggtcgcaggcgttaatgccgccaataaggccggcctgcgctccagcgtggatctgatttacggcgcaccgggggagagccttgacgattggcgcacctcggtcacgaccgccatcgacctcggcgtgaaccacatctccgcctacgcactgaccgtggaacccaccacgaaaatgggtcgtcaaatcgcggccggcactctgcccaaacccaatgacgatgacgaagcagccaaatacgaaatcgccgacgacctgttcgccgccgccggcctcgaatggtatgaggtctccaactgggcccgccccggatacgagagccagcacaacctcggctattggcgcaacgtcgattgggccggtctagggccaggtgcccactcccactacaacgcggtgaccgaggctgaccacccccagtcggcttcgctgacagcccccgccagcgggggcaagtccgaagccattgcctctgcctcagctgatggacaggccaacgccgaacttggagaaaccaacgccgaactaggtatgatcaacgcgcatgggaacaactcccaagaaattcatgcccccgctggcgggggctgtccggcggatgccggactgggggtggtttctgtctcacacggtctgcgcagctgggacatcgcgcacccgcgtttgtggggcacggccatcaacgagaaccgtgtgccgtgggccgatagcgagacgatcactcccgaggaaaacctcgaagagctcatcatgctcgggctgcgcctgcacgagggccttggcctcgaccgcatcaaccgcgccatcaacgatgcaggtatgagcagcacgccccagactctccgaaccgtttcggttgaccaactcgcccccatgatcagcgaaggcctgattaccgtatccgataatcatcgagtggtgcccactcgtcgtggccggttgctcaatgactcggtaatcgaacagttcttcgattacgtcggtgtatgagtcggtggtatggtgcgcggcagtcgccattacccgttcgctagttgtggttacaccgtcagagggagcttttttgttttaccggcgggggagggaaccgcgtaggactacgtccagggcgctttgcacgtagatcaggcggttggcagtgccgccggtggcctccgcgtcatcgcggttggacaggatgctgtccacggcggcctggcccatttcggccagcggcaggtgcacggtggtcagtggtgggaacacgtcggcggagtaggggatgtcgccgaaaccggtgacgccgatttcctgacccggctcgatgccgttggtgcgcaacgcggtcatcgcaccgatggccatcacgtcgttgagcgcgatgattgaatcgatgcctttgccgtcgtacagtgcgccttcgcccggcttcagcagtccggatcgggccatttgcatgacggccgcatagccgtcggtgcggctgaacttaccgtttgccacggctttcgggtccacggtgatgcctgcctcgtccaacacttccatcacaccggccagtcgttctttggaggagcggtgtgcgtcatcgcccttgagaatcgcagggcgcgtatacccggaatcgacgataagctttgcgatggcacgcgcgccgacgtcgttcgccacgtccacggccgggaagggcaggttgcggttgagtacgaacacggcatgtccgccggacgattcgtactggatgagttccgtctgcaacgcctggcgttccggcgcgtcggtgtattcgctttcggagatgatgatgccgcgcggcctggtggatacggacttacgcaccgcctccaactcctcgtgcggggtggctgccacgccgatggtcacggagatgccgcgttcggccgccgccttgaccacgccttgcgacacggatgcgaagtagggatcggagatatcggagaccagcagcacgatgttcggtgcagtgcctttggccactgcctgagcataggcgttgggacgatagttgagcttggtggctgcttccatcaccttgacatacgattggttgcgtgccttgcgggtgctgccgttgagcacacgggatgcggtggcgatggagacctgggcttctttggcgacgtccatcaatgtcgctggcgattgcgccttatcgttctgtacggccacgatcgaatcggtccttttcttccctgaaacggaaaacatgtctaaacgcttaccgcaatgatatcgcagttttgcttgcaatggtagcattgtggattggaaagcctgaattttgaacaaaaaataatcacgcgaattacggaaagcgattaccgttccgcgtatcgtgcggtatgctcgaagcatgacgcgatacttatgtgcccctgactccttcaaagagagcctgaccgccatggaggcggcccgggcgatggctcaggggattgagaatgccgaccacgatgccgaggtccgttgcctccccatggccgacggcggtgaaggcaccgcacgtgcgcttgtcgacgccactggcggatcgatgcacgccgtgccggtccacgacccgctcggccgacctgtcgaaggccacttcggcctgctcgccgacggcacgaccgccgtggtcgagacagccgaagccagcggcctcgcactgcttgaagccaaaaaacgcaacccgttgattgcctcctcctacggcaccggcgaactcatactcgccgccgtccgttccggagccaagcgcatcatcgtcgggctcggcggcagcgccaccaacgacgccggtgccggacttctgcaggccctcggcgttcgtcttctggacgggaacggcaacgaccttaagcacgggggagcggccctcgctgatctggccaccatcgacatcagcacgatggacccggctctcaagaacgtctccatcaccgccgcctgcgacgtgaccaacccgctgaccggtcccaccggcgccagcgccgtgttcggaccgcagaaaggtgcctcccaggccgacgtcgccacactggacgccgcgttggcgcacttcgcgcaggtcatcgaaagccggctcggcgtcgctgtgaacgacgtgccgggcgcgggcgccgccggcggtatcggcgccgcgctgaaaggcttccttgacgccgaattccgtccgggcatcgccatcgtcatcgaacaatccggacttgatgcggccgcgcaatgggctgacgtggtgttcaccggcgaaggctccatcgacttccagaccaagttcggcaaaaccccggccggcgtggccgaaaccgccaagcgccacggcaagcccgtgatcgccgtcgccggacacatcggcacgggcatcgacgaactgcatgaggtcggcatcgacgcggtattcggcatcgcccccggtgccgccagcctcagcgaactgctggccgacgcggccgccaacgtgacccgcaccaccgaacaagtcgtacgaaccctacaactgaagcagcttcacaagctccctctgatgggccgagccgtgaaggaaacgccggaggcgtttccaggcgagggcttgacgacagtcaacccagccgaaggctccataattgcgggacgagctgccgcggcaaagccgtgactgaggggggagacttgtggcgcagccgcaaaaaatggcatcggctttcagccgatacagtcattcgtctgcttctctccctcagtcagctgcgctgacagctccctcgtcagagggagccacacaattcggaaaggaagatatgcgcaccatgctgtacaccaaggtgaccagcatgctgagcaccacgggcatcgccagcgagaaatacgccttcggaatcggcgccttttcgaagagttcgttatccatttccgtcccttggtgttttcgttcttcagtcactgcgcgggatgccgttcggcgtgcatcacaggcattgcagaggcaacagtgtggacaacgggcggggggagtatctcatgatgcggtgagggcgttgatgatgacgcatcgtgtattggtggccgtgtgcatcgtatgtgaacctgtgctggcacggcgtacacacgatgggaaaagaaagaatatatggaccccgttgtcccggttattgttcagttattactgtgttgaattattgcgttattcaattattgtggtgtgccggccgattgcggcctgcgggggattgccttcgtatgtgtcgtgcaatctcatgaatgggatcgttcgctagattcagcgagcgtccttgttggcggcgttgatgatgtcggcgaacatcttggagtcggcgtagccggcgcgggcgatggcgtccataccggagagggtgaaaccgcgaatcatggaatccatgaatgacataatgtgttccttgtcttgacttgcaaagccgtgggctttgcgatgtgttgttgtttacgttatgagacgggccgtgtgtgagcggcgagtcagggaagaggctcagcgagcgttcttatcggtgtcgttgatgatgtcgagaatcatctgggagttggcgtgaccggactgggccagggaagtggcaccgtacatagccagaccgcgaatcatggaatccttgagagacatcatgtttcctttcgttggtcaaaaccttgtggctttgagttttgtttatcggtttctttctgaaaccggtttcagaataacgcagtccgatgacaaacgcaaggggactattccgctctcggcgtttctggcggaatatcgccgttctatagataccgttcggtagttaagaggctgtctagtcgactttctgacggtcttgttctgggcgcatggttttcacgaaatggcctcatgtcgcggaaatcgtacgctgagtcgtcgtaagcgtacggtcttcacgaaatggggtctcatctcgtgaagaacgtacactgagtcgttctgggcgtacggttttcacgaaatggggcctatcttcaccggattttgggcacaccggccttgagcagcttggtctcaagattgatggggcgtagcagatcctcatagaacacatggacgatttcggtgacgccctgttcccggagatgccgatcacgtctgcggtcgtactccattttcgcctggaggcttgcgcgattcttgttgctggtgtcggcgtatttggccatgccgtcgtattctgccacgatgatgcggccgtctgcgagcttccaacagaaatcgacgcgatatggcattgcgggattgtcgggattcatgaactgcacctgcagcaggggaatgccgaaagacaattcggtgatctggccacgcatcaatgattcgccgccgttttcgctcaggggatccgcgtacttcagcagcttggtcacggagacctcgtcgcagacgctttgaatcatcagcgactgcacctcttcgatggtcgtcagggactttctcagagccgaatcgtatatgggcagcgcctgtgggaatgggaatgccgcgcagtcgagcagcgttcgcgccggagtcgtcaagagaatgccattatgcttccgcgtcggaatccgattgatatagatgcggttgagacgcgcctcgtctccgccgccgatgccggacttcgaggcgatgtgcactgtgccgtcgtgcagggaatagttgtgctgcagtccgtatacgcacgccgcactcaaccccgcaaatacccactgagggtggattgcggacagcgcacgtatgacctgcaatgactgttgctctctggtcatggtgttccaaagtattcggtcggcgtacaggttcttatacggtgacaccagctccccggcatgcaggcgacgtttcagggcgcgccgttgcgcatcactggtgccatagcagcagcgacgctcctgcttcgcctgctgcagcagtgcagaaacttccttgtgttctttcatatctcgacgctaagggtgattttgattgttgcacaagctcaaccggcaaatgtgaatactatgtcacgcgaattgttggtgtggataacttgaatcgacgtcgacggctttgccgacggtcttgtcggaggcgatattagcctaggacaccttgctgcgccgccttccataccgagaacagtcatcagtgacaccgagggcatcttcagcgtatgttcttcacgaaatcagctgccatttcgtgaaaaccgtacgctcagaatgactcagtgtacgttcttcacgagatgaggccccatttcgtgaaaaccgtacgttgacgacgattcagtgtacgttcttcacgaaattagggatgatttcgcggaaaccgtacactcaccgcaactcagcgtacggttttcgcgaagttattgatttggatataggttccccgtcatgaactacaatgaatcgcggcgaaaaacggggaaccgaagtcggagcgcggctgaacggatatgggtgtgactggatgactgccatggtgatgccggttctccttgacgtacgcaataacaacaactgacaacaacaggggagacaaggatggcgagaagtgcgggccgcacccgaccggtgatcaaggacgtggccagactggccggagtctcggcaccgaccgtctcccggtatctcaacggcaccgtcaatgtcaccgaagacaagcgtgaacgcatcgccaaggccatcaaggagctgggctatgagccgagcattgtggcgcgcgccctgtcgaaccgggagatggactccgtggtggtgttcgcggccaatccttccgccttctccacgtccgaaacgaaccatggggtcgaggccgccgcccgtaaacgtcggttcctgctcaatatcgtttctttggatgagtccgacatggactccgtcaaggctcgtgtgcgcatgggtttgtcgatcaggccggcgggcgtgatcgtctacgagtacgaccgggccggcatcgccgcactggaatacattcccaaagatatgccgatggtcgtggtgggtggcagcttcggcgacggcgaataccagatcatcaacgccgaaagggatggtggccgttggatgaccatgcatctgctggatctcggccatcgcaccgtgttccatgtggggcgcccggaaggaccgaccgataacacccgcaccaatgggtggcgtgacgcgctcaaggagcgcggcgtcacggtacctgacccaatcatcgtgcccgacgatgatttggaggagtcggtcaaggctgggcgcaccttgggccgtcgtggtgatgtgactgcgattttcgccgacaacgacgagaccgccatcgctgtgatccgaggtctaagggaggttggtcgccgcgtgcctgctgacgtgagcgtcgtaggctttgacgaccgcaacttcggtgccatgtggaatccggcgctgaccagttacacccagaacttcctggacatgggggagcggtccttccggatgctgttcgaacagattcaggccaagcgtgccggcgatgacgcgccgccctcgcaggtcgaagtggtgcaaggcaagccgtgtctgcgtgcctccgaacgcgcgtacggcgacggcgaaatcgcgtagtcgatggggcgtgcgtatcaatcgatagtgactgtagcgcattcatatcgtgacgaggagtctcccatgccgaactgtaagcgcttaccttaaatagttcgtaatgtgatttacgtcatactaatagatgttctaaatcatagtgttatgcaaggattccttgtggaaaatggctatttatcaacagttttcgaaaagtccgcatgatgggcgactgtgagcacgctttatggtaatcgctttccgtagtgttattgttacagtgtgacttttgaacaatcggtaactctgaagactcagccccagacctcgggcactatctcagcggcagacgccgcgatgcaatcggcccgcgacgaacgcatccccggcaaactcatctgcgcgatcgtggccgtcggctcactctcattcttcggcatcctgaccgaaaccgtgatgaatgtgctgttcccgcagctgatgggcgtgctccacatcagcgaggccaccatccaatggctcaccaccggctatctgctggtcgtgtcgattactgtgccgctcagcgcatggctgcgccgtcgcttccgccagcgcagcatcttcctggcggcaacgcgatgttctccacgctgcagcagttcacgggtgcggccggcaccactgtggtgggctaccgtgatctccgtgttccagtccggctcgggcaaggtgggttccgccggctatgccgccgccaccgtgaccggcgcatagattgactacgcgatcatggctgtggtcatcgttatcgttatcgtgttcgtcgccatgctccacgccctgcgtaaccggaagtagatggtaagtcgagtggcaccatgctaccgcgcaatggctgggcatggagttttggctaggaatcgttcgacaggcgttggcgcggccgctgagagcattcgcgtcgaaaggtttgccggagctcgttcggcgtggaatgggccgattcaccggtgattgttggtcaaacagccaatgctgacccttctgccaatggttagcgaggttcctatcataagcatttcggagagcgatctcgaaaaaggcgacatccttcacgaggatttgaccaaggtcaacattccactcgtataaagtaaggctgtaagcgcatcttggtggcaagcgtcaaggtatgtacggaatcgcggggcggaaagccactcctcaatccactgcggattggtaataacggatgattgtaacgcatgaatcacgaggcccccttacctcgtattgcaatgccccggtgacatgaaaaacggcggtcaacacggggcttgtacattaaggatacaggaagggtagttataagttgctgatatgccgtgttttttacgatagtcatcggcctctcccatacggcggaacaggaactgacggatgccgagatgccgtgattcggcgggaggacctgtactggcccagtccttctgctcggtagcggtaccgctacgccgactcttcccgacgctccagtgccgccgatatcagtgaatgcccagcctgatgttggtagagttaaggctattggcttggtctcgacggtgagacttctccaatggccaatatgcactgttgcaaaggagtatgcggtatgcaaccaatcaaagccattcaatacggctgcggcaaaatggcgaagtacacgattcgctatatgcacgagaaaggcattcaaatcgtcggtgccatcgacgtgaatccggaagtcgtgggcatggatgccggtgtgtttgcaggcatcggccccatcaatgtgccgattcgcgccgatgccgaggctgtactcaacgagtgcgacgcggatatcgcggtagtcacgctattcagcttcgagaacgaaatcgccaccatgtgcgagcagtgcttggcccgcggcgtcagcgtgatcaccacctgcgaggaatgcatctacccgtggaccaccgatccggccaccacgaaccgtctcgacatcatcgccaaggaagccggtgccaccatggtcggctccggcatgcaggacatctactgggtgaacatggtctccaccgtcgccgccggatgccacagcatcaagaagatcaccggtgcggtgagctacaacgtcgaggattacggcctggctttggccaaagcgcacggctgcggtctgaccgccgaggagttcgaggccgagcttgcgcatcccgaaaccgtggtgccctcgtatgtatggaattccaatgaagcgctggcccagaagcttgggcttaccatcgcatcgcagacccaggccagtgtgccgtatttcagcgatgtcgacgtgtattccgagacgatggacgagacgattccggtcggcaaatgcatcggcatgtccgccgtggtaaccaccgaaacgaatcagggcatcacgttggaaactgcctgtatcggcaaggtgtacgggccggatgatggcgatatgtgcgattggaagatcgagggtgaaccggacgtggagttccacgtggtcaagccggcgaccgtcgaacatacgtgcgccacaatcgtcaaccgcattccggacgtgctcaacgcgccagccggatatgtgacggtcgatcagctcgatgaaatttcatatctcacgtatcccgccgcgctgtacgtggcatagacccatattttcagggatgaaggccggcactcataagggtgccggccggtatcaggcggccagagtcgacgtgcgtggcatcacctggaactggatatggtcatgggtgatgtcatcgggccgttcatgccgtaggttcgactcgatcagcgtcaccatgcgatcgataaccgtacgagccattgcggggacgtctatcgccacagtgctaatgggtgggttggcgcagtcggagaaggggatgccgtcgaatcccatgagccgtacgtcgtcgggcacgcggatgccatgttcggtgagttcgcggagcgcgccgatcgctatggtgtcagacatgcacaggatgccacaatcgcccgggacaggcgtcaggaccgcaagcagcatcctgctcggcatcggcggcgacatcgccaacttcaaaagcgcggcccacctggccgcccacgccggcatcgctccggtcaccggccagtccggcaccagcatcaagaggcgagaaaccctccagacggggcaacaaacgcttatagactattgcgccttgtataaatgcgaactgccagtcaaccttaccgttgactggcagttcgcatttatcgctcccgctggcgggagctgtcatgcgaagcatgactgagggtggtccacagccgccaatccgtaacatcacccaacgcagcatttcacgatacggacgtttccgtatcgtattttcgtgtggtcaaatagacatttcgggcgaaaaagttcgaaatacccccataactggccataaaaacaattgcttgagaatcactattgacttttatggcgactcggtatatggacacgcgaaacgaaaatgacatggagcaacggtactgtgtcaacagcaatgaacgaagaggcacgattcccttacgtgcccacaagcaattgaggtgattccggtgacattcaaagccccgctcgatctcacggtccacgctccggacggtatgtatgatcccgccaacgagcatgacgcctgtggtgtgggtatggtcaccactttgaacaagcgtcctgaacgcaaaatcgtcactgacgccattgaggtactggtcaatctcgaccaccgcggtgccgtgggtgccgaggagaacacaggtgacggcgccggcattctgatgagcatgccggatgagttcatgcgtgccaccgtgcccgccgaactgcccgaagccggccactacgccgcaggcatcgccttcctcgaccgcgacatcgaaacctccggtcagcaggaacaggccattgccaagatcgtgcgcgaggagggccttgaagttctcgcatggcgcgtggtgcccaccaacccggacggcctcggcctgcaggcccttgccgccatgccgggattcaagactctcgtggtcgcctctccggacggtgctctggccggcgtggacttggatcgcaagaccttccgcatccgcaagcgcgtcgagcatgaggtaggcgtctacttcgcttccctgtccgcccgtaccatcacgtacaagggcatgctcaccaccatgcagctcacccacttcttcgaggatctgaacgacgagcgcatgaaggccaccatcgccatcgtccactcccgcttctccaccaacac

SEQ ID NO: 323 - DNA, 15471 bp, Unknown
  R42_10m  MAG No. k141_6020
cttcgcttccctgtccgcccgtaccatcacgtacaagggcatgctcaccaccatgcagctcacccacttcttcgaggatctgaacgacgagcgcatgaaggccaccatcgccatcgtccactcccgcttctccaccaacaccttcccgagctggccgctggcccagccgttccgtctgctggcccacaatggcgagatcaacaccattcagggcaaccgcaactggctctccgcccgtgaaggtcgtctgagcagcgaactgctcggcgagttcgagccgctgctgcccatcaccactccgggctactccgattctggcaccttcgacgagtgcctcgaactactgcacctcgccggccgttccctgccgcacgccatctgcatgatgctgccgccggcttgggagaagaacccggatctcgatccggacgtgcgcgccttctacgagtacaacaacacgcttatcgagccgtgggatggcccggccgacatcgtcttcaccgacggcacccaggtcggcgccctgctcgaccgcaacggcttccgccccggccgctggcagctcaccgacgacggctacatcgtgctggcctccgaggccggcgttctgccggagatcgcgcaggagcacatcgtgtccaagggccgtcttgagcccggcaagatgttccttgtcgacaccgccgaaggccgcatcatccccgatgaagagatcaagaagaccctcgcctcccagcacccgtaccgcaagtgggtggaaggcaactcggtcgagatgagcgatctgccccgccgcgagcacgtgagccactccggacagtccgtccagcgccgtcagcgtgccttcggctacaccgaagaggatctgaagctgttgctcactccgatggccaacaccggtaaggaaccgctgggatccatgggtaacgatgcgcctatgcccgcactctccagccgcagccgcatgctgttcgactacttcacccagaagttcgcgcaggtcaccaacccgccgttggactgggagcgtgaggagatcgtcacctcgctcgaatccgccatcggccccgagccgaacctgctggccgattccgagctgcacgccaagaagatcctcatcccgctgcccgtggtcaactctgatgagatggcccagctcaagcgccttgacaaggcccgcatcctcggcggctactatcgcccgtacgtggtcaagggcctctaccaggtcgccggcggcggcaaggccctcgaagagcgacttgacgagatctttgccgaaatcgacgaggccatcgccgacggcaagaacttcatcgtgctctccgaccgtgaatccaaccacacgtggggcccgatcccgtccctgctgctgacctccgccgtgcagcaccacctgctgcgccgccacacccgtacgcagatctccatggccgtcgaggccggcgacgtgcgcgagattcaccacgtcgcactgctgatcgcttatggtgccgcctgcgtgaacccgtacctggccttcgaatccgttgaggatttggcccgtaacggctacctcaaggtcgacgcggacaccgccgtgaagaacctcaccaaggcgctttccaccggtgtgctcaagatcatgtccaagatgggcgtctccaccatcatgagctaccgtggcgcacagctgttcgaggctgtgggcctgagccaggaagtcatcgacgaatacttcaccggcaccacctcccgtgtgggtggcgtgggccttgacgagatcgccgaagaagtggccatccgtcaccgcgtggcctacccgaaccagtggagcgcatccccgcaccgcaacctgcgcacgggcggcgactacaagtggcgtcgtaccggcgaggaccacctcaacgatcccgaggccatcttcctgctccagcagtcgacccaccgtggcgactaccagatgttcaagaagtattcgcaccacatcaacgacacgtcgaaccgactcatgaccctgcgtggcctgatgaagttcaacaacaaccgcaagccaatcgacatctccgaagtcgagccggcctctgagatcgtcaagcgcttctccaccggtgccatgagctacggttccatctcgcaggaagcgcacgagacgcttgccatcgccatgaattcgattggcgcacgctccaactccggtgagggcggcgaatccgacgatcgtatcaacgacccgcagcgctacagccgcatcaagcagatcgcgtccgctcgcttcggcgtgacctccgattacctcgtgcacgccaccgacctgcagatcaagctcgcccagggcgccaagcccggtgagggtggccacctgcccggtgccaaggtcccgccgtggatcgccaaggtccgtcacgccaccccgggcgtggagcttatctccccgccgccgcaccacgacatctactccatcgaggatctgaagcagctgatcaacgatgcgaagatggccaacccgaaggcacgtatccacgtcaagctcgtttccgagttcggcgtcggcaccatcgcggccggtgtggccaagtgccatgccgacgtggtgcttatctccggctatgacggcggtacgggtgcagccccgctcaacgccatcaagcacgccggcaccccgtgggagatcggcctgtccgaaacccagcagacgctgatcctgaacggcctgcgctcccgcatcgtcgtacagtgcgacggcgagctcaagaccggtcgtgacgtggtcatcgccgccctgcttggtgccgaggaattcggcttcgctactgcggccctgatcgtggaaggctgcgtcatgatgcgcgcctgccagaagaacacctgcccacagggcattgccacccaggatcctgagctgcgcgcccgctttaagggcaagcccgagtacgtggtcaacttcttcatgttcatcgctgaggaggtgcgcgagatcctcgcccagctcggcttcaggactcttgaggaggccatcggccacgttgagtgcctggaccagaacgaggccatcaaacgctggaagtccggcggcatcgacctgtccaacgtcctcaagcaggccggcccggtacccggcacgattctgcaccagaccaccgagcagaaccacgagctggagaaggcgctggacaacaatctcatcgaacttgcccagccggccctcgaacacaaggaacccgtgcgcatcgaaatgccgattcgcaacgtcaaccgtacggtcggcaccatggtcggctacgagatcacccgccgttacggcgaggaaggtctgccggacgacaccatcgacatgaccctgcacggttccggaggccagtccatcggcgcgttcatcccgcgcggcgagaccatgcgcatctacggcgaagtcaacgactacgccggcaagggcctgtccggcggtcgcatgatcgtgcgcccggaagacaacgtcaccttcgacaagcacagtaacgtcatcgccggcaatgtcaccggtttcggcgccacttccggccagatgttcgtagccggtcgcgccggcgaacgtttcggcgttcgtaacggcggtgccacgttcgtggtcgaaggcgtgggcgaccacggttgcgagtacatgaccggcggcactgttgtggtgctcggccccaccggacgcaatttcggtgcaggcttctccggtggtaacacttatgtgcttgacctcgatatgaagaaggtcaacccgagtgccatcaagtccggtgcactgctcttcaagtcgcttgatgccgaaacctccaagctggtgtacgcactggtcaagcagcatgtcgaagagaccggttcccagttcgccgcggccctgctggaggactggaacgaaaccgtcaagcggttcacgcacgtagtgccgaagcagttcgtggccatgacgaaggccatggaagaagccaaggccaacaatgtagatttcaatgcgcccggcgcctgggaaaaggtgtacgagcaggttatggaaggagcgcgctgacatgggcgacccgagaggattcctgaaggtccgtacccgccgagagttggctgaacgccccgttgaggagcgtatcaaggactggttcgacgttcacgccgaaaccggcctgcaaccgtggacccaaacgcaggcggcccgctgcatggattgtggcaccccgttctgcatgaccggatgcccgctgggtaacctgattcccgagtggaacgacttggtccgtcagggcaagtgggaagacgcctacaaccgtctgtccatgaccaacaacttccccgaagtcaccggccgcatctgcccggccctgtgcgagcaggcctgcgtgctcggcatccaccagccgccgaccatgatcaagcttgacgagcagaccatcatcgaccaggcatgggatttggactacgtcaagccgctgccgccgcagcgtctgaccgaccagacggtcgccgtcgtcggctctggccctgccggcctcgccgccgcacagcagctcacccgcgccggccacaccgtcgtcgtctacgagaaggacgacgccatcggtggtctgatgcgttacggcatcccgaacttcaagcttgagaagggtctgcttgaccgccgtgtcaagcagatggaggccgaaggcacccgcttccgcaccaacgtggaaatcggcaaggacatcacgtgggatgacctgcgtgaccgttacgacgccgtcgtagtggccatcggctcccgcgtgccgcgcgatatgaagattccgggccgcgagctcgacggcatccacttcgccctcgacttcctgcccgacgccacgcgccgtatcttcggcgtcaagccggtgcacgacatcaccgccaaggacaagcacgtcatcgtcatcggcggtggcgacaccggttccgactgcctcggcacctcgatccgtcagggtgcgaaggacgtcaccgtgctacagatcatgccgaaagagccgtcaagccgtccggacaacagcccgtggccgaccttcgcccgcacctaccagaagacctcctccatggaagagggcggcgagtacatctactccaccgactccgtgaacttcgagggcaccgaagaggagaaggccaaggtcaccattgataactcgaccaccgccgaaggcttcgtggccgatgagcgtggtcatgtcaccggcttgaaggtcgtctccgtggctcccggcgaaaatggtccgttcactcgccagcctggcactgagcgcgtgctgcccgccgatctggtcctcatctccgtgggcttcctgcatccggacaccgagaccatcctcgaccagctgcccgtcgaactcgacaaacgtggcaacatcgctcgcaatgacaagttcgccacctcccaggatggcgtgttcgtgtgcggcgatgccggccgtggccagagcctcgtggtctgggccatcgccgaaggccgctcctgcgccgcagccgtggacgagtacctctccaaggaaaagagcgagctgccggccccgatcaaggccagccagcgtccgatgatgctgcctcgctgaatactttccaaacagaaacatgaaaatcccttcttcatgaggggatttttgcgtttctgggattaattactgccttgagtcttcagtaatgtttatatttcgagaatattgcatacatggttaacatgaagctcctatggtgtctttcgtcgccaaaaagacgacgccagaatatttgggagagattcatgaacacacgtcatgtcacttcactggtcgcggccggtgcggcaatcgtcatgctgctcagcggctgcggatcgaccggtacctccaattccagcaatgcttcagattccaatatcatttccgtgtacggcagtgagccggcacacccactattccccggcaacaccactgaggccggtggcggcaaggttgtagaccagctgttcgcaggtctggtgacctacgatgcgaagggcggcatccacaacgaggtagcagacagcatcacctccagcgacaacgccacgcattacgtcatcaagctcaagagcggatggaagttcaccgacggcactccggtgaccgcgcactccttcgtaaacgcatggaattacaccgccaacagtgccaacaagcaggccagcgccagcttcttcagcacaatcgaaggctatgatgatctgcaaaagccggacgtggaccccaaggccacgctgagcggcctgaccgtcgttgacgacaacaccatcgatgtcaagctcagccagcccgactcggcattcccggtcaaggccggcagccacgcctacatgccgttgcccgaatccgcgttcaaggacccgaagaagttcggtcagcacccagtgagcaacggcccatacaagttcgtgtcctggcagcacaaccacagcatcgaaatggtgaagaaccctgactacaagggcaatcgtgtcgccaagaacgatggcctgaacttcaagatctatacctcgcccgattcggcatacgccgacctacgcggtggcaacctggacttcacgaacacgattcctgacaccgcacttacctccttccaatccgacaagtcgctgaaggcatacaacgagcccggtggcaatacgctcaccttcaccattcctgaatggctggaacacttcggccagaacgaggaaggcaacctgcgtcgtcaggccatttccatgtccatcgaccgcaagaccgtcgccgagaagatcttccacggcaccgccacgcccgccgtcgacttccttgcagccccaatcagcgcctactccaaggaactcaagggaaatgaagtactgaagtacaacccgtccaaggccaaggaactgtgggccaaggccaacgccatctccccgtggagcggtgagttcggcattgcatacaatgctgatggcactgcgaagaactgggttgaggcaatctgcaactacatcaagaacacgctggatatcgatgccaagagcatcccgatgtccacttccgacgaattcctgtccaatgtggattcaggcaagatgacctccgcataccgcagcggttggggccctgattatccatccgcggacaactatctggtacagctgtacgattccagttcggccgacggcaagggcggcaacagcggcaactacaagaaacccgagttcgatgccatgatggacaaggctctttccgccccgtccaccgaggaagccgacaagtattatcagcaaggtgaggagattctgctgcaggaccttccggctatcccgttgtggaaccagaatgccaccgcagccagcacctccgcagtctccggcgtcgcattcgactacggcggcggcccagtgttcaccgcactgaccaagaagcagtaagcagtaagtaataaacagacagcgctagccccccgctggcgggggctgtcggcaaagccgactgggggtggtctcaaacagcagaccacccctatcttgttatatgagcgagctcccgtaagcgggagcaatcgagaacatacaggagcacattaactatggaattcaccgtatccggcactaccgtgcgattcgatgaacgaacaatgcagttcgcttttacgcgcgacggtgccgaatggaatacctgcgctgatttcaagccgaccctgcaatgcgcgcaaggcaccttcgcgttcgcggatgccacttccatcacccatgagcagcgtgaaaccggcacgggaaccggcattcgcagcatcttcaccggctttgggcacagcgcatactcctttgaaacctatgtatgggtggagcgtgcctcaggcgatgtgctcttcgaatggattccgctcaatgagcaaggcctgaacatcaccaatgtgacgtggcccgcagccatggacttcgattgcgccgacgaccatgacacgacactcatcacccatgagcaaggtgtgatgatccccaacacatggcctaccgccgtgagcaccaaagacatcgccttcgacggtcgcttcgaaacggctggcggttacatgccgtggttcgcgcagctccgcgcagacggacacgggtatatcgccatctgcgaaactccatggaatgccggttacggcatcgaccatcccagcgatggcccgtacacccatatcaatacttggtttgagccaagcctcggcacaatgaattatcgccgcgtggtacgctaccagttcctcgaccacgccgatcacacggcggtgtgcaaggcctatcgttcgtacgtcaacgaacgaggtcgcctgcgtacgctcgccgaaaaggcggcgcgcaatccctccgtgcgtgacctgattggtcgttcatgggtgcacatcggcatcaaaaccaaagtacagcccgactcgtactactacgataaggaccaccccgagaaaaacgattcattggtcaccttcgcacagcgcgaaaagcaaatgcgaacattgcacagcatgggtgcaggccgactgtacatgcacttggatggttgggcacagcccggatacgacaacgcacaccccgactatctgccggcttgtcaggaggcaggcggctgggaaggcatgaagtcgctggtcgacgcctgccatgagcaaggcgatattttcggcacgcatgaccagtaccgcgattactacttcaccgcgcaaacctttgatgccaacaatgcgattcggctggcagacggtacgatgcccgaacacgcacgctgggcgggcggccaccagacctacctgtgcgccgagctcgcaccggactacgtacgccgcaatttcgccgaaatcgccgcacacggcatcaaactcgactgtgcatacttggatgtcttcacctgcaacgaaggcgacgaatgctcgaaccccgaacaccgcatgacccgccgcgaatgctttgaccgccgcgccgaatgcttcgaatatctgctctcgcacggcatcctctcctcgtccgaagaggtatcggactgggcagtgccaagcctgatattctgccattacgcgccatacgacttccagatgcgctcacccaacgagccgcgccaaggtgtgccggtgccgctgtataacctcgtctaccatgattgcgttatcgagccgtggatgatggagcgtgtggtggacggcgacgattacatgctgtacgccttgctcaacggcggagctccatacctgattcgcgatgccgcatacatcggcgttgacggcgacatggacgacgaacagcgcgctcgcacggaaaacgacatcgaacgctgccatacggtcgctgcattccatgagcgggtcggcatgcaggaactggttcgtcacgagttcgtggatgatgatccgctggtgcagcgttcggtattcgcggacggcactgcggtcacttgcgacttccatacgcaaacctatcgcatcaccgattgaccgcatcactgactgaaaaaacaatgacacacagtgggttccgatggactggtggcaaattaccgccgataagcgggtaatatagccaacagtgtcaccgtcgaaacaggagtagtgaaatgccgaatcgtgcagaacgccgtgcccaagccaaagcaggccgcaggggagtgccgtcgcagtatgaccagacccgtggccgtggccgttcgggaatgattgacgaataccagctgcagcagaagtcccagcgtctgcaggacggcaccgacggcaccgaatggaagcccagcggcggtacgattgcggacaccgaaaccctgctgaccactaacccgaactacacgaatccgaagatgttcaaggcaccgcattcgctgcgtcagtggttccgcgtgggcagctggacgctgatcgccatcgcgattatcgcgttcttcgtggttatgtggctgccaagccatccgatgtggctgatcatcaccgtctcctcggtgttcattgtgggtgtactgagcctgttctttacggctggcgattccaagcacaatccgaatttggatcagaacggcacggccgtctgatcttttgtccggtaaatccggcttgaaaagcaaaacgcacgacggaagttgtgcgttttcttgtatgcggtgccctaaagtaagaagtgcttgagtttctttctgacgcacgaaggagaggcagtccgatgaaagttgatattctaacccgcgaatacccgccgcacgtgtatggcggtgccggcgtacacgccgaggaactgtccaaggttttggccgagcgcattgacgtgaccgtgcgtgcgtttgatggcaagcgcaccgaggcggacattcctgctatcccgaatgctgccgatgctaagggcagcttgaaggtcgtcggctatgacacgccttctgagctggctgatgccaaccccgcattgaagaccttcggcgttgatttgcagatcgccaatgatgtggacgccgacatcatccacgcgcacacctggtacgcctgcctggccggctacctggccaagatgctgcacggtacgccgctggtcatcaccgcccactccttggaaccgttccgcccatggaagcgcgaacagctcggcggcggctacaacctgagctcctggggcgaaaaggaagcctacgagaacgccgaccgtgtgatcgccgtttccggtggcatgcgcaaggatattctgactgcttacccgaacctcgatccgaacaaggtggttgtggtgtacaacggcatcaccatggccgacttcgccaccccggcccctgacgacccgggctggaaggtgttcgatcgttacaacatcgaccgttcgaagcccaccctgctgttcgtgggccgtatcacccgccagaagggcctgccatacctgctcaaggcactgcacctgatttccaaggacattcaggtggtgctgtgcgccggtgctcctgacaccccggaaatcgccgaagaggtcaagatcgcgttcgccaagctggatgaggaacgcggcaacatcgtctggattgaagaaatgctgccgaagcctgagctgaatgctttggaacacggctgtgatgccttcatctgcccgagcatctacgagccgctgggcatcgtgaaccttgaggccatggcctgcggtctgccggtcgtcgcatccgccactggcggcattccggaagtcgtggtcgacggcgaaaccggctatctggtcccgatcgaccagctgcacgacggcaccggcacccccaccgatccggacaagtttgtgcacgacatggccgccgccatcgacaagatcatggctgaccccgaactcgccaagaagatgggtcaggccggctacgaacgcgcccgcgacgtgttcagctgggagaccatcgccgacaagaccgtggaagtctaccagtccgtgctcgacgagcagaagaagtaagtagcgctgcaacgagtgctcccctcagtccggcgcaggtgactgaggggagttctcagaccgcgaatcataggtagtatttcactcatgacaaacaccgtcctccaactcgacaacgtcgaattccggcgtaaccgtcgcgtcattatcaccgacgtgaacctcaccatcaacgcgggggagcgttgggtgctgttcggcccgaacggcatcggcaaatccactgcggtcggcatgttggccacccgtaccttcccttcggaaggccgcgtgtttattctcggtcaccagcttggcaaatacgacgtattcaagctgcgtacccgcatcggccttgcctcagctgacttgggccgacaatttcccgagttcgaggacccgctggacgccgtggtcaccggcctgtccgccgtgaccgggcgctggtgcgacacctatacgcaagaggaatacgcccgcgcccgccagctgctgcgcgattttcgcgtctcctatctggaaggcaaggagatgtggcgactgtccgagggcgagcgcacccgcgtattgatcgcccgtgcgctgatgggagatcccgagctgctcatcatggatgaaccgaccaccggccttgacctgggcggccgcgagcaggtgatgcgcacattgagccgaatcggcgaagagaactccgagcgtgccgtggtgctggtcacccatcgcttggaggagattccggccggtttcgaccacatcgccatcatgggacgcaagccgattcccgccgaggacgccaccgaagcgggcgtggattcaatgggtaatcccggtgctggcaccattgtctacaccggttcgttggagaatggcctgaccgacgaacgcttgtcggaattgttcggtatgcccatcgaagtccagcacacccacggtcgctgggccgcctacgccgtgtgatgcttgtaggtttttaggcgggattttcttcgccccctctggagggggctgtcagcgtaagctgactgggggaggtccaaccagttacgaaggcaaccatgacaaccaatagcaaactcgtattcatcgatatcgacggcaccctagccgacgaaaaccacgtcgtacccgaatctgccagaatcgcttgcaaacaagcccaggccaacggccacaagctcttcatctgcaccgggcgttccgtgccgaaaatcgaacgcagcatcctcgacctcggtttcgatggcgtggtttccgtggcgggcgctcaggcgaatatcggagacaagctgctgttccagcatctcgtccctcctgaagcggtcgatgcggcgatggcgtattttgccaagcatcatatcgagagctaccaatggcaaggtgcggacggcatgtacatctcggaaggctaccgtcaacatctggaatcgaaaggcaagacctggaatcgtggcgaattcgcgcgattctggcacctgttggatgaggtggaggtgccgactggctcgactttgggacagacgattcgtgtgagcaaggggtcatacttcacctcgccgaatcctgacgtgactttcgaggagactcaacgtgatttgagcccatggtttgagctcgtgcatggttcgtatgacaatatttccccgaacaatggcgaactactcatcaacggcatcgacaaaggtaccgctgtgcgcgacgtggcttctttgctgggctatgccattgccgacaccatcaccatcggagactccgacaacgacactgccatgctcaaagccgccggcacatcggtagccatgggcaacgccatccacggcatccaagccttctgtgacttcaccaccaccgatattcacgaggacggcctggccaacgccttcaagacgttgggactggtgtgaggctatgtcgtttgctctcagacgaaggatcctttcgtgctgtagtagtgagaaataagttgaatatatactgaacggggaaggagggaacgatcttatgccgacgataatgaaagaacagatggaagtcagcattcgtgtcactcctcagcgggcttttgatttcatcaagcagcaggtagacaccaatggaggctttgatgaggatactcgaccagtgcgggtgcatggttcagcttatttgaagcaacttctggagagctgatgagctccgccgtatgtgtcattttcgactgcaatatttatatcgatgtggcacaatgtatgctgcgccgagcatagagaattgcgaattcaaaatggtttgttcatcatgcgaagatagtggtcatctgtccgtcgcggttgcgcaatttacggtggcggaggaaccggaacggaatctggagatcatcgacggattcgcgcgtgatgcggcggcgggcgatagggaagctgatctcattactgctgagctgagtcgtgagtgtcttgattccgcgcgtcgaacattgccggtgttgcagaatcgccgttttgccgatccgcagttgtgtgactgacctctgaataactttactggcgctgttgataagggttctatgatgggaatcatgaccactactgttgatagctctgattcaatgccggaacgtctgcaagaggggagcgcggcgcccgatttcactctgccggcggttatacctgggtttacagagagcggatcaatcaacctgtctgacgtgcttgatgccggccgcagggttgtactgtatttctacccggccgcgatgacgcccggttgcaccaccgaggcttgcgatttccgcgacaatctcgcccgattggcgtcgaaaaacgttacggtgcttggcgtctccaaggactcgcttgacaagctgcgcaagtttgcacagcgtgatcatctcacgttcccgctgctgtctgatcccgacctgaccgtgcacaagctgtacggcgcatacggcgaaaagaagctctacggcaaggtgcacgtaggcgtgatccgctcgacgctcgtcatcaatcccgatggctccgtggcgattgcgcgctacaacgtgcgtgccaaagggcatgtcgaatcgctgctgaaggcgctggacaagctggagaagccggagaagtagtgcgttctcgttgttcggacacggtggttcgtgcatagcagctccgcgcggtatgtgccatatgaaccactgccgtatgaaccaccggttgacttctcggactcaccggcaaatagtgagaccgtgggcgcgcagtacgtctatggctggcatgtaatcgagcgatgttgcggtgggattgagcatcagttcgcggagggcggcggatgctgaggactcgcttgtctgcgaggattctgcggccgggaagagagcgtcggcgattagggagatgatacgggaacgtgcatcgccggcattggcattgttgctgctgttgccggcgtcggtagtggcggagttgccaatagtagcggagctgttttgtagagtcgtatccaacgctgtgacaagcggctccaggttattctttgtcgcctcggcaatgtcatcgagctgatcgaataaggcgaacagccatgcacgacttcgctcctcatcgttgccggtcgcaagcctttcattggtgacgcgcacgagttcgtcaatcggtactgctggcgtctttgccggatcgcgatgctcacggttgtcttcgatatcgcccataagatgctggatttcgcactcgtcctgcaatacggtggtctcggcaaatgcggtggcggtggcgtccgcgtcgatgaactttcctccctcggactggaaacgcacgcgcttgggctcactgtaataatgcgacatgccgaatgtgatgtactgaggcatctcatcctgcaattgcttgaccgcttcggccaccttgcgcatgtccgcaagctgctgatgcaccacaataaaggcaagcactgctttggcgtcggcgagagtgagcggctgaccgatgctggctccatgatggtgctcatgatgcgcgaacatgttcttcagcgaatcaaacaatcccataatgtcctccttcggactggggcacaatcggctacatctgccgcttactgtagtcctgaatatgtgggaatggtccatggaacgccga

SEQ ID NO: 324 - DNA, 22412 bp, Unknown
  R42_10m  MAG No. k141_6194
caccgggtcggtggcgtcgcgcaacgcgtcgccgaacaggttcagcgcgaccaccaccagggtgacgatcagaccgggccacaccaccgtcaacggaaacacgttgatgagtttgaccgaggtggccagcgaatggccccagctcggcacccccgcgccgacgcccacgcccagataggtcaggcccgcctcggccagcaccgaggtgcccgccgacatcgacgattgcaccatcagcaccggcgtgatgttcggcacgatgtgtctgaccagtacgccgaacccgctggcgccgttcgcccgggccgactgcacgtatcccgagcgggcggcgagcagggcggccggacgggcgacgcgcgccagatgcagcccgtagccgatggagcacgcgccgatcaccacggccgcggatgcgccgaacggcacggcgagcagcagggcgatgagcacggtggggatggagatcagcgcgtcgaccacggcgaccgacgccgaagcgagcgccgaagaacgggcgaccatcagcccgaccagtaggatgccgatggcagccgagcagacaacggtcagcagggcgatggcaaggttcgtacgcgatccggccatcagccagctcagcacgtccgcgccggtgccgtcggtgcccagccaatgcgcggacgacggcttgtcccacacgtggtagccgtcggtggccagcagcgactgcggggtccagaacaacgacaccagggcgacgaccatccacaaccccagcacgatcagcgagtagcggccggtgccacgggaccagatggtgcccagaaccacgcccgaacgacgccatcgaccattgcgatcaaccatcattcctcctttccggcggccagacgcgggtcaagcagcgcgtgcagcagatccaccgccaggccgatcagcaggaagaacgcggcgagcaggaacagctcgctttgcacggccaccagatcgcggttgccgacatcgcccaccagcagggcgcccagaccgggcagggcgaacaggttctccaccaccatcacgccggtgatcatcgaggcgaacgccagtcccaccaccgagacgagctgcggagccgccaatcgcaatcccacgcgcaccaacgcctgggtgcgggtcatgccgcaggacatggccatatcgatcggacctccctcatcggcgatgccttccagaatggagcgcgtgtaacgcatgatgcccgcaccggacacgaatccggtggcaagcgccggcaggatcagggacgagaccgcccgcccgggagcgccccacccagcggcggggaacccctgcgagggcagcagaccgacaaggcccacgccccgtgcgaacaggaggatgagcagcaggccgctccacagggccggcacggcgccgcccacgatggacagcacgcgcaggaaaccgcgcacggccggcgaccgggagatcacggcggcggcgcccatggacaagccgagggtgagcgcgatggccaggctcatcacgatcagcgggaacgtgatcgtcgcacgttggccgacctgggaggtcaccgcccgcccggtcagcgccgacacgccgaggtcgccgtgcaacagccctccggcccagtcgagatactgcacgacatacggccgatcaaggccgaattcggcgcgcagggccgccacacgcgccggcgatgcgttcatgccggccatcacgaccgccacgtcgcccggcaggatgcgcagcatcgcgaacaccagcaccgaaatgccgaacagcgccgccgcgaacagcagcaagcgttgcatcaagaaccgcataacgcctcccttatcgattccctcgccaccgcccgtggcgtcaccggccggatgggccgtccacggtcgggcgcgcagcggaatcgctcccgcgccgcgcccgagcgatgggttccgggactacttggtgtaggtgatccgccagaggggcagcacggtctggctcaggttctgcgggaagccgtccacgcccttggcgtaggcgatggtgaccttccagctgaacagccagtcggccggcgcgtcctcggagacgatcttcgcggccttggccagatacttcgaggcctcgtcatcggaggtggcctccagcgccttggcgtacagggcctgcacgtccttgttgtcgtagtggaagtagtagctcggcgtggtccatccgtagaagtcgtggctttcggcatggtccacgagcgaaagatcgtagttgccgttggcgtgcacgtcctgcagccaagtggagaactccacgtagttgatcttcaggtcgatgccgatgggcttgagctggctcttgagctggtcgccgagctcggtgccgtacacgttggcgtaggtgagggtcaggtccagcggcttcgactcggagtatccggcctgctccatgagcttcttggccttggccacgtcatgcgggtacaggccgctcagatcctcgtaaccgggatcgaccttggggatcggaccgccgaggggggcgtccacgccgccgcgcgaggcgatgatctgcttatggtcgatggcgtatcggatggcctggcggacgcgcttgtcggagagcttgtcgttggccatgttgaaggcgagcacgaacttgtcggaaccatcaccggacttgaccacatagttcggatccttgcggaacggatcggcaagggtggcggagatgggcgaaagcacctgcacgtcgccgctcttgagggcgttgatgctggcgttctcgtccggcaggaaccggacgatcacgttctcggtcctcgccttgtgctcggtgccccaatacttggggttcgccttgagcacgatcttgtcgttcgggtcgaaggagaccacggtgtacggacccgagcccaacgcgccgttcttctgatcccaggtggcgtccttgtcgtagaccaggccgggacggctggtgaggtaccacagcatgttcgagttgggcgcggagagggtgagcctgaccgtgttggcgtccacggcctcggccttgtccaggctcttgacctgctcgtagtcgtagtacttctgggccttgagctcgttgatggaccacgccacgtcctcggcgtcgagcttgtcgccgttggagaagttcatcttctcgttgaggtggaacgtgtaggtcaggccatccttggagatctcccagctcttggccagaccggggtggaccttgttgtccgagccgcgcgagacgaggccctcgtacacgttgccgatgaggatctgctcaagggccgaacccgactggtggcggatgtcaagattgaccggggcgagtttgaggccgacggccacggtgtcggatcggctggccgagacggaggcgttcgcgtccttgcccttgcctttcccgccgaagacggtgacgcccacgatgagcgccgcggccacgacgaccgcgatcagcgtccacagccaccatttcgggccgccgttcttcttgttgtttgatgatttcgcgcgcgcgttcaggctcgcgtcggtgctggcggcttgattcgcgccgtcgatgttcctgtcttcggttgcgccagactcgccgtgcacaccattgttctgggacatggatactccctgatgcattcgggcatgcttacgcccgaatatggtttcgttgttatcttgcgtggttgaccgcccattcgggtcgatcaccacgttctactatatccccggacacgccggaggcaatggctatactggattgcggcgccgacggagggtccgcggcgaccacaacacgcggcgcatcgtcgggcaacgacgcgggaagcgctggcgtgggcacacgtgcggccttggcataaggccgggaggcagctatggcacatattcttctgggcgtcaccggcagcatcgccgcattcaaggcctgtcatctggcatccgattggaccaaggccggccacgaggtgcgggttatcgaaaccacagcggccgaaggcttcgtcactcccctgacattcacctcactgacccatcaacccacccgtaccacgatgttccccgcttatccggccgcgcacggcgacgtgacggccaatccgaccgtgccaacgaccatcaatcatgtggccgatgcggcctgggccaatctgctggtggtggccccggcgagcgccgacgtcatcgcccgcatcgcctgtggattggcgaacgatacgctgacgtccaccattctggcctatgaggggccgaagatcctatgcccggcgatgaacgtgcatatgtacaacaatccggccacgcagcgcaatctgaaaacctgcgccgaattgggctggcagattgtggagccggaggaaggcaatctggcttgcggcgacgtgggacgaggccgtatggaagagccggcgcgcatcgaggaagtggccgctcggctgctggcggatgcgcaggatgaccaggctccctcatcttccccgctcaaggggctgcgcgtgctggtcactgccgggccaacgcaggagccgctagacccggtccgctatctgacgaaccattccaccggcaagatggggtatgcgattgcctcggccgcagccgaatttggtgccgacgtaacgctggtctccggtccagtcgccttgaccgcgcccgatgcggtggatgtggtgcgcgtcacgaccgcgcaggatatgttcgatgcggtggccgacgccttcccggcggcggatatcacgattatggccgccgccgtgggcgatttccgcgtgaccgagattgcgccggagaaaatcaagaaggccggccgcagcagcatcaccgtggagctggtttccaacccggatattctggcgtgggccggcgaacgcaagcgcgacgacggctcgcagatcctgtgcggattcgcgatggagaccgagcatctgattcgtaatgcggagaagaagctgacgtccaagcattgcgacatgctggtggccaacaatctgcgcgacgccggtgccgggttcggcaccgacaccaacgttgtcaccgtgctcacgtccggagcggaggatgccggcaccccgaagatcgagcattgggacaagatggacaaaaccgtgcttgcgcaacgactgttgctgcggctcgcagcgttgcgttccggcggcgcgagcaatgtcgatgacgagaacaaggaggcctgacccatgctgatggcggtcgatatcggcaatacgaatatcgtgatcggttttctggaggtcgaccgcatcgtcggctcctaccgcatcaccaccaaggcgacgcacacctcagacgaatacggtctgatgatcacgcagttcctggctttgagcgattacacggccgacgatgtggacgatgtgatcgtctgctcggtggtgccgaaggtgatgtattccttccgcgcctcgctgatcaaattcctcggattggaaccgatggtggtgggccctggcgtcaagaccggcatgaacattcgtctcgacgaccccaaaaccttgggctctgactgcatcgccgactgcgccggcgcctaccacacctatggcggcccggtgctggtggccgacttcggcaccgccaccacgttcaactatgtggacggttccggcacgattcgctccggcttcatcaccacgggcatccgcaccggggccgaggcgttgtgggggcagaccgcccagctgccggaagtggagatcacgcaaccgcagtcgattctggccaccaatacgcgcactgctatgcaggccggactgtattacacgttcctcggtggcattgagcgcacgattcagcagttccgcaaggaaatcgatgagccgttccaagtggtagccacgggagggctcagccgcattttcaagaacgacaccgacatgatcgacgtctacgattcagacctgatcttcaaaggcatggcatacatctactcgcgcaatgtgaagtaacgcggtgtgcaggcatcggccgcgcatagcgcagtcgattccgtccctccccgaaaaacctactcaaaaccctacttaatcgtaaagccctgattgaggccgtattctcggaggtctttctgccattgggccaggccgtcggagagactgactttcttgccgggcttctccaatggttcgagcgggttgccttcctcgtccttcatgcccatctcaatggcttcctgtcgctgctgataggcgtggaaactgccggaccactcgtatgcctggcccaccgtcgatttgaagtcactgcgcgcatacacttcgaatggcagatactggtatccgaccgacacatcctcggcggcctccgacagtacccggttgaacttctgcccgccgaaatacgggatttcaatgccacggtcattggtaatcgtggttttatccagaaaatcagcggaattcagggtggcgtaatcggccgggaaggcaccgccgtctacacgcgcgctaatgccttgggcgtcatgcgccacaaagtccacgaaacgataggccgcatccggcttacgggtcagttgcaacacggtcagcgccgagccgccattttcggcgttggcaggctgcccaccataggtgggcatgggagccacgcgccacagaccggccgcgcccggcacattggacagcagcaacgacggcatccaagccccagagaacacggaggcgatggtgccggtgcccactctgcttttccaccgatccgaccatgtggcggaggtagtgtcaacaagcccctcatcgatcattttctgccagaattcggtgaaccgttgggtgccggcatcctcatccaaatcgatggtcacggttttgccgtcggccgacgtgtggaacggctgaccaccggcgagccagaccatcgcgtcatagaaactgccgtcgcccgagtcggcggcgatatacgcgccgatctccttgagcttttcggcggcctcgtaatagtcatcccaagtcttgatcttggtggcgtccacgccggcttggcggaacacgtcttcgttgtagaagaagcccatcgggcccgaatccatgggcagtccataggtacggccggcgagctgcacggacgaccatgtgccgagggtaaagaagttggaataatccgagccgattttgtcggtcagatcaagcaattggccggagaccgcgtactgcaacagtgcatagtattcgatttgagccacgtccggcgtgccgtaaccgtcttgaatggcggtattaagattgccgtagccggagatattggtccatttcacgcggatgtccggattggctttttcgaaacggcggatgacctcccccatgctcggttcccagctccatacgctgatctccgtacggttgtcgtccgtggcctgcccgcacgaggccagggatacggaaaggatggcagtcactgctatggttgccattcttttgattcgctgtccgatcactcgcatggtgacgagtgtactaggcggggcttaaaacggtaaaagccccgtgacgggattcgtcacggggctttgtgtatcgaacggggtcgcgccggcggccccttcgcgattgcgaatcaccacgtgcggcgcgttgacgccgaacaaacgttcacccaacagtacgagcgggtaatcgccctccaaagctgcgatatcgtcaaccgtcatcatcagagggcttaagatgagcccgtccgcgctgtgcgtgcccatcgatgcgatgctttccagctcgcgggcacgattgttagtggtggattccacgatgacgccgtagccatgttgccgggcctcggccagaatatcctcggcgagttcggagaagtacacctgccgcagatcgggaataaccagcttgagcaaccgggtacgcccggaacgcaggtttctggccgacgagttgactttgtatccgagcctgtcgatggcttccgcaatacgcgcggccatcgcctcgctcatatatggctgtttgttcagaaaattagacaccgaggctaccgaaacaccggcctcatgggccacgtccgccatcgtcactctgtttttgcctcgcacggtgaccaccctacccgactttgctggagatacgaaaacgactcccctgctacgatgagcagcaagggagccgttgggtaattaggcgctatgcgcggttttacagcttgacgacgagtacgccgttgggctggatggcggccgtgtgctcggactcgttgacctgggccagcgaggcgaccagcggttcgccttccacgtccacgaccgcaacatcgtgggtgcggttgaacaggaacacgaagtggttctcgccagtttcgtccgcacgctcgacgcgcagcacttcaccgcgatcgtcctcagccgaagtctcgatgccgagttcctccagcagcacgggcaggctcttggccaaaccctcacggccgagacgggcaccgacgtatgcggccttgccgtcgccgaagtcgttgacggtgatggcgggagcgccgtcgaaaccggtccacttatctgccttgaaggaggcgaccacgtgagcggtatcggccacggaggtgatcacgtcggcgaaatcgtgcgccacggttccgttgtccaagtcgaggtggtccatggcaccggggaagtcgttgcccatcggggcgaattcctcaacgcgcacacccaccacgtcacggatggaaccggggtagccacccagccagacgtgatccttgtcgtccaccagaccggtgtagtaggtcacgaacagcttgccgccgttcgccacatactcgcgcacgcggcgcgtggtctcttcggacaggatggtcaggctcggcagcacgacggcttcgtactcgtcccaagggccgcgaaccggcaccacgtctgcggtcagaccgttgtccgccagcgcgcggaaccacgcgagcggctcggtccaatggcgtacctcctgagtaggcgtggcggtgtgttccgtagcccactgggactcgtaatcgaagacgacggcgaccttggacttgaccagcttggtgctcagcaggccctcgtcagcaagcttgttgaggtcggcacccagctcgcacacatcgcggaagatctgggagtcggggcccgcgtgaggaaccatcgaagagtgccacttctcggcaccggccttggactggcgccactggaagtagcagatggcgtcggagcccatggccaagtgagccagggagtcgcgcaccaattcgccgggttcgacgcgatagttgatcgggcgccaattgacggcggaggtggagtgctccatgaggaaccacggattcttgcgggcgatgccgtcgcacagggaggccgagtaagccagctcgtcgaagtgagcttcgccaggcgtgaagtagtgatcgttggacacgaagtccacgtcgtaaccccacttgtcgtaatcgatgacggcaccgccggcggagaccatgaagttggtggtctgcggcttgggggcgatctcgagcagggcatcgcgctcggccttgtaaaagtcgagcagggcgtcggagctgaaacgcttccagtcaagcagtttgcccgggttcatgaagttgccatcgccgatgaagcgcggcgggatgatctcggagaaattgttcatgcgctgcgcccagaaggcggtgccccaggcgtcgttgacggcgtcgatggtgccgtacttcttctcgcaccacttctggaaggcgcgctcggcgtcttcggaatagtcgaagcggttgtggcagccgtactcgttgctcacatgccaagagaccacataggggttgtccttgtagtgctcggccatcttgcggcacaggttgagcgcgtagtcaaggaagaccgggctggtggcgcgccagtgctggcgggcaccgggctggcagacgtcgccgcggtagtcgacccagaggatctccgggtgggcctgggtcatccacatcggcggggatgcggtgccggaggcgagatcgacggcgatgccggccttgccgagcttgtcgatgacgcggtcgagccaatcgaagtcgtacacgccttcttcgggctcaagcttggcccaggagaagatggctacggagacgaggttgacgccggcctgctgcatgagggctacatcttcgtcccacacttcctcaggccattggtcggggttgtaatcgccgccgtaccagatgcggggcttgttgcccgcaagcggctgcggccacttgaactctttacgttccatgatgattcagctcctttattgaattttatcgataatctgcgtccgcgggaataaacagcccacagggctgtttgcctaacggctcagctcgtcagaggggggggcttggcactattttacctccctctgatgaggaaggttgtctcggcggagccgggacggagggagggaccccgccgcgaggcggtgaagacaccgcgtcggcggagccgactccatcactccttgacggcgcctgcggcgagtccggactgccagtacttctgcaggcacaggaacgcgatcaccagggggatgatcgtgatcagggagcccgtgatcaccaggttctggatcgcctggccgcccgcggtcgaggcctggtccttccactggttcaggccgatggtcagcgggtaccagtccgcgtccttgagcatgatcaacggcaggaagtagttgttccacgtcgccacgatcgtgaacaacgccgtcgtcacgatgttcccgatactggccaacaacacgctgggggcgagcacgtcgatgtccgtgcccaggaaatcgttcaacgaatccaccaggccgtacttcgcgccatacacgaaaccccagatcaacgtcgacaccaccgccggcaccgcgtagggcaggaacgtcgagatacggaagaacctcgtgccatgcagcttcatcgaatccaacgccagggccatcaaagccgacaggcacagcatgatcggcacctgcacgcacgtgaacagggccacacgaccaacactgctccagaactggccatcacccaacaggcgcgcgtagttctcgaagccgacgaacttggtgccgccgatcatctgcttcttgaagaacgaaatataaacggcgtacacgatcggcacgatgaacacgaacacgaacaccaccgcaaaaggccacatgaatttccatccacgccaatcggccttgtgcttattcacacgagccttgcccgaatgcacgggcgcagctgcgatatcggctgaagccattcccaacccctctccttcgaaggttgaccaaaatgtttgcgttatcatcataacaccatttgtaacattgtccaatcgtgttgagtaccgtgttgaattaagggtttctcagtcactctgctacaatggtcacgaagacaacgatgttatcgttaccgtaagcgtccctaagataagcgttgtaaacgaaacaccgacattaatgagtcaagcgagggtgaaatgtcgagaccaacacaggtgtccatgcaagacatagcgaaagccgccggcgtttcgccacagacagtgtcccgcgtggcgaatggcagcgatgcggtgaaacccgaaacacgccagcgtgtcgaagctgcaatgaaacgccttgggtatcgtccgaattatgcggcccgagccctaaagcacggccgcttccaggatatcggcgtggtgatgttcaacaccaccgcgttcggcaacgcccgcatccttgattctattgtggccaacgcggccgatgacgattattcagtcaccatccagaccatgcgccacggtgcggaacgcacgctttccgccgccatcgatcgcatgcagcgtcagccggtggatggtgtcatcgtagtgctggaggaacgcatctccgatttcgtcggatacaagcctccgcgagaacttccagtcgtgctcatctgcgaatccgccgccgaccactgccccaccgttgacgccgaccagtatggctgctcgaccgctatcgtcgattacctgatgggcaaggggcacaagaccgtctaccacattgccggaccgtccacctcgcgcgccgccgaaagccgcgcccgcggctggcgagaagcgttggaacaaatgggagcacgcgtaccgagcatgtacatcggcgattggtgcgcggattcaggctatcaggccggcgtggcgttggcccacgaccccgactgcacggccatctacgccgccaacgaccaaatggcatacggcgcaatgctcgggttgcagtcagcgggcaagcgcgtgcccgaggatgtcagcatcgtgggcgtcgatgattcgctggtagatatggttccgcgcttgaacctgacgaccatgaagctgcgctttgacgacattggcgccaccgccttctccatggtccgccgtcaatgcgaaggcgagaagataccggtcggcgtcaaaaccgtaatcccgccggaactgatcgaacgcggttccgtgcgcgacatcagctgacgagcggcatgtgctggcatccactggtacctgtcagtgattcacctgtcagtgatccataggcaattccgcaccgaccaatcgactcggttgtgcaatattctgcacatttccaactatgtgcagaatattgcacactttactatactgtgatatattttgcacatgattgtcatggatatcgccgaatacgcgcggcttatcaaggatgaaaggcaacgccagggcatcagtcagaccgacatggcccaacggctgggcgtgtcacgtcgctggctgatcgaatttgaacacgcccgagtccccaatcccggattctccaccattctcagcgctctgactgagcttggcttgtcgctggatgtctgcaaaaccccgcagcccgccgaactctatgaatggtgacaccatgagcgaaaacactctcaatgcatttctcggcgaaacacccatcggccagtttcgaagaacaaacgatggcagcattattttccaatatcacgattcctatcgttggtcgcaatcacccacaccaatatcgctttccatgcccattaccgcagccgaatattcaggcgacatcccgcgtaatttccttgaggccctggtcccggaatcccctcaggcccgagatgaagccatgcgattgcatcatgcccgatcgacaagcgcatttgatctgttgcaagccatcggattcgatgccaccggcgcattacggctgtccgccgacccgcacttgcccatagatgacgattcgcttattccaatcagcgattcgcagatcgcgaatcgactacgcgcagccgcccccacaggcatccagtccgcaagcgtagacgagcattggtcggtcgcgggacagcagggcaagatcgcactgaggaaccgcaatggatcatggttctccaccactggaatcgcgcggacgactcatatcatcaagcccggcataccgacccttccacaccaagcattcaacgaacacatcaccatgcgcattgtggaggcgatgggaatacccgtggcccacacctcttttcacatctttgatggggtcccagccatcatcagcgagcggtatgaccgtatagtgtccgccaatggtacggtgacggccctgcaccaagaagactttacccaagcgctgggcattccctcatcgctgaaatacgaggaacacaacggcccaacgtccaatgcatatgcggaaatgttgcgcaagcacggtctgcccgatcaggccgaaagcaatatccgagccttcaccgacggcatcctcgccagttatctcgtcggggcaacagacagccacgccaagaactactcgctattgctcgatggcgcgtccgtgcggcttgccccgctctatgaccttgcttcggtgttcccttatttggggcatggcaagcagatcataaatgccactttggcgatgaacatcggcggacgccgagatcttcttcaattacgccgcaaacatctggaacgattcgcacagcggatgggattagatgaggaatccgtgattttacgattccacaccttggtggataggctgccggaggcattcgacagcaccgtgcaacccgctcacgacgttatcgcgagcattggtgcgcaggaattcatcgatagctatcgcaagcgcatcatgatggtgtacgacgatgcaatgagctggatggccagtcgaaagggacagtgattcggacgggcggggattggtctcgccatccccccccctaagaaatcagatcttaagcggcacacgggaaacgaattcgcgcttctcgcctgttattggatcggtgaatcgtagcacacgcgccactaattgcagcggctggctgaaatcgtcgtaggggcgtgtctggatgcgcgggtagaagtcgtcgcccacgatgggcaggccgagcgaattcatgtggacgcgcaattggtgggttttgccggtgcgcgggtggagtgtgtagcggcagatggggtgatttcccggatggggaccaccctccggcgcttcgcgccacctcccgccagcgggagggaaacagaggtcaccgcgctcgatgagggtttcggcgttggccaaacccggttcctcgaatgcggccatcgtgccgtgttccttggtgatgtgcgatcggcgcagcaatgggaacgggcgtggcggttcgacctgcatgatcgtgccgaatcgtgggccgctgatcggccggcagggtgccaggcattcatagatcttgacggcctgccggttctggaacagcatctgatacgcgccgcggcaggccgaatcccgcacgaacaccaatacgccggcggtcatgcggtccaatcggtgcgctggcgtgatgtccggctcccccagccgctcacgcaatcggatcagcgcggtctgccgataccacatgccgcgtggcatggtggccagaaaatgcggcttgtccaccacgatgatccgctcgtcctcatacagcacgtccatctcaaacggaatatgaggctcgtcaatcacataccgatgtggcttactcaacggtcacggacttggcgaggttgcggggcttgtccacgtcgtagcccttgagctttgccatgtccatggcgaacagctgcagcggcaccacgtcaaccagcgggctcatcagcgttgggcaggcggggcgccagaacaccacgtcagcgtaccgttccacatccgggtcgccctgctcggccacggcgatgatgtacgcgccacgagccttgacctcctcgataccagagatcaccttggcgtgcaacacattgcggccgcgctgcggcggcacgatgaacaccacgggctcaccctcgtccaccagcgcgatcggtccatgcttgagctcgccggccgcgaagccctcggtgaacgtgtaggcgatttccttgagcttcaacgcgccctcaagcgccaccgggtagcccacgtggcggccgaggaacaagaaggagttggcgttcaccatgcgctcggcggccgcctggatggtcttgggctgggtgtcgagcacccactgaatcttgcgcggcatgtctttcagggagtcgagcatctgatgaatctcatcgcggaacatcgcgcccttgacctgcgccagatacaggcccagcaggtaggcggcggtaatctgcgccacgaacgccttggtggatgccacggcaacttccgggccggcgtgtgtgtagagcacggcgtcggattcgcgcggaatggaggcaccctgcgtgttgcagatggccagcaccttggacccctgttcgcgcgcgtggcgcagggccatcagcgtatccatggtttcgccggactgagaaatggccaccacgagcgtacgcggggtcagaatcgggtcacggtaacggaattcgtgcgcgagttcgatttccacggggatacgcacccagtgttcgatggcgtatttggctacctggccggcgtagctggcggtgccacaggccacgacgatgattttgtcgatggccttgaagtcgtgttcgtcgatacgcacttcatcaagggtgatgtcgccattcgtgtcgaagcggccaagcagggtgcgctgcactgcggcagggtcttcgtgaatctccttgtccataaaggaatcccagccgcccttttcggcggccgaagcatcccaatccacggtgtaggtcttcgggttttcgaccacgttgccgttgaaatcggcgacgatgaccttgtcggcggacacgcatacggcctgatcctggtcgacttccatggcgcgcttggtgtaggccacgaatgcggcgacgtcggaaccgaggaagttctccccctcgccaaggcccacgaccagtggcgaatcatggcgggctccgaccacgatgtccggctggcggcagtcggtggccagaatggtgaacgcgccttcaagcatgcgggccatacggcgcacagccttgaacaagtctggcttgccttcgtccgcgataatcttgtccacgatcttgccgagcagcttagcggccacctcagtgtcggtggcggaggcgaatcggtagccttcggcttgcaggtcgaaacgcagctgagaggcgttttcgatgatgccgttatggatgatggccaccttgccgtccatgctggtgtgcgggtgggcattcacgtcgctcggctcgccattggtggcccagcgcgtgtggccgatgcccaccgtggcgagcggcatcggcttgcgctcgatgtcttcgaccaggttcttcaaacggccggccttcttgcgcacgaccaccttatccatgccgggcgcggtcagcgccacaccggccgagtcatagcctcggtattccagacgttccaggccttgcaggcagacctccaaaggcttgccgcatgccgtttcaatatttcccgcgtatccaacgattccacacatggctcaccagcctagcggacgattattgcgcaaagcgaatccaacccgccgcctttgcaggattggaacatgccccttcgtgaaaagcgtacgctgagttcatcagcgtacgcttttggagctgcaacaacgagccttcctacagcacgtgctgtaggcggagccgtaaagcggggagcccagtgggctccccgtaggcgacgccgaagcacgacagtgctgaggtaatataacagccttcctacagcacatgctgtaggcggagccgtaaagcggggagcccagtgggctccccgtaggcgacgccgaagcacgacagtgctgaggtaatataacagccttcctacagcacatgctgtaggaagtccttaaacctaggctcggtggggtggtcgatgatgtcggggccgcccttttctacgactacgccgccgtccatgaacacgatctggtcggcgacttcgcgggcgaagccgatttcgtgggtcacgcacaccatggtcatgccttccttggccaaggaacgcatgacgttgagcacttcgcccaccagttcggggtcaagggcggaggtcggctcatcgaagagcatgatctccggcttcatggccagagcacgggcaatggccacgcgctgctgctgaccacccgacagctgggaggggtaatagtccatgcgatcgcccagaccgacgcgctgaagctcggccacggccaggtcacaggcggctttcttggactggtgctgcacgtggatcggggcttccatcacgttctccagcgcggtcatgtgtgggaacaggttgaagcgctggaacaccatgccgaggcgagagcgctgtgcggcgatctccttatcgtccagggtctgcagcatgtcctggccgtttttggtcacgtgcttgtagccgatgagttcaccgtccacctcgatggaaccgccggtcagggtttccagctggttgatcagacgcaggaacgtggacttgccggaaccggagggccccagaatcacggtcacagtaccgggcataacggttagatcgatgcccttgagcacatgcagcggcccaaacgccttgtgcacctgcacggcctcgacggcaggaatcacggaaccgtcagccgccttgcgcacgaccggagcggagttggtgatgtcattcgtagtcataatcgcgctcccgccttatgcattcaatccgacaaatgtggtctggttgagcttgtccacgtcatccttcggttcaccgtcggtcttacccggcaatggcgtctgcttgcccttggtgcccaccggtcgggcatcgaagcccctgccgaagtgcgcctcgaggcgggactgcacaaccatcagaatggaggtgatcagcaggtaccagaagcaggccacgagaagcagcggaatcggcttgtagatacggttggcgatggcgttggtggcgaactgcagttcgagagtgaacggcacggcggtgaccagcgaggtggtcttcagcatgccgatggtctcgttgccggtgggcgggatgatgatgcgcatggcctgcggcagcacgatgcggcgcatgatgagcgtgcggttcatgcccagcgccttggccgcctcggtctggccggggtccacggcttcaaggccggcacgcacgatttcggacaggtaggcggcctcgttcagggccagaccaatccatgcggcgttgaatgcggtgaccaccacgttggagtcgatgctccagaactccaccgaggtgaacggaatgccgaggctgatcttaggaatcagcacggcgaacagaccccagaaaatgagctgcgtgtacacaggcgtgccgcggaagaaccagatgaagaaccagctgacgccgcgcagcaccggattgatggatttgcgcatgatggcaagaatcaccgacaggatgatcgccacgaccatggagatcacggtaagctccaaggtatagcgaatgccttcaagcacgttctcgttgaacaggtacttccagacggtgggccaatccagtcgcggattggtaatcaagccttgaatgagcatcgcggcgagcagtaccacgatcactgcggccacaatcgggccggggcgcttgaccggcaacgccttgatgcggttggggatgttcagcccctcaccgtcgacttctttcttcgccataatctggttccttggatgtgttaggcagcctgaactgcaagttgcaactagcgttgaaccttagtgcacgaatggggcgactgtgttacaaacagtgcgccccattcgaattttcgcgacagcttgtcgactattcgacggccgggttgatttcggccttgtccagtgcgccggattcgacgccccagtgctggagaatcttagtgtaggtgccgtcgtccatgagcttttgcatggccttctgcacggcttcggcggtctgggaatcgcccttcttgatggcgatggcgttcggcacttcatcgaagtccttgccgagctgttccagctgaccatcggtctgggcgatggcgtagccgacaaccggggaatcggcgaagaagacgtcggccttgccggtcaccacagcggtggtggcgtcggtctgctgcttggaggactggatggtgatgtctttcttgccgtccgccttgcactgcttggcggtcttgttgatggcctcttcctcgacggtgccggtctcgacggcgacgttcagaccgcacaggtcatccgggttcacgttcttggggttgcctttggccaccgcgtagcccataccggcggtgaagtaggagacgaagtccacggactgcatacgttccttggtgatggtgaacgcggcgatgcccagatcgtacttggagccgatggccggaatgatcgtatcgaagttggaggagacgatttcggtctcgagaccgaagatgttgcccatggcgcgggcgagatccatgtcgtagccgatctgggtcttgccgtcggcgtcgaggaattcggccggggcgtaggaggggttggtgccgatggtgagcttgccgtccttggtcacggattcaggcagcagtgcggcgatggtgtcatccttctccacggagctgacatcgtagctggtgatggtggcggcatcggagcccttggcggaatccgtaccggcatcggccttgtcggaggcgccgcaagcggcggtggcgaacagcatggccgagctcagtgcaatggccataatggacttcagtttggtggactgcataatcgtttcttcttctctcttacgccgcttcaacggcaacgatcaacggttaagcatatttatacactacagtgcatacatatacaaaaagactcccgccgcagggcaacgggagtcttcatagtaaccgaaactactcgacggacgggttgatctcggccttgtcgacggcgccggaagagacgccccacgtgtcgaggatcttcttgtacgtgccatcatccatcagcttctggatggccttctgtacggcctcggcggtcttggaatcgcccttcttgacggccacggcctcaggggtcacaccaacgtcctcgccgagggcctcgagcgtatcaccggtctgcttgatggcgtagccggcaaccggcgtatcggcgtagaagatatcagccttaccggaagccacggcggtagtcacatcggtctgcagcttggaggactggatgtcgatggcatccttaccgtccgccttgcactgctcgttatccttgttgacttcctcttcctgggtggtaccggtctgcacagccaccttcacgccgcacaggttcgaggagtcgaccttgttcgggttgcccttctgcaccacgaacgtggaaccggccttgaagtaggtcacgaagtccacagcctccatgcgttccttggtcacggtgaaggaggagatgccgatgtcgtacttggagccgacggacgggataatcgaatcgaacgtggaggagacggtgttttccttcagtccgaacactgcggccagcgccttggacaggtcgacatcaaagccgaccggggtcttgccgtcctcggccaggaactcggccggggcataggaagtatcggcgccgacggtcagcgtgccgtcgccggccacggaatcgggcagcagtgcggcaatctcgtcgtccttctggatgctgctggtgtcgaagccttgaatcgaagtgctggacgagtccttggatgaatcgccgctcttggatgcggtgtcggtgccgtcagtcgtgccacaggccgccacggcgatcagcatggccgcgctcagggcggcggccgcagcggattgtattcccttgcttagagacattggatttcctctctccggatagtcagctgggcgggtatgtttcccagatggttccagagcgtaggagtgcaatgctacggaagcgttaatcgtgggcgaaatgacccacaacgcggacatcctacccttggctcccctccggaggggagccaagggacgggactagtggcgcatgttggcgtagcgcatggcgcgtagggcttcgcgcttgtcctgctcttcgcgcagggcctggcgcttgtcgaattccttcttgcctcgggccagtgcgatctccgccttgacgcgaccgtccttgaagtacaggctcagcggcacaatcgtgtatcccttggcctcgatgccgcgggcgagcttggtgatctgcagtcggtgcagcagcagcttgcgcttgcgcttgggcgcatggttgttccatgtgccgttcaggtattcggggatgttcgcgccctccagccacatctcgccacggcggtcgatggagatgaacgcctcggacagcgatgcgcggccttcgcgcaacgacttgacctcggtgccggtcagggccagccctgcctcgtacttgtcttcgatggcatagtcatgccgggccttcttgttctggacgatgagtttctcaccggtttccttgggcatgtctcctcctttcgtgggcaataactcgtgagtagcaactcgtgggtagcaactcgtgggtagcaacgcaacatccgacgatatcacggaccggcctcgaatacgaaaagggttcctcttcaagaggaacccttcaaccgcatatatcggccgaaccaaccggtcagtggacgaaccagtactgacccaaattggtcaaggtgcggtcgtgcatgttccacggaccaccccagttcatttcggagatctggaatgtgccgtcgccatacacggcttcgactacggcaacatggccataggtaccgtcggcaccatcctgaccaggcaggaaggagagcgccgcaccgacctgagggttgtggtccacgcgcaagccgtacgagggggcgttgcgccaccagtcgccgccattgccgagataggacggcgtgccaatgcccatctgcctacggcgttcatacgcccagtacgtgcactggccggcggcataggcgttgccgtaatcaccgttcgacgtgccttggccgccgacgctgggggcgggagcgggggcgggagccggcgccg

SEQ ID NO: 325 - DNA, 20511 bp, Unknown
  R42_10m  MAG No. k141_6210
gcccgctcaggatgccacgccgctgtccctcgtgctgaccgagctcatcaccaattcggtggagcatgggttcgaaggccgcaaggatggccatatcacgatttccgtgggccgctccggcccgaacctcaatgtggtggtcgaggatgacggttccggtctcggctccgaagaacagggaggattggctcgttcttccggttctggtttgggcacgcagatcatcaacacctttgtgaccaatgatttcggtggttccgtgcattgggagccgcgccgcggaggcggcacccgcgtggtgcttgatatgaagctcagggccgctcaggatgagtgatgcgaagcccaaaaataaggaaaccctcccaagtgggagggtttcctagtatgacgaagcgataatcaaaacatcagatttgcatctgcatggcctgagaacggcgggcgcgcatggcgcggcgcttcagcgcacgacgctcatcttcgctcaagccgccccacacgccgtaatcctgattggtgtccagagcgcacttcaggcatgcatcaatcaccttgcaggtgcggcacacggccttggcctcctcaatctgctgataggctgcaccggtgttgcccaccgggaagaagagttccggatccttgtcacgacatgcggccttggctcgccaatcaaaagcgctgctcattgcttgcctcccttaaaagccccgtggctggtgttgttccttaagtccagtaccaaggtaaccacgaaccgtggtgattttcaagaggtttcgccgagaaaaaaccgaagttttcacgaagcgcactgcaccagacatgccgatgtgccctcgatgagcacggcccggcccgcgttgtcggcatcgatatgactcatcgtatccaataggcgagcggggactccggccataaggtcagacgttcgttccccgcacgggaacacgattctggtattgcaatgctctggtatacgtatcgggcgaatcgtgctgacggcgaataccacgctgacggactcatcggccaacgcatgtgtgaaagacagcgcctgctcgtcggtgcggaatgggtcgaacaactcatcggcgtcgtcgacgaaccacacgatatgcggaggcggtggtgcatccgagctggcatacggcgtgcagcggccgttgcgaagccattgcgatccccatacccggcgatgcggggaactgacacgtaccgccaagccatcagccatgctggcgtgtcgagccaatgttttcagcaacgtggttttgccgcgcccctgcgggccgatgacaccgatattgccaccggtgagggataccgtcgcttctcgcaggttgatgccatcgtcggcaagtccaaatcgaatgcgttgcggtgcgtgattggccacagtccggtcttttacgtgccggggaagtggcgcggtaaacagggacggctgcggcgggctcccgacgaaccgcgatgcgaacgcgatctggcggcataccgcatcgatatcgcgcgccgttgcacagcggaatgccgtcacctgttcggaatcgttgcagaacgccgcaccgggcattgccggactgaggtcggcggcacgaccatcaccaagcagctcgcatgattgcagacggtcccgaacccgtaaacaaatgctgacggacatattcgccttcatatcggcactgacctgacccatcggattctgcgtacaggcgatcagatacatgcccagtgacctgccgagcgaggcaatacgcaccagacgattcacataatccgggagctggtccttcagggcatggaattcgtcaatgaccacgatcaggcgcggtggcggattgaccatatcacggatatcggaagcatggacagcggcggacagctgttcacggcgtgtcagttcggcttccagcgcacgcaacgcgcgtacggcatgcgccagatccagatcgcatacgctgcccacggtatgcggcaaccgttcgagtttgcggaacgcggaaccgcctttgaaatccaaaaacacgaaattcagatgctcaggcccgttcatcgaggcgagcgccagacaccagctttgcagcaacacggatttgccggaaccagtggtgccggccaccagagcatgcggcccctgacggttcagatcgagcctcagcggctcgcttccggtcatgccgatcggcaccgcaaggtcaaggggttcaagccaatggcccacaatggtgcgccatggcaggcgtgcgaagtgcagcagcgattctatcggctgcgacggcgcatgacggaggtctgcggcgcgggcatcggcatcgtccgtgataccgatatcgatcgttgcctgttgcggggcgggggtcttctccgggcccggaggtggggggagcgtcagcagcagggacacgagacaggcgaatatgcccggtgcgatcatggcggcgaacagccattgcccgtgcaacagcagtatgaccatcatcagtgcctgcgcgatcatcgggcacgccgcggcaagcatggtcaggcgggcgcgcaatggcggcgcgcccaaacggtgcttcgcccgggatacggcggatgccgtatgggcggaatgtcgcttcgaatcgttctgctgtgatgccatgcttccagcgtgggggaacgcatgccgaaagcgcaagtcgaatcaaggtatgtggttctagcttgccgagttatccacatgacattttgcccgtgcatgattggtggtgtaggcaatggtggcgatcatgcgccgacgatgaagccgatgggctccgggaaagcgtcggtcagccttccgccagattgcccacggcgccggccttatgcgtgccgtcggcaagctgattgaacagttcggtgttcctggcgtcatcgagcagcaccgaggagccaacgccatcaacgtaataatcagggtcggaccagtacacgctgccggagatgccattcgagccggtggcgcttttgaacgccaacgccatggtgagcaacgtgtaagggttggttttttcatccacagtgagtgcgctcatcgcggcattggacactgccacgactttggacggattggtcagggtcccactgctggaagcctttttgacgatggccgagatgacctgccgctggcgttcgttgcgtccgaagtctcctcgcgcgtcggcgtatcgcatacgagagaaggacaatgcagtggaaccatccgtcgtatggcatcccgccttccagttcagtccggaataggaatcctgaacatcctcgtcatagcacagttcgataccgcccaaggcgttcaccacgttctgcagaccgccgaacttgatctgcgccacatggtcgattttctggccggtaatctgctcgacgttgcttaccaaggctttcttgccggcaatctgcgccaccgcattgattttcatgtactggttatcgacgttcataagcgaatcgcggggaatggaaatcagcgaactcggcccgcttttaggcttgatcagcaccagaatcgtatcggttctgaagcctgagatattgtccacgccgccgtaatcggtggaaccgtctcgctcgtcggagccaagaatcagccaggtcgaggccggcgtgttgggggtgtcggtcagccagtcgctccggttcagtttgctgtccacccattgccaggcaccgaaaacagaaagaatcaacgccgccaccagtaccgcaatcgcgcataagatgatgcgcaaggcgcgcggccggtgtgccgttaccgttttcgccgttgccgccgccggccggccaatatggctgaacttcgtggacacgtttgctgctggcgatgagggccgggaaaccggcatatccgacggattgcgcacggcgttgcgggatgagccggaagacatccgcgctcgcgacggcggaatgctgcgcggtgcggcggcatccggagccgtgctgcgggtggcacgtccggttttcggagaaaaactgggcggagtccgcctgccgttgtccgtgacgttggcgcttgccgtggcgttggcgttcggttgaggctcttcgatgtcatttcccgtgacggacggacgggccgatggagcctgacctgactgacgtgaggcgcgggcaggggcgaaggagcgtggcacctgcccggaaggtcgggtgcgtcgatttcccgcaggaatgaagcttggcgggttgatatgcggatccgccccacctgattcctgcgtcataacccctcctgaaactgtcgattgtctgaatgacactttgacacagcatccgccgggtgttcctgcgctatggtgttcctgcgcaggaacggcacaatatcatgtgcaacggcatcagggcatcgtgtccgcgccatagcacacagttccataaaaatgatgtaatgacacgagaaagaatttgacaaaaacgaaattgcatgtgtgtaatttagtccgtatgaaaagctcaataggcaaggagaatcgcatgtggggtgtggtcgacgattcagccgaagagccatggcatgaattgtggggactattccgacctgatggcgatgtatcttggcagcacaaggcgttgtgcgcgcaaaccgatccggaggcgttcttcccggaaaagggaggctcgacccgtgatgccaagcgtgtgtgcgccaaatgcgaagtgcgtgaacaatgcctgaaatgggccatcgaccatgatgagcgattcggtatttggggcggtatgagcgagcgcgaacgccgtcgatataagcgagagcaccgggagcaggcgtagttccacacacacccccttcaagtctggtgcgtacactgggagtttatgagtccgacaggtaatagcgatattcatgaggcgttggccgacgccatgtcttctcgaccgtatacgcataggcaggatgtggataccggcattacggctgtgatcaccgttgaggaggatatgcgtttcctccggtctacattgcgttcggtattgacgcagaatgttcttccgggagtcgtcatcatcgccgacgcgaccgggcgcgccggttcgaggataaccacttcgttcgaggtcattccctcgccatcggggccggtagtggaggtgccgcagtccaagcatgtgaccattcacatcgtttcggccaagggcgcgcgttccttcggcgatgcggtcagccgggcgttggatcgggccgatttggatgacgctccccgcgcattgtggttgctccatgatgattcccgcccctcggatgcctcatgccttgaacgattgcttgaggcgtggcgcaatacgccgggggccagcgtgctcgggtgcaaacagtgtgattgggaaggatcccacctgcatgatgtcggtatgtatgcaggccgacacgccgtgcattccctggtggtcgatggagaacccgatcaggagcagtatgacgggcgacaggatgtgttcgcggtgtcgctggcgggcgcgctggtgtccatgtcgcaattcacgcgactgcggggcatcaatgcctggctgaccacctacagcgaatcggtcgatttctgccgccgtgtctgcctgagcggcggacgcgtggtggtagtcccgcaagcggagatatcacatcgtcgcgcacggtatgagggcattcgtacgcgaggcggggagccgcttaaggaagatcacacggtcaatcatgcgatgacggtgcatcgctcccaacagcgctatctgtacactgacctggccatgtcgtcctggattatcgtctggctgtggaggctgattcgcagttttggcatggccatagccatgatgttcggcaagaagccgtatgaagcatgggtgcaattgtgcctgccatggttggctttggccgatatcgcgggaaacatgaaatcgcgcaggctggtggccagacagtcgaaggtcgccgcatcgtccctgcaggttttgttcgccgacagtcggcagatcaagcagttccatgatcgtcgggatgcattccaatcccagcagggcagagtgctgctcagtccgctggaacgtgcccatctgcggacacgcaccatatatcgctggagcgcagccgtggtgatggcgctggtgtgctttgcggccatcgtggtgatgtattggccggtgttccgttcgatattctccggtggatcgttgtattccgatgtgttgctttccaccggtgccagcttcactcaactggtgcagtccgccaccacgccatgggtgtttggcagcggcaccggcattcctgcgccgcccacgccgtggctgctggtgctgatgctggcctcgctggtcacgctcggccatgtgaccgccgctctggcgatgatactgtttgtggccgcgccgctgagcgcattgtcgttctgggcgctggcgggcgtattcacccgctcggacgtggttcgtgtgctgggaggactgttgtgggcatccaccggcattatgttcggctggtatgcgcaggccaatatgccgatgctcaccgtaatggtgttcctgccggccgcgttcgcattcgtgttccgtgccgtgggcatgtaccataccgaagacccgctcaagccgcgcacatccgttcaggccgcggccatcgccgcactgtgcttcatccctgtggtggccgccgaaccgcagctgctgttcgcgctgatcgtcgtgttcctgatgttcctgctgttcgtgcgccgcaagcgcgccatgctgttgcttattccggttcctgccgcctttgcggtggcccctacgctcgtcaatgcggtgcgttacgccgatttgggcatgtggcgtcaactgttcggcgacatcacagtgccaacgtcatccgccaacgggtcgccggcgtcgctgagcctgcttgaggccgtacagcgtgcgctgggatggcgaatgggatcgaccgattatgccgatttggcggtcactgtgctgttcggcgtcatcacgctgctcgctcttgcttcgctggtgctgccgttcgcgttgcggacctcgcggctgatgtgggtggtaatcgtttgcggaggcgcgctcgccctgatttccagccgtgtggccatagccgtggatgccgatggcgtcgtggccggttccgcacagcctggcatcgcgatgatgatattgggcttccttgcctgcgtgtgcctcgtcgccggtggggcggtgaagcgattccaaccgttgcatgcgtccggcagcgatcccgcaccgaaaagggaccgtctgcatgcgctcatcgtgtctggccgtgtggtgcttgctctgatactggtgtgctgcatcggcatccaatgcatgtatggcatcgaacgtcataaggatgcgggactgggcgtgtccgaaaacggcctgcccatggtcaccaccgattatctggaggccagtgccgatcatcgtgtgcttgccgtgagcgcggagacccgcaacatcgtcaactatgcggtgatgcgcacctcgcgcggcgatctgatcgacagctctccggtccagcgggcgcgcctgctgtccggcaagcatgatgcggttgacgaacagctggcccaggcctgtgcctcgctgctgtccaatcccgacgaagaggccatcgcggccatcagcgcgcttggattcggcggcatctacgtggttcccgagaccggcgattcctcgaacgacatgccgtatgaacagttgagcgcgaatatcgccgcatcgaacggcacccagtccctggtctccacggatagcggcagctactatcgtctgacgctgcgtagcagcacctcacagcaggtggatacctcatggcagcaacgtgcacagcatagtgtctggaggcacgcctggctgatatgcctaggtgtgatcacggcgttgtactgcttggtcgccatgcctcgcagacgaccgtcctacggattggaggagcaggcatgagcaacacaacttctggtttcaaacgtgcgatcggcatcgtgctcggtgtgatcaccatgctggtgttgattgcgctgttcgtcgttctcgtcatggcccccatccccaatatctgggtggacaaggtggccgcttccgataatgccatcgaccagacagttagtccgacccagtccgaaacctactgcccggcacctataggattggccgataccggcacgtacggcgacagcgccttccaggccactgtcggcaatctgagcacacaggcgcgctacgcggcgttcggctccgtctacagcgccactgtctcggcgatcgggcaaaagtccagttcagatgacgtgactttgaaagacgccgatccgaccgacgattcctcggtgaaaaccggtgctcagaagatcgatcagggagctcgcctgatcaatacccgtatgttgcaggccgcagctggcaccggcaccgtcggcaccatcgcatcatgggccgatgacggcgatgtgagaggcgtatcggcggcatcctgcgtatcgacctcgctcagccagtcgttcttgctctccggcggcacgaccggtaccacacagcagctcatcgtctcgaatccctccaccaagccgaccaccgtcgacattgccgtctggggttccgagacagccgggaaaatggcattgtccacacaatccacgctgtctgtgccggccgagggggagtcctcgatggaactgtccgccgcggtcgatgggcagcatggtctgttcgtgaccgtttccagcaaggagactcctatcgcgtccgtggtacgtacggtgaccatggatggtctgacaccgaagggttctgatttcgcgctgccgctgccgaccgcctccaatgcgtcggtggcgccgtccatcactgccggcgatgcggtcaccgcttatctgttcgccaaggcagacaccagcaccgggctgtcatggattaccgacaaaggattggttcccgccaaagatgccaccgtcactgccgataaggtgacggcgatcgacttgggagaggctcctgatggggcgttgggcgtgatgtccaccgcagaggatgccgtgtcgttctccgtcaaggccacacgctccggtgactccggccaagccgatttcgcattggtcaatgccggcgagccatccgaattctcggggttggcccttcccgacggagtaaaggcctccatcacgctggccaatacgtccaatgcgcgcaggacggtcaccttgcacgcctacgatgatgccggtgcttcggtgacctccgaggaaatcacgctggatgcgaacgcggcgcaaacgattgagaccggcaaactttccggcgatcatggcaccgcggtcgtgctgatgttggaggactcatccaagaaagtgagctggggagcgcgtttcagtcacgattcgttgcaagacaaggacatcgccggattgtccgccatcgacgcttcaacgctgatgcccgccacggtccatgtctgggctcggaacgattcctccatcgtcaagtagagcgcgctcgccgaagcatcggtctgatgatgtttcggcgccgatatagctgcgggggccgtgccactgtcttacttgaagtggcacggcccccgcaatactgtcacaggccccaatcggggtcgatttcctcgggcctgcgcccatacaattccgctatgcgagccaccagctcatccctgacggccaactgcaattcgagcttggtaggtgcctcggtctgcaacggcatacggtagagcacgactcgtgcgggaatgccgtggctggcggggaagcactgggacgtcatattcggctcggtctgccaaggcgtcggatccgaaggcggcgcatcctccaccgcgaactggagcggacgtatcagttccggccacgcttggccgagcctgcgaacctgggccgccaccatatcgtcgaacatgccggtgcgagtgcggtaacggggcagacgggtgccgaacatcggggttcgtgtgccgcgaccgtggcggttgcggtagattcgtgcgttccaaggtggctgaagcatggttcccaccataggacatggcggaggcaacatgcgttaggattggttcattggctgtgaacattcgtcaacgagggaggcgcgacaaatggtggtacgttcgtggtccgaacttgatttcgataatgtctgctccaacgccaaggtgttcggtttcgatttggacaacacgctggccagctcaaaacagccgatgaggcccgcgatgatcgaacggttctgtgcgctgctcgaccatacggtggtggccctgatctcagggggcggcatggcggtggtcacctcacaggtgctggatgtactcaccccgaatgccaggcgcggcaatctgcatgtcatgcctgcctccggctcccggtattaccggtgggatggcacgcaatgggccttggtgtatgcgcatgatctgtccgaagccaccgtggccgctgtctcggaaagtcttgagcgacatgcccgggaactgggattgtgggaacagcaggtatgggggcctcgaatcgagaacaggggcagccagatcaccttctccgctctgggacagttcgcacccgtagcggccaaacaggcatgggatcgcgataacacgaagaaacaggcgctggtcgaagcggtcaaggccgatctgccgcacatgcgggtcagggccggcggctacaccagtgtggatgtcagcgaatgcggcatcgataaggcctatgccgtgcgcaagctgacgcagacacttggcatacaggccgatgaaatggtgttcgtgggcgatcgcatgacgcctacgggtaatgactatcctgcggttgaggccggtgcgatcggtgttcgtgtggagaatccgcaagacacggtacaactgctggatgcactgcttgcgcgattcgatactccagcttgatggtgacgcgttatggacaggccgagcgtatacaagtggtggcatgcgatgtgggcacaggcctgcaatctgctgtttccacgcggctgcgctgggtgtgacgcgccggatgaggtattgtgtgcggcatgtcgggccttgttcgcacaatgccgggagcgggatacagacggtggtggcggagcccgtatatggtccgcatcgatttaccagggagcggcgcgtcgtgccattctcgactggaaggaccacgacgataccgagcttgacggccctttcggccgcatcatggtgtcgctgctgaacaagacgccaatatcatcatcatgcttggggcatcgcgtattggtggttccggtgccgtcatcgcgggcgtcaatgcgccgaagagggcgtgcccatacggcaccgttggccaaatcggtggcaggggcattgcgtgggtacggtgtcaatgcgcgaccatgcaatgccctgagctcctccaccaaggcacgctccgtgcagcagacctcttcggtacagcgtgcccgtcgtatcaccggtcatgtcagggtgaagcgtgatctcataggccatggcgacgcggtgcttctcattgatgacatcgtcaccacaggtgccaccgtgcggcaatgcgttcaggtgtttcagcaggccggcaccaaggtggtgggcgtgctggtattggcggatgccgtggcgcgacggtccgatgacgatatcaacgggtgaatgacatcggtgacgatgccccagatagcaggcgaagcgccgttgctcggcatgtaatcgggatatcgaggattctcggcgtgcaatatggtgatgccggcccgtgaaaccagccgcttgatggcgatttcatcgtccatgacagccgcaaccacatctccggggactggtgccaacgaacgatcgacaatcagcagatcgccgttatgaataccggcattgatcatggaatcgccggccatctgcatgacaaacagcgtggtgtcgtgcggcatggttcgtgacttggattgctgtgtcatgctgtgcctcccaccctgtattcgaacatctgttcgaatacagtatacggtaggacggcggacaatatcagcgttcggcgacgtgatatttaggcaggatgatttcgaaatcggcgcctcgcgtgtcatcgaccactttgacggtgccgccgtgcaattgggccgcccaacgtgcgatggacaggccaaggccggtgccgcccgactcggtgccgggacccgtcttgcctttgacaaagcgccggaagatatccgaacggtcggacggtgcaatctgggagccgaaattcaccacattggtcacgatggtgccttggctgtcatcctcatgggcatcgaccagcacggtggtgccgtcggccgaatgcttcagtgcgttggcgatgatgttggtgaacagctggcgcaggcggtcctgatcgccttccatcgagatgtcggccggcacggtgacgcggatgtcgtgggcgtggccgccatcggcgatttccaacggctcgatggtctcgtcaagaaagtcggcgaagttgaacttttcgatattcagactcgccgcaccggcctccatacggctcaaatccaacaggaaggcgatgaggtcggagagacgctgcgtttgggtgaggatgctctccagattggcgggagtgggctcggtgacgccgtcggccatgttctcgaccatcgcctgcaaagcggaaacgggcgtacgcagctcatggctcacattggctatcatgtcgcggcgcattttatcggcatgttcgagttcgccggccatctcgttgaacgagcgagccagctggccgacctcgtcatgacgatcctgatcgatatccacgcggaccgtgtaatcgccatccgccatggcttcggccacatcgcgcatctggcgtaagggagcggtgatgccgcgggagaagaaataggtgatgcccaaggccaccaccaaagtcagcggcatggcgatccaaccggaccagccgaatttcaggaggaaccagcacatggcaaacgcgatggcagtggcgataacgatcagtacgctgagttccagcttcagagaggagaacaaatcaaccggcttgacgcgaggtttcatcgcatcaagccgggattgctgttgttttttggatgccatcacgcggtcggcggctcgaaagcgtagcctacgccgtgcacggtgcggatggtatcggcgccgagcttatggcgcagcgccttgacgtggctgtcgacggtgcgggtgccggatgcgtcgacccagtcccagacctcttcgagcagcttttcgcgggtgagcaccgacttcgggcggcgggccagcgtggccagcagatcgaactcggtgggggtcagatgcacctgctcgccgttcacggtgacgatgcgctgggccgggtctatgaccatcgaaccgaagtcgagcagcttctcgttctccgaattcttggcgatgaccttcgcacgctccacgcggcgtagcagcgccttgcagcgggcgatgagctcgcgcatggagaacggtttggtcatgtaatcatcggcgcccgctcccagaccgatgaccttgtcggcctcgtcatcacgtgcggtgaggatcagcaccggcaccggacgttcggcgacgatgcgtttggtggcctcaagaccatccatgaccggcagcatgatgtccatgattaccagatcggggcgtagctgggacgcggcctggacggcggaagcgccgtccccggccacgcgagcggtccatccttcagcggtgatgcgctgggcaatggccgtggcgagtgtgggctcgtcctcgaccaccagcaccatgcgcggtgtcgtattctgacgcgctgtggtattgagcataaataaaccggttacctttcagcctgttgaccagttcagtcttccggcttcaagaatacaactcccagagccggaacggtgatcttcgccgagaacggacgcgaatgatattcgccctcgaccgcttcgaaggtgccgttgtggatgtcggagccgccgtacttggcgtcatcggtggtgaacacttcggtccacttgccgccggtgggcagcgccacctggtaatcgggccaggcttcaccggagaagttgaccaccacggccaaggtctcgcccttggtgccgatgcgcaggaagctcagcgtgttgtggtcggcatcgtcgctggtcagccactggaagccggccggatcgaagtcctggctccaaagtgccggatgcgccttgtagaaggcgttgaggtcggcgaccatggtctggacctgacggtgctcctgccagttcaggcaatcccaatcgatggaggcgtcgtgatcccactcgccccactgggccagctcgttgcccatgaaggagagcttcttgcccgggtgagcccactgataggcgaacatcgaacgcacgccggctagcttctgccagccatcgcccggcatcttgccgtacagggagcccttgccgtacacgacttcgtcgtggctgatgggcaatacgtagtgttcggagtaggcgtacaccatggagaaggtgatttcgttgtggtgccacttgcgattgatgggctcctcgtgcagatactcgagggtgtcgtgcatccatcccatgttccacttcataccgaagccgatgccgccggcggaggtgggggcggtgatgcccggccatgcggtggactcctcggcgatcatcatgacgccggggttgttcttgtacgcggtggcggtggcttccttgaggaagtcgatggcctccaggttttcgcgtccgccgtagatgttcggacgccaatggccgggttcgcggctgtagtcgaggtagagcatggagctgacggcatccacgcgcagcgcatcgacatgcaggtcctcgagccagaacagggcgttggccaccaggaagttgcgtacttcgcggcgtccgaagttgaacacataggtgccccattcggggtgttcgccgcgcagcgggtccgggtcctcgtacagcggggtgccgtcgaagcggccgagcgcgaaggcatccttcgggaagtgggcgggcacccagtccatgatcacgccgatgccggcctgatggaaccgatcgaccaggtaacggaagtcgtcgggggagccgaggcgggaatccaccgcatagtagccggtgacctgatagccccaggagccggagaacgggtgctgtgccagtggcatgaactccacgtgggtgaagccttcctgcttgacatagtccacgagctgcttggccaggtcgcggtaggtcagtccctgcttccagctgccggcgtgaacctcatagatggagaccgggccatcatgcgggttggtggtgcggcggtgctgcatccaggcgtcatcgttccactcgtaggtggattcggtgacgatggaggcggtgtgcggcggaacctcgtgctgacgctccatcgggtcagccttcatctcccacgtgtaattggcgttcaggatctggaacttgtaggtctcgcccgcgccgatgccgggaatgaagatctcccacacgccggaggagccgagctcgcgcatggcatgacgacggccatcccaggcgttgaagttaccgaccacgcgcacggcatgggcgttcggggcccacacggagaacgcggtgcctaccacctgttcgccaggcgtgccgtccacgccgcccatcggatcgtcatagcgcagcacgtgcgcgccaagcgcctcccagagcttctcgtgacggccctcgccgaacagataggtgtccatgtcaccgactgtgggcatataacggtatgggtcgtcctcaatgagcactgcgccgctttcccactcggtcctgacgcggtagtcgggaatcgtgggctgcttcttggtgccggaggccggcacggtagccacgaacacgccgttgtattcgtgggtcatcgggtattcgccatcctgggtgaggatggtcacggacttggcaagcggacgcagcacacggattgtggcggtgtcggcatgcttgccgatgccgagatgcccgccgagaactccgtgggggttgtagaattcagcattgctcaccgcatcgaggtcgccttgggcgacaggcacggtgacggtatcttccttgatcttcgtttctttagccatgacccaaagtctacgtgcgttggagtcgaaaacgctacattggcgcgtcgaaaatggcgaattcttgcccttttcggtgtgtctccgtggttgtgagcgctctcataggggcggtccagaccgcatggcataattattcgagtttttgtgtgtaagccgtcagttctcggagggtacatgtcttacaaagtcggcgatatggtcgtctatccgcgtcatggtgcagcgaaggtggaggccattaccgagcggacggtcaagggagtgacgcgcgaatatctgcagctgtccgtactctcttccgatggtttggtcatcaacgttcccgtggacaatgccaggaaggtcggcgtgcgtgacatcgtctccgcatccgaagtggccaaggtgttcggcatcctgcggaccccgatcatcgagaaagagatgaactggtctcgccgttacaagctgaacgtcgaaaagatcgccaccggtgacgtcaacaagatcgccgaagtggttcgcgatctcgcccagcgcgatgtcgacgagcacggcctgtccgcaggcgagaagcgtatgctcaccaaggcccgcgccattctgacttctgagatcgccttgtccgagaagatcgacgaggcggaagcccagcgtctgctcgacgtgaacctgggctacgagcccgctcaacccggtgacgacaagcatcacaccgccgagcccgaagaggccgcggccgatactttggctcgtgtcgaagccgagaagaagtccaagaagaagtgatttgattgttgaggccccggtcgtgtccttatgcgatacgccggggcttcgtgattcataatcgtttgctgccgttcgtctgggtagcgccatcgaaggggactgcatggggtctgcaggagtgttgatagggcagggttttgacgctcaccgttttgcgcctgccggctcaggccgtgaactgtggattgccgggctttactggccggcgtctgattcatgcagcgaggccgatgccgccaaatacgagggtatcgaaggcgattccgatggcgatgtggccgcgcacgccctgattgacgcgttgcttgccgccgcccgattgggagacattggttcactgttcggtgtcggtgcggacgcgcatggtgccggaaggcatggcatcgatatgctgcaagaagttgtggcgcatctggcatccaacgggtatacgccggcatcggcctcggtggcgatcatcggcaaccgcccgaaaatcggcacacgccgtgctgaagccgaagccgccctgtctgcggcggttggttgcccggtatcggttaccgccaccaccaccgaccatatgggattcactggccgcggcgaaggcatcgccgccatcgccaatgccttggtggagaagatataacaaagcccccgctatgaatttgccagcggggggcaagaaaaatgaatgagattacttccgcactgtctccacggccttggcgatagcccagaacagggtggaaagcgtcacgataatgaagctcgggggggcggggaacatcgccgacagcacgagtccggcccaaatcgacaccaggcacagcacgctggcgatcaccatcgccttgaatggggagccggccagaatattggcggtggccgcaggcgtgatcaccagcgcgaaaatcagcaaggtgcccactgccggcacggcaatggtgattacaccggccataatcgccataaacgccacgttcatcagcccgatcggcacacccttggcctgtgccacctgctcatccaacgagctgaacagcagcgggcggtagatgatggccaacaatgccagcagcaatacgtcgaacacggcgaagccgatgatctggccggtggtgatggtcaggatcgagccgaagaggatcgactgcatctgctgggaggcggaactcgacaatcgcgcgaagaacagacccaagccggtggcgaaggccagtacggtgccggttgcgatttcacgctcggaaacgcgcttgcccaaagcaccgatcaccagtgcgccgcccagtgcgaacacgcccatgcccagtgatacgggcaggccgagcaacaccgcgccggtcgcgcccggcagaccgatatgggccagcgcatgggccgcgaaggtggaacgacgggcgatggtgaagtatcccatgacaccggcggccagggcaatgcacaggccggcgatgaaggcgttggtcatgaatggagcggacagtgtgtccagccattcgggatcatacgaaaagttgatggtgctcatgtccctgtattttctccatgcctgagctgcagcccgttgacgggctgtggatcggctagcttgatgttatcgattctcggcgctgttggcggcactgccattggtggcgttgccgtgctcgtgatggtgcaattgcgccacttcggctgccgtgtgcatatcctgcggctggtcctggggctcatccggcgtcggggtcacgaacatgtcaccctgcggagtggtgaccacctgcacctgtgtgccgtagaggtgggtgagtaggtcggagtcgagcactttgtgcatatcggcgtagtgcgggtgcccgtcgagcaagtagacggcaccggtcagaatcggcaagagcatattgagatcgtgcgcaaccacctggatggtcatgttcagttcacggttcagcttggccagcacgtgtacggtggcgcgttgactggccagatcgaggttggccaacggctcgtcaagcatcagcagttgtggatcgcacaccaacgcctgggcgatggccacacgctggcgcaaaccgccggatagttcggacagacggtactgcgccttgtcggcgatgccggtgaactccatcgcctcgagcgctttggctttctggaccttggtgatggggtggatgccgaatcgggtgccggtcaggcccagcaacacggattgttcggcggtgagattggaatcgacattcgccacatagctctgcggcacatatccgatgcgtttgttcatctcgcccgcaggcttgcccagtacggtcaggctgccatggcaaagcggcaaaagtcccagctcggccctcatcatcgtggttttgccggtgccgttggtgccgacgatggccgtgaccgaaccggtgggaatggcaaaggtgccatgttgccagatgatatggtcaccacgcttgatggcggcatcgctgaacacgatgcaatcggaagtttcactcataacgcccgattgtggcaaacgatgctgacaatcgttctcaatatcgtgtacggatggtggcaaccaaagaaaagggttgtgcggccatctcgacaatggtcgcacaacccttctcgtgcaaggcgtctatcggcattgcacgaatccgatgccgttgtcctttgcttctaactatttgccggagtcggtctggtcgttgccggaggcatcgccggaatcgccattggaggcatcggcctttgccgaatcctgagacgagtcactggatgtggccgccttgcactgacggatgtacttgggctccgggctggaaccggtgctggccttggaatcgtgcgcattggcatcatccgtggcggcgccgtcggcgctggaatcatcggaattcgcgttgccgtccgtggcgtcttcgcagtcatagctcggatccaccgcgtcgatgatggtgttgatgagctggttgatccaggcgttcagcgtgtcggtgtccttgggcatttgttcggagacgtcgactaccggcacatcggcacgaccggcagcgccagtgatcatattggtcgcgtcactggcttcctgcgtgttgttaaccagcacatccacgcccttgtcttcgatgagtttctggaaagactgcaggtccgcgggggccggttcgccgccggaagcggtcgattgcgtataccccttgggcgtctgattcttgaacccgagatcggccatcagataatagaccacgggttcggtggctgcataggtgaggtcggagtgggatctggtgaactcggacgcccatgtttccagcgatttctcatccgcctgccatgccttgagccgcttctggaaggccttcttcttgctggggagtgcctttacatatgcatcggtgatggccgtggccatgctggatcgagcgtctttggagaaccacagatgcgggttatcgccttccatggcacccatgacggaagcggcggatacgatattcgtggtcttggtcatcgatttggtggcccaggaatcgtagcccgcaccgttggccacgatgatttgtgccttggacagcttggcgacgtccgaggtctttggctcgaaatcgtgggcatccacattggtggagttcacgatggacgtgacttccacatcatcgccgcccagctcggcggccagcgagccccattgattgagggaggc

SEQ ID NO: 326 - DNA, 70838 bp, Unknown
  R42_10m  MAG No. k141_6551
tgttcgcggaggggtgcgttgacggtgacgtattggcgacggtgaacatatcggcggcaggagaagataagctgttctcaggggaacatcagcacaacaaaggagttacgcatgcgagatttcattttccataacccggtgaagatctacttcggcaaagggcaggcgcgccatatcgcacaggaggtggagcgtgtcgagggcgccgttctggtggtgtatggcggcggatcgattaaacgcaacggtgcctatgacgatgtgatggctgcgctggcaggaaccgggcgcaaaatcatcgagctgcccggcgttacgccgaacccgcgattggacaaagcgctggaaggcgtacgactggtcaaggagcatggcgtcggcctgattctggccgttggcggtggctcggtaatcgactgcgcgaaatttatttcgttgggttccggcatcggtgacgatgaggatttgtgggatgactacatcgaaaccggcaaaccggcacctgaagggctgattccggttggcgtggtgctcaccaccgcggcaacgggctcggaaatgggagatgcggccgtgctcaccaattgggaacgtaaccgcaagctcggctatacgtcgttcccgctgatgcccaggttctccgtgctggatccaagctacctgatgacattgcccgccgaacagacggtgtatggcttcgaggacatgttctgccacacgtgtgagcagtatttctcctatccggtggacgacaacctttccgacgaaatcgccgagggaatccaacgtcatattctgcgttcgtggcgagcgtgcttgtccgatccgaaagattatgaggctcgctccaatgcaatgtgggattccacgttggctctgaaccgcattatctcgcgcggcaaggaagaggattgggtgacgcacggcatcgagcacgcgctgtccgcatacaccgatatcgctcacggtgctggtctggctgtggtccacccgcattggatggcatacgtgtatttggtcaacgatgaggtgacggctcgctttgcccgctgggcggtcgacgtgtggggtgtgacgcccaccggcaaaaccgatcgcacggtggccgaggaaggcattgatcgctatgtcgatttcctgcgtcgcgtaggtgcgccgctgactctttctgaggccggcgtgcccgacgatcccgcctctctcgacaagtacgccgatcatgccggtgaggccggcggctcattcgtgcagattcaccgtgacgatgcccgagcgattctcgaggcatgcaaggaaccggtgtcgttctgacggttggactaatcccgtgatttgagccgccgcgtgctgtcccgcaccaccaaagacgtagaaagaaccacgcgcttctgaatcttgcgtccttcattggtatcgatgaccatgcgggctgcagtggcggccatgtcttgcaatggctggcggaccgtggtcaacgccgggcccatgtacgcggcggtctgtatatcgtcgaatccgataacggacagatcttcggggatacggattttcagttgacgggccgcctcgtaaacgcccatggcctgtaggtcattgcctgcaaagatggcggtcgggcgactttgttcgtcttcaagtaacgccatggctccttcgtaaccgcctggcgtggtgaaatcgccttcggtgatgagttcgggagaggtggggatattgcgttcggcgagggccgccgaatagccgtcaagccgggcacgtgagcagagcatttcatccggtccggtgatgatgccgatgcgcttgtggccgagttccagcagatgacgggtggcgatgacgccgcccatccagttgtccgcctgtacggagagatcatctaatgccggattgccggaagggtcgaagacgacgaaaggaatgccgtgtgattggaacatgctgcgttccttgtccgtcaagttggagaacaccagaatagcgccaatgggctggcggtcgatgatgccttcaacccaggaagagtcggggtgctgccggtcgccactttccgcaaccatgacattgatgttgtgcggcttggcctccgtgatgatgcccctgagcacctccagcgcccaaatggtctcaaaatcccgaaataccacctcgatggtgcgttgtttacgggagggggagacgcggcgaatgtagccgttgtctttcagggctttgtcaatggcctgccgggccgcctccgaaatatccgccttgccgttcagggctttggacacggtggccagtgagtagccagtctgtttggcgatgtctgcaagtttgaccttgttctcgccgttgcttttgcgctgttctgccgacgccatcattgaccgccttcatcagagaatgttggtatcagtatattcgaaactttcgtaaagtcaatttgacgataaagaatggtatgtatagataaaaaaggttggaatttcaacgattttgatagtaaaaaagccgatataaatttcgtttgaccgtcaaactaaggctctttatgataaaggtatcgaaaacataaagcgagttttcggtaaagttgaagaaggctgatggggtaggtgaaacggcgaagtttcactgaaaacatcattaattaccagctgttagatatgtaactggctgatatacctttcgaaactttcgtaaatcgcggatcggtttcatgctggtcaagaacaataaggagacgacaatgaagttcaagtccgtggccgccgcacttctggcggcggtaacctgtgtcagcatggccgcttgcgggagcggcagcgacacgaacgccgatggcaaggtggaaatcaccatgtggcacaactccaccactggcgacggcaaggcatactgggaatccgccgccaaggcgttcgagaaggaaaacccgaacgttaccatcaagatcgaagccattcagaacgaggatatggacggcaagctgcagaccgctctgcaggacccgaattccgcccccgatatctttatggcgcgtggtggccagaagctacgtgatgtggtcgaagctgggcaagccatggacctgaccgacaagatctccgacaccgtcaagaaccagatggccactgctgaagccaccggcaccatcgatggcaagatctacagcgtgcagcagtcagtgcttcccggcggcatctggtattccaaggatctgttcgagaaggccggtattactgaaactccgaagacctgggatgagttcaagaccgtggtgcagaagctgaaggacgccggcatcacgccgattgccgtaggcggtaaggacgcctggccggccgcccactggtggtactggttcgcactgcgcgaatgctctgctgacaccttcgacaaggcccagtccgataaggacttcagcgataagtgctggacccgtaccggtgatgatgtgcaggcgctgctcgacctcgatgccttcaacgatggcttcctgaccactccggcccagcagggcgcaagctcctccgccggcctgctcgccaaccacatggcagctatggaactcatgggcggctgggagcccggcgtgatcaaggacctgactccggacaagaaggacatggccgacctcggctacttcgcattcccgaccatggacggtggcgaaggcgatccaactgccatcatgggtggttccgatggcatggccgtgggcgagtgggcgcctgaagaggctgtggacttcctcaacttcgtctccgagaaggaatggcaggagaagtacgctgaggcgttctccaccatcccggccaacaaggaagcccaggatgtggtgaccaacgaggctctgaagcaggtgctgaccgtctacaacgacgcatcctccgtgtccatgtggctcgacaccgtgttcggtcagaacatcggcaacgcactcaacgaaggcgtggtcaacatgatggccggtcaaggttccgcccaagacatcgtcaagggtgttgaaaccgctgcggccaagggctgattcgctctgacccgaccgtaattcccgggctgcgcgaatgcttgcacagcaacaaccgcggcccaatttgttttcttaggaaggcctcaacaatgtcagtttcagcaggcgcgagggtacagcgccgcacgtcgggcttaagcgacaaggctcgcaaacgtatcgaaatcaccatcctttcgcttcctgccctgatcatgttcctcggattcgtcatcctgccggtgttcatggccggctactacggattcttcaagtggaagggctatggcaagcccaccgtcaacggccagttcatcggttttgaaaactacaagatcattctgaccgacccgaacttccagcaggcattggggcacacgctattcgtggtcgtcgcttcgctcgtcatccaggggccgctggccatcctcttcgccctgctgctcaaccagagattcaagggccgcgcactgattcgtaccctgattttcgtgccgtacgtcgtttccgaagtcatcgttggcaccggctggggcctcatcctccagaccacaggcgcattgaatgcgctactcaagaaaataggacttggcggggcggactggatctccgatccgaaaatcgccatctggacattgatgttcatcatttcgtggaagtacatcggcttcgccgtcatcctgatgattgccggcatgcagtcgattcccgaagacctctatgaagccgcgaaagtggatggtgctggattctggcgtcagcagtggagcatcaccctgccactgctcggccccaccattcgtatctgggcattcatgtcgattatcggttctctccagctgttcgacttggtctacatcatctggggtcagtacgtgtcgtctaccgcaggaacgtccaccatggcaacctacatggtgcgcgaaggtcgactcgccaacaactatggttacggttccgccgtggccgtggtgattttcatcatctcgctggtcattgccttgacctaccagcggttcgtgcttaaccgagatctcgaaggtgcgctcactgacgagagggatgccaagcgtcgtgccaagcgtgcggcgaaggaagcggccaagcttgccaaggtcaatggcaatgccgcagcagttgcaaatgaggtggtttcacaatgacgaccgcagtctccccgtccgtaggcaagggcaagaacaagacctatgatccgtatacactgagaaaatccgcaaagaccccgtggggcaacccggtcgtctacttcttctcactgctgcttgtggcgctgtgcgttggcccggtgctgtacatcattatcggcggcttccgcaccaattcgcagattacgagggacccggccggctggcccgatccatggaactttgagaattacaagacggtgttcacttcgaacatcttctggtcggaactcgtcaactccctgatcgtctccattggcacaatggtgggcgttgtggtgctggccttgatggtgagcttcgtcattgcccgatacgagttcaaattcaacaaactgctgtactcgctgtttgccgccggcatgatgttccccatcaccgtggccatcaccccgttgtatctgctgctgcgcaatctgcacctgatcaactcgcatctgggcattatcctgccccagatagcattcggcctgccacaggccatcatcatcctggtgccattcctcaagtccattcctaaggaactggaagaagcggcagagctggacggctgttctcgcatcggcttcttcggccgtatggtgctgccgttgagctggcccggcgtggccaccgtcggcatcctgagcttcgtgagcagctggaacgcctacatgctgccgctgttcctgctcaacgattccagcaagtacaccttgccgctcggcgtgcagatgttcagctcccagcattcagtcgataccgctcaggtactggccttcacctcgctgtcgatgatccccgcgctgatctgcttcaccattttccagaagaagatcgttggcggcctgaccggtgctgtcaagggctagtcgcagcaaccataaccgtgccgtggaaaggtacatggctctttgggccgattcctttcaacctcttcctttcctcctttccacggcccctttcttttcaatgaggagaagaccatgaagatctccaatcccgtactccccgggttcgatgcggacccctcgatgattcgcgtcggcgacacctactacatcgcaaattccacatttgactggtggccgggagtccgtttgcatgaatcccgcgacatggttcactggaatctgctgcccgggcccttaaaccgcgtttcccagctggatatgaagggcaatccctccggtggcggcatctgggcaccggacctgtcttatgcggacggcaaattctggcttatctataccgacgtgaaaatcgtcaacggcgcgttcaaggattgcgcgaactatctggttaccgccgacgacattcgtggtccgtggagcgatccgattcgggtcaatggcgtcggattcgacgccagcctattccatgataccgatggacgcaagtatctggtgcagcaaacctgggacttccgtgaatatcatcatccgttcgacggcatcaccttgactgaattcgatgtcaaaaccatgcaattgaagccggaaacagcgcgcaccatctggcgcggcaccgatgtgaaattggtcgaaggaccgcacctctacgccatcaatggctggtactacctgttttgtgcggaaggcggcacccaatacgagcaccaggagtccgtggcccgttcgcgtaccttgggtgagctttcattcgaaagcatgccgagcaatccgttcctctccaacttcgatacccccggcacctacctgcaaaaacaggggcatggggcgctcgtggatacgcctagcggcgaatggtattacgcttcgctgtgcggcaggccctggcggcacgagaacgagccggctcatggtgtgcgcggctggtgcacgctcggccgagagacttcgatccagaaggtcgagtgggatggcgacggttggccgtacgtggtcggcggccatgggggagagcgttacgtcgaagccccagccgacgccatcgcaaccgaggcccctacgaatcatagtcagcatgacgagttcgaatcaaacaaactcgacctcaactggaacaccctgcgcgtaccattcaccgagaccatgggccgcgtgggcggcggctcgctgaccttgcgtggtcaagggtcgctggcaaacctgtttgaactgtcgctggtaggacgccgttggcaggcgttcgatttcaacgccgaaaccaaggtgacattcgatccaagcaactacatgcagatggccggcctgaccaacttctacaaccacctgtgctggtcatgggcattcatcacctgggacgagaagcgaggacagcgcgtaatcgaagtcgcccagaacgatttcgatacgtacacgtcgttcctcaaagacacagccatcgccattcctgatgacatcgaatccgtatggttgcgaaccaaagtgcgtacgcgtacctacacctacgagtattcgttcgatggcaagacatggcatgagattccggtgacgctggacgccgccgtgctctccgatgatcgtgtggcccaacgttatggcggattctttaccggcgcgttcgtcgggttggtggccgtggacctttccggatacggcaaagaagccattttcagccatttcgattacatggaaatatgatgacgccaggcggctttcctgataatcagggaaagtcgcctgactattcggtactggggaatgaaaggcgacacttgtggcaagcgacaatgaacattgcggcgaccgtggccgcgaatgtaccataaccgtctccaacccggtgttgcgtggcatgtacccggacccgtcctggatatgggatacgacgcgcgaggaaatcgtgctggtcaactcctcgtttgaattggtgccggggttgcccattcatacgacccgtgatcttgtgacgtggacgcgcacggcgaatgcggtggatgaggcgatgtctcatcggctgctcattgatggcgtcgaggattccggcggcctgtacgcgccgaccattcgccgtatcggcgggcgatatgtgatcgtatgcaccgtggcccgcgtggatgaggtgaaggcgctcgctgcgggatgctcgcagaaggatattgataactgccgtgacgcccaaggcaatttcgtcatcgaggccgatgagttgaccggaccatggcgcggcccgtactgggtggccggggccgaaggcattgatccggacatctttgaagacggcgatggcacagtgtggtggacgcaaacgcgcccggcattacacccgcagtgggatggtcaaaccgagatctggacgcagcccatcgccccaggcgcgtggacgttgcaagaccataaaaccgtgatttggcgcggctatggcatggatgcggtatgggctgaagggccgcatttgtaccgggtgggcgattacctctacctgatgaccgccgagggcggcaccagcttcgagcacagtgagatgataatgcgcacgcacgcaccgcgcggattcgcggcggcgctcgccggttttgagaagaaccttgctgcgcaagatatctggattgagctggcgcgtgacggtgaacgaagcgtggtgggccgcgatgaccggctgtttgaggcttgcaaacgcaatccgatcctcacacaccgtcatttgggagcgggggagctagtccaatgcgttgggcacgccgatctgctgctgcatccgaccgtcggctggctgctcgtgtgtcttggcgtacgcgagactccgggcgaggaacccggagaaacgttcagctactgtggccgggaaacgttcgtggcaccggtcgtatggcagcacaatccggtctcgtggaagctggacggtggggagccgaataagcgtatcgatatcgacgatcccggttggccggtcgtggctccggggcttggccggcttcccgagaagttggtcgtggacgttgacgaggatggattgccatgtgcagtgaggggtgtggattctgcggggtgtgattgcgctgctggtaataatgccgcatgccctgctgagctcatccagctcgacgatacccgcctagtcggcgttcgaggccgtgacgattaccggttcctgcgtgtcgacgggcaggaatatgccgcgttcacccggcccgaatacacgatgatgatacatcaggattccacccatgctgtcatggtcatggcggaagcggaatccggccaattgacggccgaaatcaccgataggggagataagcggtgcattgcgcttggagcgcttggagccaacgaatggttcggattgcgcttgcatggcaatcgtttggaattccttgccgggcagcctgcatctgacagcattgatgagggaacaatgcctgatattgcactaattgcgcacgcggacgttacttatgctcgtatcatggcagattgtgatgcgcgattcctcagtaccgaatgggccggcggattcgtgggttgcctgatcggcgtaaaacggcggtaatggtctcagcccgctctacaatattgtgcaatcatattgtttaatcgttaaacaaatgcaagggggcaatcgatggcgcacgatctcgaacaactcaagcaagatcacccggatgtggcgaaactgttcgccgatgactggttgcagtaccgtaagtcggagattttgccggaacttacgcgcgaggcgcagtccacgtgcgatcgcatcaatcgcatctactttgaagacaccgccgaagctgagcgactgttccgcgaactcgtgcccgaggccggcgagggcgtggacttccgcccgccaatccggcttgattacgggctgggcctgaaaatcggagaccgtacgttcatcaacatggacctgctgattgtgggcggcggcccgatctccatcggctccgattgcctgatcggcccgcgcgtgagcatctatacgccaaaccacgccatcgcccgcaagcctcgactggaaggctggcagcacaacgccgacgtgaccatcggcaacaatgtgtggctgggcggcaatgtggtgatctgccccggcgtcaccatcggagacaactcgattatcggtgcgggcgcagtcgtcacccacgatattcccgccgattccatcgccgtgggcaatccctgccatgtgattgccgaagtcccggatgactggactcctgaagagcgggccgctgccgagggtcggtaggtttgctgctctgaccaactgttacggcgaaaccgggatacaggagagaaaggaacaatgcaatgacgcaatatcatgtttccgcgcaggcggcgaagacgaacggcgccggcagcgcggccgacccgtttctgaccatcggccaagcggcggccatcgcccgagccggcgatgaggtggttgtgcatgccggcacctatcgggaatctgtcgacccccgattcggcggcgagagcgccacgaaccgcatcgtctatcgtgcggccgcgggcgaaccgcgcccggtaatcaccggctccgaacgtatcgacacatggcagcccgaaggtgatggcgtgtggaaagccgtaatcctgaacgcattcttcaacggatacaacccgtacgtggaaaccgtattcggcgattggaccgtatacccggacccaaaggtcgaggtacgccacctgggcgatgtgtatctgaatggcaaatccttctacgaagtcgcctcgctggacaaggtgcgcaacccacagcgttgggataccggccgtgacgccgccaccgattccatcgtgccgctgattgatccggataccaccgtgaacgtgtggtgctgtgcggtcgatgatgaggccacaaccatttgggccaatttccatgaagccgacccgaatgcggaacttaccgaaatcaacgtgcgcgagacctgtttctacccgagccgcccgttcgtcaattacattacggtctccggctttgaaatggcgcaggcggcctgcccctacacgccgccgactgccgatcaggtcgggctggtgggcccgcattggtcccgcgggtggattatcgagaacaatcgcattcatgacgcaaaatgttcggcgatctcgctgggcaaggagatctccaccggcgacaacgaatcgacgcgcactcatcgcaagtccgggtaccaataccaaaaagaggccgtctacaaggcgctgcatgccggttgggagaaaggcgtagtcggcgggcacgtggtgcgcggcaacgtaatctacgactgcggccagaatggtgtggttggtcatatgggctgcgccttctctctgattgaaggcaaccacatataccacatcggcaccaaacgcgagttcttcggctgggaagtggccgccattaaaatgcacgcagccgtcgacgcggtggtgcgcggcaaccgggtgcatgattcggtgctgggcatgtggcttgattggcaggcgcagggcaccgtggtggattcgaacgtgttctaccgcaacacgcgagatgtgatgaccgaggtgacccacgggccgattacgtttatgaacaacgtgtttgcctctgagttcagtttcgacgactatgcgcaaggcgcggcgttcgtcaacaatctgttcgccggtcgcattcgtcacaccgccgtcttggaccgatccacgccataccatttcccgcacgtcaccgatgtggccggcgaggcattcgtctacggtggcgatgatcggtacatcaacaacctgttcttggctgtgggcgattccgccaaaccgttgcgtaccgcggatgccgccggtgcggccggtatggcggaagccggaaccgcgttctttgacggctatccgtgctcgcttgcggagtatgaacagctgattgaagaggccggccttggcgatgaggagttgtatcgcagcgtgaagcagccggtattgctggcttcgaacgcctatgtttcgggcgcgaaggccgcttccagcgaagccgaggctgtggtgagtgatgacggctcttcgttggcattgcgcgaaaccgatgatgagctatggatgaccatctcgttgcccgaatcgattcggtcggcgactggaccggtgatctccactgctgatcttggccagccgcgcatcgttgaggagtatttcgaaaatcctgatggttcgccgattatcgtggaccgggatgtcaccggtgccgtgcgcggcgagcgttcggcccgaggcccgttggcggaatatgacgatagggaagtacttatctggtcgaaatgacggaatctgcggtttacggtttgcagcgcgacatcatgatctggttgctggcctgttgaatggccttggcggggtcaatctgccagtgtttggcaggttggcttcgctgaggggtgttgtgtggggtcgttttgccagtgtttggcaggtcggccccgctgagaggtgctgttggagccgggccgccaatgtttggcaaatcagcccttttcggtttgcattggtaacaaattcgatatatggttaaatcaacgaactaaatattgtaagtccatgcgtacctacgcaacgtcaatggagatactgctatgcgcgcacatcgtattttgctgctctcgctctgcctgttggccgtggcctatgccgtcctgctgtttgttgcgccggccgccgcgccaatcggcatcgcactgaccgccgccggtctggtgctggtttcgacacgctatgcgtggcgtgccaagttcctcgcgttattcaacgaagcgtgattgatgcatcacggtgattgactggttcggttcgtcctaggactcccatgcaattcccggccaattcgcctgtcgcattatgtatcgtgcggttatatggagtcatggccgcaaggcctgacaattgaatcttcatcctctcttctcctttgaagcccggcccgccgctgggctttttctttggtcggcatgtcggggcagtgactggtatttttgtgaccgatctcatggcttcagtttcggcgtgtcgttatttccgacgaatcgtatcgataaaattcatgtttcgtagggtctataaaaatgccggaaaatcagcgttgttaccgctcacatttagttaatcgaatgaatcaagtatgccataatccgctcagttgtggggaaaataggcgatatcaaattgttaaatcaaaaaactaatggtatatttttatgcaggttcggcaagggttgcctgaccaaaaggaagaggaaacaagttcctatcaatgtcgaaaggaattcccatgaataagtggaccaaggtgctcggtgtggttgctgcaaccgccatgctcatcccgctggccgcctgtggcggtagccgtggcacgaccactgccggtggcaacggcggtagctccgacaccgtcaaggtcggtatttcgatgcctgagcagatgctcgagcgttggaagatcgatggcgagaacctgaagaagcagcttgaaggctacggctacgacgtcaccctgcagtatgcagatggcaagaccgatctgcagacctcccagattcagaacatggccaacaacggcatgaactacgtagtcatcgcatccatcgacggcactgcgaccggagctgctgccgagcaggtcgcctccaacggcggcaaggtcattgcctacgaccgtctgatcatgaacaccgacgccgttgactactacgccaccttctccttggaggatgtcggcaagatgcagggcgagtacatcgagcagaagctcggtctgaaggatggcaagaagggcccgttcaacgtcgaactcatggccggttccccgaccgataacaatgcaggctactacttcaagggcgcttgggacgtgctcggaccgtacttcaagtccggcgtgctgcagtccaagtccggcaaggttccttcctctgctgatgattggcagtccatcggtatcgataactgggatcgtcagaaggcccagaacgagatggagaaccgcatcaactccttctacaacgatggcaccaagcttgacgccgtgctcgcccagaacgacgccgaggcaaccggtacctacaacaccgtagaggccgctggctgggactactacccgatcatcaccggtcaggacgccgagaaggccaacgtgcaggccatcgtgcagggcaagcagtccatgaccgtctacaaggacacccgcgagctggccaaggccaccgccgaaatgatcaaggacatggtcgatggcaaggatccgaaggctcctgacaccttcaacaacggcactaaggatgttccgtcccagctgctgaccccggtcaccgtggacaaggacaacctcaaggaaatcctcgtcgacggcggctacatctccgccaaggatgctggcctgtgatccgcaggatcgctgattcgattcatccaacggcctaacggctaacagataagggggcgccgcgctgcgtggttgcggtacggtgccttcatcatgcacaggggcattactatcggaggaggtaactgtggctacgaacggtgacgtgattttggagatgcgtcatatcgtgaagcgtttcggcccggtcaccgcgttgaacgatgtgaatatcatggtcaagaggggccagatgttctcgatctgcggtgagaacggtgccggcaagtcgaccttgatgaacgtgttgtcgggcgtgtacccgtacggcacgtacgagggcgacatcgtgtacaacggcgagacgtgcaagttcaggacgattcgcgattccgaggagaagggcatcgtgatcatccaccaggagcttgcgctggtgccgtacatgtcgatccaggagaacatcttcctgggcaatcagaagaggaagggcatcgcgatcgatgccgacgagcagcgccgcgtcgcgtacgacgtgatgaggaaggtcggtctggacgagaacccggacaccctgatctcgaacatcggtgtcggcaagcagcagctggtcgagatcgcgaaggctttgaccaagaacgtgaagctgctgatcctggacgagccgaccgccgcgttgaacgacgaggattcgaggaacctgctcgacctgatcgacgggcttcgccgcgagcagggcatcaccgcgatcatcatttcgcacaagctcaacgagatcgcctattccgcggacgcggtgcaggtcatccgcgatggccgcaccatcagccatatcgacatcgacgcggcccacccgctggaccaggatgtgctgatccgcgacatggtgggccgtccgttgaccaaccgctacccggtgcacacctccaggatcggcaaggagatgttccgcatcgaggactggaggatgcgccacccgctcgacgaggcgcgtctggtctccaaggacgtgagcatcaacgtgcgtgccggcgagatcgtcggtctggccggcctgatcggcgcgggccgcaccgagaccgcgatgagcgtgttcggccgccagtacggcaccaacgcgtccggcaggatcttcgtggaaggcaaggaagtcaagttcccgaccgtgcgttccgccatcgaccacggcgtggcctacgcgaccgaggaccgcaaggtgtacggcctgaacctcatgaagacgattcgcgagaacacgtccctggccagtctgaaggaactgtcgaacaggctgggcgtggtggacgagacccgtgagaagcggacggccgagaagtaccgcaaggagttccgcaccaaggcgccgaccatcgagatgcccgcgggcaacctgtcgggcggcaaccagcagaaggtcgtgctggccaagtggatggccaccgacccgaaggtcctgatcctggacgagccgacccgaggcatcgacgtgggcgcgaagtacgacatctacgagatcatcgaccaattggccgactcgggttccgcggtggtcgtgatcagctccgaactgcccgagctgctgggcatctgcgaccgcatctacacgatgagcaacggcgtgatcaccggcaacttcgacgccaggaagaccagccaggaggagctcatgcgctacatgacctccgccgtcccgctgcccaaggagcgggccttcgcctgacctccgcgcgaatcgttcccacgtgctttgtttgaaagtttgaaaggataccctccgaaatgtctaccgcaaccgtaacccccgcagccaagaagggcggggacgaacagagcctgaaggccctgctgttgggcaacatgcgttcctacggcatctacctggccctcgtgctggtgatcgtcgtcttccagatcctgacgggcgggcgcctgctgaatccgaacaacgtggtcgccctgttccagcagaacgcgtacgtgctcgtggccgccatcggcatgctgatggtcatcatcgccacccacatcgacctgtccgtgggctccgtggtcgccttcatcggcggcgtgggcgccctggccatgaagcacggggtcccgtggtgggccgcgatcctgctcatgatcgcgatcggcctggccatcggcgcgtggcacggcttctgggtcgcctacgtcggcgtgcccggcttcgtgaccaccctgggcggcatgctcatcttccgaggcctggcgaccgtggtcgccggcgagtccatcccggtggccaacgcctcgttccgcgccatctccaaggactacatccccaccatcttcgtcgggccgttcgccctgaccgccctgatcgtcggtctggccgccatcgcgctcgtggtctggagccaattgtccaagcgcgccagggccgtcaggaacggcctgcccgcccagcccatgagcttcgtcgtcctcaagtgcgtggtcgccgcgctggccatcggctacgtgacctacctgctggccatgtccggcaacgccacccagggcggcatcccgatcgtgctcgtcatcatcggcgtgctcgtgtgcgtctactacttcgtcctcaaccgcatggtcttcggccgcaacgtgtacgccgtgggcggcaaccgcaaggccgccatcctctcgggcatcgacaccaggaaggtcgacttcgagatcttcctgaacatgggcttcctggtctccatcgcctcgatcatcaccctgtcccgcctggcctccgcctccgcgcagaccggcatggagttcgagatggacgccatcgcggcctgcttcatcggcggcacggccgtcaccggcggcatcggcaccatccccggcgccatggtcggcgccctgatcatgggcgtgctcaaccagggcctgtccatcatgggcgtggacgccgcctgggtcaagaccatcaagggcctcgtcgtcatcgccgccgtcgcctacgacctgctctccaagaaaaagaaaggctgagctaaacctggcctccgggcccgcccggtggccacggggatggacctgagttccattcctcctccgaaagggacgctgttgcacgcagcgtcccttttccgtttgtcgcgatggatggatcccggtgtacgttcttcgcgaaatcagccctgactcggggtgtatttcgacaatatgattcggcgatgtgcctcagcggatatgtacggccaatgaaaaacgggataccgatgtcgatatcccgctttcagcgaataggtaaggccagagcttacttcttcttggctttcttgacgcgcttgggggcgggagccgctttcttgggctcgaagaacggccacttgtgcaaagcccaggcgtgcagcgcgggaatcttggcaacggcgaagccgatgaccagaccgattaccatggcccaggtctccagatcatggcctgcgaccagcaagccgatgaacactatggcaacgatgaagctcaccatctgcgaggcctttgactgcttggcggtcaccagatcggccttcatgggaacgagccccagaaacaggccgcaaggcgcgcatatgacgcccagcaccacgctgatcacggttgacacggttgttacttccataatgttcctttgctgaagtgggatgattcgcttgattcgggcgaacgataacgatggttactggcgattagtggttggtgatgcatcggcatccgtggttgcgacgtcggtttcgacatcgtcatcggtgtcgtcctcggatccctcggcatctgcggtgtcggtatcggtaccgtcaggcgtatccgcggcgtcatcgttctccgcatcctccttgctgggttgacgccaccacaatatcaatgcgttggcggcgcagtagacggcggcaacgccgatgcataccaaaaagatgatgtttgaggtgctgatcatcgtgccatcggccattgcttctttggcggattgccatatccaaatcacgcatgcgacggcggtcagggcgtacagcatcatacgggagcggtcgttcatagaagaatctccagacttgttcaaacgacttgattatagccgtatttgtggattgcgtgggaaacgaaaaatgccgccatgtgtgcttcagcgaggagcgcggtataacagcggctcttcgcgatgcttgccatggcggcattcatcaggaatcgttattcagttgttatctcatggattgtgctggcagcgtatcagccgcgcgccttggcgtatgcctcgtacacggcttcggtgggctcgccggtctccacgccctcgatggtgagttgccaggtcagcggttcggcctcgccggacagcacccaggcggcctgacgggcggcgccgatggccacatattcgtcggtggccggacgggtcacgtccatgccgaggattgagggggccagcgtgcggatggccacggacttcgcgccaccgccaatgagcaggatgcggttgatctcggcacccagcgaacgaatcagctcgaggcagtcgcgctgggaacacagcaggccttcgacgaacgcacgagccagattctccttggtggtgttgtgcagggtcaggccagtcagcgaggcggtggcgtccggacggttcggcgtacgctcgccgtcgaagtacggcatcagggtgatgccgccggcacccggctcggccttaaaggccagttcggccagctcgtcgtagtccacgccaagggcggcgcgaccggcgtccagaatgcgcgaaccgttgatggtgcaggcaagcggcagataatgaccggtgcagtcggcaaagccagaaatcgctccggtcaggtcgtacaccgggttttcagcgatggccgcggccacgccggaggtgccgagcgatacggacacatcgcccacggccatgccgaggcccagcgaggccatggcattgtctccgccgccggggccgatgatgcagccgccttcaacgtccttgccggcaatggcggggtcggccttgacggcggctgcctcacgcgggcccagcacggtgggcagcacaatggcgtcggcgtgggccttggcggcttcctcgccctcggcgggggtcagcaccatggcgatgagatcgcggcggtactcgtcatgcgcggcatcgtagtaaatggtgccggaagcgtcggaacggtcggtgaacagggcttcgagatgagcgtcctcgccctcggccaccgggccatagccggcgatacgccagctcagccaatcgtgcggcagacagacggcggcaatcttcttggcgttctcaggctcgttctcggccacccacgccaccttggtcagcgtgtaggaagcgacgggggaggatccgacggccttgacccagcgctgcttgccgcgggcggtcacgtcgtccggttcgtcgccctcggccggagttgcaccgagcttgtcgatcagggcggcggcctgcggggcggaactggtgtcattccagagcatcgcatcgcgaatcacgttgccctgcttgtcgagaatgaccatgccatgctgctggccgccaaccgcgagggccgcgacatcgtcaagcccgccggcctgctcggcggccttggtgaaggcctcccaccagaattccgggttgaccgaggtgccatccgggtgcttggcctgcccgaaccgaacctgttcgccggtggcggcgttcgtaatgcggacctttgttgattgagttgacgtatctacgccggcaaccagtactttcgtcatgcattcctcctcgatgagggtcgcgcttgcaagtttcggcgcgccacaaccaataagttagacgattaaactatactgtattgcagtgtatgattgcaaacggaaacacgcgagggtgcgtatctggttcaatcgtttgacgcacaatatcattgtgcgatagacggatgtgagcgcctgtgcggcgttcgagactaggggtgcaaggaggtaggagcctatggcaagtctacgcaggatcaatcaggaggatctgcgcaaccataatttgtcggtggttctcgacactttgttgcgcgcggagaaacccatgagcagggccgacttggccaaggaaacgggcctgaccaaggccacgctttcgctgttggcctcgatgctgatcgatagtggcgtggtgcaggaaggcgagccggtcgtctccaccacatatgggcggcccagcacgccgctggagattcatggcgggtccatcgccggcatcggcctgcagatcaacaccgatggctacggttgcctggcactcgatctgaacggcgacactctcggtcaggagtgggtgagtgaggatatgaccggcactgacccgtacgagatcttcgccaagctcgatgcgatgacctttccgttggaaagccgactcaaacgacgtggctgcaaagtggtgggagccgggcttgcgctgccgggcatcgtcaccgacgacatgtggctgttggtggcccgcaatctgggttgggaaaacgtcaacctcacccggttcaacgtggtacgccggctggatgtggtggccggtaacgaagcgaagatggccgccatcgctcagattccggggtatgccaccgaacgtgcgtccttcctgaatgtggtggatcgcacggattcctttatttacctgtctaccgatatcggcatcggcggcgcggtggtgcgtgacggcgaagtggtgatgggctcgcacggattcgccggcgagatcggccatctgtccgtggcgacggatgggccgttgtgcagctgcgggcgccacgggtgccttgaggcgtttgcgggccgtcgcgccttggtcgaggctgccggcattgccgaagatggggatgccaccagcagcgaggccatcgatacattcctccagcgttggcgtgcgggggatccagacgtggccaaagtggtcgatcaggccgctgatgcgctggtttccgccatcgcttccgccgtgaatctggtggatgtcgatacggtgctgttgggcggactgtggacgcacttcggcgacgagctggccaccgtgcttgaaggccggctgcgttcggaaattctgggatacccgaatgtgaagatccgcgtgttcgtgccgccggtggcgctgcatccctcgctatatggcgcggccgaaatgggcttgcgacggttcatcgagaacccgttggggtacatgggggagaagtagcgccgggagatgctgcttgttgtgctggcgggtgcatggcatgggcgcatggtgcgtgtgccggcgttggtgggttcatgctacactttgcaagttggctgttttacgcagcgaacgtggggccgtagctcagtcggttagagcatgcgactcataatcgcccggtccagggttcaagcccctgcggccccactcttttgcgtcgcctcctgcggcggcacagcgcgtcttcacgtccagataggcgcgtacaatcccttaggttccggttcacgtcctgccataggggcatgacgacccgggtcccccgaatccataggagacgtaaaatgcagcagggtatccatcctgattaccaccccgttgaggtgacgtgctcgtgcggcaacaccttcgtgacccgcaccgctggcaaggaagatcacatgttcgttgacgtgtgctctcagtgccacccgttctacaccggcaagcagaagattcttgacaccggtggccgcgttgctcgcttcgagaagcgctacggcaagaagagcaagtagcatacttcacgccagtccgattcgattcggcatgctccggcatacccgatcgaggactggcgtttttgtattctttgacatttttttgacctgcacaaccgaatagacaccaccgtacgaaagaaagcgtgttatggcagacgaacagttcccggcggcggcaaccgcgcttgaggagtaccagtccatcgaagaacagatggcgagccccgaagtcgtgtccaacccggacaagctgcgcaagctgggccgtcgtcacgccgaactgggtgccatcgtgggcgcctacaaaacctggttgcaggtgaaggacgatctggcagccgctcaggagatggccggcgaggacgccgacttcgccgaggaagccaagcgtcttgaagccgaactgcccgacgccgaggagaagttgcgtaccgcgctgatcccgcgtgacccggatgatgcacgcgacaccatcatggaaatcaaggctggcaccggcggcgaagaagccgcactgttcgccggcgacctgctgcgcatgtacacccgttacgccgagaagcgtggctggagcgtgaacgtgcagtccgagaacaccaccgagctcggcggcgtcaaggacgtgcagattgccatccgcgccaagggcacgcccgctcccgaagacggcgtgtgggcttcgatgaagtacgagggcggcgtacaccgtgtgcagcgcatccccgtcaccgaatcgcagggccgtatccagacttccgccgccggcgtcattgtgttccccgaagccgacgaggatgacgacgagatcgagatcgatccgaaagacctgaaaatcgacatcttcatgagctccggccccggcggccagtccgtgaacaccacgtattccgccgtgcgcatgacccacctgcccaccggcatcacagtgaacatgcaggatgagaagtcgcagatccagaaccgcgccgccgcgctgcgtgtgctgaagtctcgcctgctggccatgaaacatgagcaagaggccgccgaagccgccgacatgcgtcactcgcaggtgcgttcgcttgaccgctccgaacgtattcgcacgtacaacttcccggaaaaccgtatcgtcgatcatcgcacgaattacaaggcctacaaccttgacgccgtgctcgatggcgacctgcaggccgtcatcgattccgacatccaagccgacgaagccgaccgtctggccaaccagcagtgatagccgacctgattcgtcaagccgccgcgcagttgcgcgaagccggcatcgagacgcccgaacatgatgccaaactgttgctggccgaggccgtggacgccgagctacgcgatatcgacaaggccatgctgatgggggagggcctcgattcgctggcccccgccggcgggggctgtcgcgcagcgactgggggtggtcaggccgaccccgtcaccaatatccttgccgccttccacgccatgctttcccgacgcgccaaacgcgagccgctccaatacatcaccggccacacgcctttccgctacctcgacctgcaggtgggccccggcgtctttatcccgcgcccggaaaccgaaaccgtagtccaggccggtcttgactggctgacccggcacagcatgatccacccgcgcatggtcgacctgtgcgccggttccggtgccatcggcctgtcgatagtcagcgaagtgcccggcagccaagtatgggccgtcgaattatccccgcgtaccgccgaatggacccggcgcaatctggcggtaaccgcgaaacgatacccctccatcgcctccaattaccaactggaagtcgccgacgccacgtcactggccacgctggcgcaactcgacggcaccatcgacatcgtcatcaccaacccgccctacgtgccacaaaccgacatccccgaacaaccagaagtacgcgactgggacccggaactggcgctatacggcggttcggcagacggcacgctcatccctgaacgcattattgagcgcgcctggcgcctgctcaagcccggcggcgtattggttatggagcatgatctcacccaaggcgagcgattagtggcctatgccaaggccacaggtttcgccaccgcctccaccggcaaagattggaccggccgagaccgctatctcttcgccgagaagtagccacaggcgcggggccgccgctgctactgcgcgtaatactgcagggcggaggcgtccgcgtccgtgatttcgcgaatcggacgggccggattgcccacggccacggtgtgcggcggaatatcgcgcgtcaccaccgagccggcaccgatcacgcaaccctcgccaatcgtcaccgggcaacaatccagcacagtgaagttgaagttggcgaacacgcgctcgctggcgcgcggcatacgcagttcgacgggaggcatggtggtggattcagcattgattccgctcattgaacactcctgtaatttcgcgaaagagcatggatgaactcattgtatctacggtctgtgcgtatggggcgaatcggaaaacagcagtacggcaaacgagcgatgatgaactatgcaagtcggggcgcaatggtgcaatggtagattgtgaatacacaggcgaacggaggtgtcgtgagcgtggagggcggaacaacgctgaaagtcacggatgaatcgctggcacaagcggcgcgtgtcatccgggatggtggattggtcgtcattccaacggatacggtatatggagtggcgtgcgatccgtgtaataaggccgccatcgaccgtatctaccggctcaagcgtcgcccgcgctataaggcgttgcaggtactgctcgcatccaccgaccagcttgatgaactcggtctcgacctgccgtctccactgaatcgtttgtcggcggcgttcctgcccggcgcgttctcgccgattgccgtagcccggcccgactgcacgttggagactttggccgacaccgccgatggtcgccccggcacgcagggcatccgcatccccaattcggcgctgtgcctcgcgattctcaaggccactggtccgctggccgcgtccagcgccaaccgttccggcgacgaaagcgcacagactgtccaggaggcggttgacgcgttcggcaacgaagtcgacctgtatctggacggcggtcccacccaaggccatgtctccagcaccgtcgtcaaagccgatccgtatgcgcgcgacggcatcgagatcctgcgtgaaggcgtcatcgcccaaaacgtgattcgcaaggccctccacctcaacggcgggggactcggcgcatgagaatctacctactgattgccgccatcgccggtggcgtcacctggctggtgactccgctgattcgccacgtcgccatcgaaatcggtgcggttggcgaggtgcgtgcccgagacgtgcacaccattcccacgccgcgcatgggcggccttggcatgcttatcggttttgccgtggctaccgtattcgccagtcggctgccttttctctcgggattgttcaacggcaattaccagatgtgggtgattcttgccggcggcatcatgatcagtctgctgggcatggccgatgacctgtgggatctcgattggatgctgaaactcgccggccagctgctgatttccgtattcgtggcttgggacggattgcagatcatctcactgcctttgggcggttcgctgattaccgcctcgccgagtctgtccatggcgatcaccgcattcctgatcgtcgcctcgatcaacgcggtcaatttcgttgatggcctcgatggtctggcggccggtatcgtggcgattggtggcatagcgttcgccgcctattcgtatatcatcgcccggtcttccccgagttatgcttcgttggccacgctgatcgacgtgatgatggtgggtatctgcgtgggcttcctgctgcataattggcatcccgccaaactgttcatgggtgattccggttcgatgctgcttggctatctcatcacctgcgcttcgattgtgatgaccggacgtcttgacccggcctcgattcatgccagcatctatctgccggtgttcatgccgattctgttgccggttctggtgttgttcctgcctgtgctcgacatgtgtctggcgattgtgcggcgtttggccaaaggccagtcgcccatgcatccggaccgtatgcacctgcaccatcgcatgctgaagatcgggcattcggtgcgtggcgccgtgctgatcctgtggggatgggccgcgttgatcgcattcggttcgctaacgattctgttcttcaaagcgcagcacgtggccgtgggcatggccatcgctgtggtggtgctgaccatagccacgatgtacccctatctgcggcatcgtattcccgagatccaagccgagaacctgacgttcgaatccgcacgtaaaaacgcgcagcatacagtgcctaaatcgcagtctgcagtaggggagagccgggattcgattggctctcaggcagcggattcgatgactgattcgcctgcaaattcgcgggactcgcaggtgggtgaggtgcaggacccggcagcggataagtgagcgctcacaagcgtgtgtcgtgaaggtcagcgcattttcatatagtgtttacatggctacaaaccttgatgaattaaacgcccagtcggcgtatgctccccttcccccgattttcgccaagctcggccttgcctatgacgatgtgttgctgttgccgaacgagacggatgtcattccctccgaagtggacaccagcactcatctgactcgcaagatcgtgatgaaggccccggtcctctccgctgccatggataccgtgaccgagtccgagatggccatcgccatggctcgtaacggtggcatcggtgtgttgcaccgcaatctgtccatcgacgaccaggccgctcaggtcgatgtggtcaagcgttccgagtccggtatgatcaccgacccgctgaccgtcaaccccgaggtcacgctggccgacctcgacaagctgtgcggcaagttccacatctccggtctgccggttgtggacaaggacaacaagctcgtcggcatcatcaccaaccgtgatatgcgcttcatcgcctccgaggattacgacaccctgaaggttaaggatgtcatgaccaaggagaacctggtcactggcccgtccaacatctccaaggacgacgctcaccgtctactcgctcagcacaaggttgagaagctgccgctcgttgacgaggaaggccacctgaccggcctgatcaccgtcaaggacttcgtcaagaccgagcagtacccggacgccaccaaggatgagcagggtcgtctgcgcgtggccgccggcgtcggcttcctcggcgacgcctggcagcgtgcctccgctctgatggaggctggcgtggacgtgctcgtggtcgacaccgccaacggtgaggctcgtctggcactcgacatgatttcccgcctgaagcacgactccgccttcgacggcgtgcagatcatcggcggcaacgtcggcacccgctccggtgctcaggccatgattgaggctggcgcggacgccgtcaaggtcggtattggccccggctccatctgcaccacccgtatcgttgccggtgtcggtgtcccgcagctcaccgccgtgtacgaggccgcccaggcctgccgtgccgctggcgtgccctgcatcgccgacggtggcatccactactccggtgacatcgccaaggccctcgtggccggcgcctcctccgtgatgctcggcggcacgctcgccggctgtgaggaagccccgggcgagaaggtgctcctgcacggcaagcagtacaagctgtaccgtggcatgggctccctcggcgccatggccccgcgcggcaagaagtcctactccaaggaccgctacttccaggccgacgtgacctccagcgacaaggtcgtgccggaaggcgtggaaggcgaagtgccgtaccgcggcccgctgaacgccgtgctctaccagatgctcggtggcctgcaccagtccatgttctacatcggcgcccacaacatcgccgagatgccggagcgtggcaagttcatccgcatcaccgatgccggtctgcgcgaatcgcacccgcacgatatcgtgatgaccgccgaagccccgaactactccggcttccacaacaactgatcggttgatgcccgctagcttgcgctagttaggggttgattccttgtgaaaagggtctgcttatgcaggcccttttcgcgtatgtggctcgagatagcttgtatgcgctggggtatagtctgaactgttctgcataagcgatgaccagcgaagaaaagaggcacaccatggtcgacagccatgacgcggaaacgtacagcgcgaaggactcgcgcctgatttggatcgattgcgagatgaccggacttgacatcttcggcggcgacgaactcgtcgaggtgtctgtggttcccaccgactttgacctgaatgtgctggacgagggcgtggattacgtcatcaagccgtccgagaaggctgtgaaccacatgaacgatttcgtgcgccagatgcacacccgttccggcctgatcaacgagtgggagaatggcctgagcctggccgaggccgagcagaaggtcaccgaatacgtgctgcgcttcacgccggaaggcgtgcgcccgctgctggccggcaacaccatcggctccgacaagaagttcctcgaccactacatgccgggcctcatgagccacctgcattaccgcagcgtggacgtgagcaccttgaaggagctcgcccgccgctggtacccggccgtctacgagaaccgtccgccgaagaacggcggccaccgtgccctcgccgacatcatcgagtccttggacgagttgcgctactaccgtaaggccttcatggcccccgtccccggcccggatgatgccgcctccaaggccatcgccgccgacatcgtggccaccagcattctcaataagtagtccgccgtacttggctcccctccctgaggggagtctagagaggttgatatgcgccaaaccgaagccctagccattctgaacgccggcgcgaacgtgtttctgaccggtgcgcccggtgccggtaagacctatgtcttgaacgagttcatccgccaggctcgggccgacggcgccagcgtggcagtcaccgcgtccacaggcatcgcctccacgcatatcaacggccaaaccatccattcgtggagcggcgtcggcgtggccaccgccctgagcccgagtctgctcaaactcatcaaatcccggcgcaaacgcaagattcaggctacggacatcctcgtcatcgacgaggtctccatgctgcacgcatggctgttcgacatggtcgaccaagtctgccgcgaagtgcgtcgcgacccacgcccgttcggaggcatccaggtcgtgctgtccggcgacttcttccaactgccgccggtttcggtgtccgggcgcaaccgcgacctcatcgcccccacccccgaattcatcgccagtcgcgaacggtatgcccgtgccggcttgaaccccgaaggcttcatcaccgaatcgctggtatggcccgaactcaacccggtgatctgctatctgaccgaacagcaccgtcaggacaccggcgaactgctgaccgtgctcaccgacattcgcgaaggcgacgtgacccagtccgaccgtgacgtgctcgtcacccgtctgggcaaactgcccgagcccggccaggtcgccgtccacctattcccggtgaaccggcaggccgacaatctcaacgacatgcgcctgaaccagatcatgcttgagccgcacgagttccacgccgagacagcaggccctgccaacctggtcgaccgactcaagaagaacatgttggcccccgagcgactggtactcaaggaaggcgcggctgtcatggccctgcgcaacgacaccgatcgccagtacgtcaacggctcgctcggcaccgtgcgcggcttcgcgcaggagaacaagggcggctggccgatcgtggaattcgaaaacggcaacatcgtcaccatgaaacaggccacatgggaaatgatggacggcgacaccgtgctcgcctccgtctcgcaggtgccgttgcgttgcgcgtggggcatcaccatccacaagtcgcaaggcatgacgcttgatcgtgcggtcatggatctgaagcgcaccttcgcgccgggcatgggatatgtggcgttgtcccgcgtcgaatcgctgggcggactgtatttggctggcgtcaacgaacgcatgttcctcgtctcgcccgatgccgtggtgctcgacggcgacctgcgcgaagcctcggcctcggcttccgaccagttggccgatgaaggtgcaagcgcgttcaaacccgccgagccggacgaattcggtgtcaatcccgatgatgacttcgcccaggacgcgttattctgacggtcgatatatcgaacgaccgctaatttgagtgtttctgcacttcgaggggcggattttgagttttcgggacatctacttccgtttcaaggggctgatgtccaagtagacaacgcttaaaaacggcggaatgacgttggtatgaagccgtttctatgtgcgattgagcggatgaccagcccctcgaaacgcaagtagatgtctccaagaggcggaatcggccccttgaagccgaagaagacactgcgaacttgtcttcattgaggaactgaacggctaccatggaataagaggtggtagttatggtgctatccgagatatttcgtggaaacaatgaggttcgcgaggccgcccgggccggtgtgcaaatcgatacggttagtgtggctagtgcgtcagatgcagcaagcgcggcagacggcagcggcaaaatcactggcgcaatacgtccgccagcggtggctggttcgttctaccccgctgaccgcacaacgctcaagcaactcattaaccatcaattggattacagtcgagaggttctgcaacagttggagcccacgcttccagcgggagtgccaaaggctgtaatcgtgccgcatgccggttatgtgtattccggcacggcggccgcgcttgcctatgctttgctcgaacgagggcgggggagtgtgactcgcgcggtaatcgtgggaccgactcaccgtgtggccgtgcgaggcgtcgcctgttccacggcagcggcgtttgaaacgccgctgggcactgtgccggtagacattgcagccgagcgtaaggctctgggcctgtctgtcaatgagccattgcgctccggtacacatgcccgtccgggcgcgtcggctcccgcaatgatcgtcaatggcccaacccacgcacaagaacatgcggtagaagtgcagattccgttcctgcaaaccgtgctcggcccagacctcactattgtgccgttgaacgcgggcgatgccacgccacaagaggcgggtgatgtgttgcgtgctttgtggggtggcccggaaaccgtcatcgtgattagttcggatctctcgcactatcatccgcacgaagtcgcccgcgcgttggatgaccagaccattgcggacattgcggctttgcatctgccgattcaccctcgccgggcctgtggcgcatacccgatcaacggccttctggatgtgttaaaaggccgcaaggacatgaagctcttcgagctcggctgttccacttccggcgacgacggcgtggtggcgcttgccggccaacctcgccccgcaatgcgagacgccgacgagccggtagtgggatatgtctcgtttgccgcgtgggaatccaaaccagaagcagatgctccagccggtgcagatgacttaggcgaatcgggaacagcccatggtgatgtgctgctgaaactcgcccgtgccgctatccgggaacggttgcatattgaacatccaacagccgccgattcgaccgcgtccattcttgccgcaaacccatggctgaacgagtccggtgcctgtttcgttaccctgaccgagggtggccggctacgcgggtgcatcggttcgctggccgcccaccgctcgctcggcaaggacatagctgcacatgcggtggacgccgccacccgtgacccacgtttcaacccggtcaccgccgcggaatacccgttgctcaacgtggaggtatccgtcttgggcgagcccgagccgattaccgtgaactcctgtgacaccgattcgcgcgataccggctcgaagaccgcgactctggcatcgctgcaatccggacctcagaccgacgccgtcaaacgggacggcagcaacgtcgaacgcccggtacgttcgcgcactgaacttgaggaagtattacgccccggcaaagacggtctgattctcgccgaccgtcgtggccgcagcgccacattcctgccacaagtgtgggatgagctgcccaatccgcacgatttcgtcgctcacctgctcgccaaagccggtatccgcccgtcctacgactggaacgatggcgaaatcgactgtcaacgctacgaggtgaccgcctatgccgagcactaacgcagcaaccatgtcccctcccgctggcgggaggtggcgcgaagcgacggagggtggtcaccgagaatcagagggtggtcaccgggaatcgtgcggtcatacggcgtcagtcacagatgttcgtaaccccgccatagcccgctggcaaacgcaattccacgacggtaccaaccgcgctcgctgcgaactatgcccgcgccgctgcgtcctcaagcccggccaacgcggcttttgcttcgtccgctcaaaccacgacggactcatcgtctccgacacctacggccgcagctccggcttcgccgtggacccagtggaaaagaagccgctcaaccacttccaccccggttccagcgcgctgagttttggcacggctggctgcaattccggttgccgattctgccagaattgggatattgccaaagcccgcagtttcgaccggctcggcgtggaagccagtccggagaaaatcgcgcaggtcgcggccgaccggggcatcgattcggtggcgttcacctataacgatccgatcgtgttcgccgaatatgccatcgacacggccgaagcctgccgagcgctcggcattcatcccatcgccgtgactgccggatacatgagcgccgaagcccggcccgacttctacgccgccatggacgccgccaacatcgatctcaaaggcttcaccgaagaattttattggaaagtgaccggcacgcatctggccgatgtgctcgaaaccatcgactatgcggtcaacgaggcacgcacaccagaaggcgaacacgtgtgggtggagctcaccacgctactcatccctggactcaacgatgacgacgcccagctgcatgctgaatgtacatggatacgcgagcacttgggcccggacgtgccgctgcacttttccgcattccactccagttaccgcatgatggacgtaacgcccaccccgcacgagactctgacccgcgcccgaggcatcgccctcgaagagggactcaattatgtgtacaccggcaacgtgcatgatcgtgaaggcgataccacatattgcccaaaccctgaatgcagggccaagctcgtggaacgcgattggtatcgaatcattgccaaccgtttatctgccggatacagtggcaatgggcactgccccgtatgcaggactgctatcgccggacgttggtaatctgcctcaggtcgcccgcgcgatttagcgcagatcgccaatacgcgcggcgatcgtcctcatcgatttgaggctcgcctcatagcgcgcggctgccacaatcagaatgatgccgcccaaagcaagccacacccaccggtagtggcgggagaattcggcccgccatggccacagcacagtcaccgtgctgacgataagaatcaccgtgccgtagatcaacggtgcttgcagcaaacgcacacccacaatcagcgcggccgctccggacaggccgcttgttccgggaccgacataggcgattgcgcaaatggtggcatggccattggctgttgcgataccggttgtcgcggaactgccgttgggaattgcggggttgcagcagaaaattgcggggcccatgctgggccggttgatacaccggttgctccgcgggttccggctgattcccctgttgctcggtcggctgcgtcatcgtgccctcctacccttctagccatcattgttgtacgaatgagtccgaatgccaagatgaaggccggaatagtgcgaatagcaggcgggcttgtcggttcacgcgaatatcttggaacacatgacttccaatacccttcgtatgtcaaccatgttcctgcgcaccctgcgcgaggaccccgctgatgccgatgtcgattcggccaagctgctgcagcgcgccggctatatccgcaaggccgcacccggtatctggacctggctgccgctcggtctgcgcgtgctgaacaagatcgaggccatcatccgcgaggagatcaacggcatcggcgcccaggaagtgcacttcccggccctgctgccgcgcgaaccctacgaggccacccatcgctgggaggagtacggcgacaacatcttccgtttgaaggatcgccacgaggccgattacctgctggcccccacccacgaggagatgttcacccttctggtcaaggacatgtactcctcttacaaagacctgcccgtcaccctgtaccagatccagaccaagtaccgcgacgagttccgtccgcgtgccggcctgatccgtggtcgtgaattcatcatgaaggacgcctactccttcaccatcgatgaagaaggcatgcgcaaggcctactatgacgagcgcggcgcctacgagcgcatcttccagcgcctcgacctgaagtacgtacctgtgttcgccatgtccggcccgatgggcggctccgcatccgaggaattcctggctccgatgccgatcggcgaagataccttcgcgctggcaccttccggcaaggcatggaatgtggaggccctgagcactccggagctgccggaaatcgatgcttccgccactcccgccgcttccaaggaagccaccccggatgctaagaccatcgataacatgattgagcgtgccaacgccgaccacccgcgtactgatggccgtgaatggcaggcttccgacatcctcaagaacgtggtgattaccgtcaagcaccctgaggatgaagagcatgacgagccgtggcgtgaagtgattgtcgtcggcgtgcccggcgaccgtacggtggatatgaagcgactggaagcccagttcgctcccgccgagcttgaggaggccactgaagaagacctgaagcagcaccccgaactggtgccaggctacatcggaccgatggtgcttggcccgcaggccgaggctgctggcgtgaagaacccggttcgctacctggtcgacgcgcacgtggtcaagggttccgcttggttcactggtgccgatgagaacgaggtcgactactacaacctggtgtacggccgtgacttcaaggccgacggcgtggtggaagccgttgaggttcgccacggcgacatgagcccggacggttccggtccgttgagcttcgagcgtggtgtggaaatcggccaggtgttccagctgggtctcaagtactccaaggcactggacctgaaggtgctcgaccagaacggcaaggccgtgccggtgtggatgggctgctatggcatcggtgtttcccgcgtgctggcctgcatcgccgaaacacaccacgacgaagccggcttggcttggccgtccgtgattgccccggctgccgtgcacgtggtggccaccggtaaggacgccgtggcgtttgaaggtgccgagaagctggtcgccgagcttgaggccaagggccttgaggttatttacgatgaccgcaagaaggtgtctccgggcgtcaagttcaaggatgccgagctgatcggcgtgccgctggtcgccgtggtcggccgcgattacgtcaacgacggcaccatcgaactgcgcgaccgcaacggcgaaaacaaggtcgccgtgcccgccgccgaagccgccgacgcgctcgccgagcgcttcgccgccctcagctgagtcccacttactcagcctcggcgttaatcgcatcaagcgccattctgcccagtcgcagaatggcgctttgttgtggataaccgaaacttatccacattcttaaaatttcaactgcgtcacagtatccacatttgccagttgcccttgtgcacttcaaacgtcatgcctcacagtggaggtaccgctggggcgtgcaagccggcaatgaagccggagacaggctccggcggtccacatccaaacaacaggccagcaggccgaggaaaggaccgatcatggcaaatcaacaagcagcagtgaccgtcaccggctttgtggccggtgatccgacactaggcggaactgagagtttccgcgtgctgacattccgtatgggcagcacccgcagtcgactcaacccgactaccagacaatgggaggattacggaaccgcatgggtgggcgtcaaagcgttccgtgctttggccgtgaacgccgccagttcggttcgccgcggtgaccgcatcattgtggtcggctcactcatcaccgagcagtggaccaatgagcaaggcgaaccgcgcagtagaaccgttctcgaagccaccaacattgggcatgacctgaccttcggcaccacgtcgctgatcaagccacagcgtgccggtaatgggaacggaggcaatggtggcaacggtaacggcaatgccaacggtgccgccgaaggcatggatggcggaaacgggcaacgagcatcgtcaccgcacatgaggccaacgcaatatagtgtggacggtgccgcatccggtgtgggtatggacccgtatgcgacctcgtcggaatctggccccgtcgaatttggggtcacctccgattccggccaatcgccgtcgccatcaaccgagtcagcggctgcgtccatggccgatgccgtcatgtcgcaaccggacgctggcgctaatcagccacagtccgcagcccaacaaacctacgtcgacggtttcgccgaatcttccgatcccggcgaatccgaattctgagtgccaaccatacatcatgaaaaaccgctgtgttcgcctgtaatcgaggcaagcacagcggttttctcttacataacggggattaccagatgcgtacacggtccttgggtgcgagccacatggcgtcgccttcggtcacgccaaaggcatcgtagaagaggtccacgttgctggcgatgccgttggtgcggaattcggccggagaatgcgggtcgatctgcaggtactgttcggccagctcgtcgcggttcttggtgcgccagatggaggcgtagctcaggaagaagcgctgcaggccggtgaatccgtccatttcgggggcggtatcgagcagtgccttgatggcggcgggggagccgtcttcttcggcgtcgggcttacctgccgccttgccgagcgcgaatgcatacgccttgagcgcgatgttcacgccgcccaaatcgccgatgttctcgccgatggtcagcgcgccgttcacgtgcggcgccttatcagactcgtcagcgtacttctctgccagctgcagcggcacaaagctgttgtactgggcgatcaatgcgccggtgcgggcctcgaagttcttgcgatcctcgtcggtccaccagttgttgagcttgccgtcgccgtcatactgcgaaccctgatcgtcgaagccatggccgatctcgtgtccgatcactgcgccgataccgccataattcgccgcatcctcggccttcgggtcgaagaacgggggctgcagaatcgcggccgggaacacgatgacgttcatgctcggctcgtagtaggcgttcaccgtctgcggattcatcagccattcgtccttgtcgaccgccttgccgaccttggccagctggtagccggtctcgtacaggttcgcggccttggcgttctcggcgggcagcgcatccgcggagacactcagtgccgagtaatcgcgccagtggttggtgtagccgatctttggcgtgaacttggagatcttctccagagccttggccttggtgtcttcgcccagccaatcggaattggcgatggacacgcggtaggcgtcaatcagattggcgaccagctcttccatgcggcgtttcgagctttcggggaagtgcaggcgcacatactcgcggcccacatcttcaccgcagacgccgttgaccaggctcaccgcgcgcttccaacgatcgcgctgcttcttggcaccggagagcaccttgccgtagaagtcaaagttggtggtgtcgaagtcgcgagacagggaggaggcgaagcccagaatcatgtgaacacgggcccacagcttaaggtcggccagatcggcctcggcccagaacgcatcaagaccagtgaggaagctcggctcgtgcacaatgatgcgcgcgaacacagacttgaaatcgatcgactgagccttggcggcctcggtggcgtcataggcggtctgccaggcgtcgatccaggaagcgagatcgaagttcttcagcgtggcggccaaatcggcgtaatcggtggggttgtaggtcttcaccgaatcgcgcgtggccacattgtcccaatgattggcggcgatcttggtttccacggcaaggaagtgtcgggccatatcaagtgcggcttcgctgggaaccgtggtgggagcattgctctcgtcatcgccggtgttggccggcagttcatcgccaccgttggattcggcggcgggcgcgtacccggcgttcaccagctgggtggcgaccatcgccacgtatgcttcgcgcacggggacgtagtggtcctcacgatagtaggcttcgtccggcaggcaaaggccggcctgctcaaggtgggcgatattgcggtccgggtcgccggggtcgccgtaaacggccaagccgaacaggtcggggccgccggctgggttgatggtgccgagcacgcgcgtgagagcggccttgtcgatggcggaatcgatgaggtcaagctcatcgcggatcgggtcaaggccggcggcctcgatggcgtcggtgttcaggaacgaatgatacagagcctgcgatttggtggccgggcagtcgtcggcgtcgaggatgtcgcgcacttggttttcggcgtcttcggcgagcttgtcgaaggagccgtagcgcgaacgatcgtcgggtaggcggtaggtgtcgatccatggaccattcacgtagcggaacaggtcattggtcggcttgatgacggaggagaacgatgccgggtcgatgcccgacgtcagcgtttcggtttcgttggtcatggccctaagcctaatcgcggcgggggagaagcgttggtgatgcagatattgcgttatgggtattgcgctgtcagtgaactagacggattgcctaactgtagtgatggttcaaattaggtaacttgcctaacatggtatgtggaacctgaatatggaccttgagttaaggagttacgatgagcaatccaaacgagggtcagtggaatggccagacgggccagcccaaccagagccagccgagccagccgaatccggcgggccaaccgggccaaccgcagtatggcgcgtatgacagcaatcatggcggccaatatcctccgcaaggtgcgccgggagcgcaagacactcagaatcagcaggcgcagaacggccagccacaaggcggaccgaaccagaacccgtactacggcccgtacgcctacaatccgaactatggcccgaacggccagccagcatggggtccggacggtcggcggtaccaggcggacggccaatcgaatagccaagcggacgggcagccgaatggttcatggggcgatcaaagtcaacccggctggcagcagaccaactggtatgtcggcaatttcagtccattccatctgatcgaggaatggctgccggaaaaggccaagaccaagattcgcatcatttacggcgtggtgggcgtggctgccatcgccttgggcgctgcgctgttgttggtgccgaacaagacgctggctttggccgcattgttgctcggcgtgtatttcgtgatttccggcgtggtgcgcatcgtcagcgctctcgtggagccgggtctgccgggcggctggcgtgtgctggacgtgttcgtcggcattctgctgaccttcggaggcgtcgtagtcgtacgaaactacggtatgaccggtcagaccttggcattactcatcaccctgatggtcggtttcggttggattatggaaggcgtgatggctctagtcgaatcatggcgcatcccgcgctccggctgggccatcgcctatgccatcatctcgattatcgccggcttcgtggtgctgatgagcccgctgagctccgccgtattcatgattatcttcggcggatgtgccatggtggtgatggggattacttcagtgattcgcgcgttcacttttggcaagcgtcgcaagtaatctcgcgctccagacaatcaatctccggacaatcaatccaaagcgcccgtgcaggttgtgaacctgccgggcgctttcttatggccgccgccgttggggatcgctggcggttgaccccgggctgggctagagttgagaacaagtctcaacaaggtagaaagaacctcatgatcgaattgaagacccctcgtgaaatcgaggaaatgaagccggccggccgtttcgtcggcggcattctgaaggaactgcaggagaccaccaaggtgggcaccaatctgctcgaaatcgacgagttcgtccacaagaagatcgtggaccgcaagggcgccgaatcctgctatgttgactacgctcctgacttcggcaccggcccgttcgcccactacatctgcacctccgtcaacgacgccgtgctgcacggtgtgccgtacgattacagcctgaaggacggcgacctcgtctccctcgatctcgccatctccgtggatggctgggtggccgattccgccgtcagcttcgtggtcggcaaagacccggaccccgaagacctgcgcatcatcaagtgcactgaggaagcgctcgccgccgccatcgacgtggccaagcccggcaaccgtctcggcgacatctccaacaccattggcgacatcgcgcgcgaatacggctacccgatcaacctcgagttcggcggtcacggcgtgggccacatcatgcacggcgacccgcacgtaccgaacgacggccgcgcccaccacggctacaagctgcgcgaaggcctggtcatcgccatcgaaccatggttcctcaagaccaccgacgagatcttccaggatccgaaggacggctggaccctgcgtgcctccgacggctcgcgcggtgcccactccgagcacaccatcgccatcaccgagaacggcccgatcatcttcaccgatcgcaccaacctctgattggcgtttggcgtatggcgggtgcctgattggcctgtgatgggcgatcggcatctcatcaaccgtctatatgtttgcggttttcccgcgaattcgagacgtaacaagccgaagtgcgtttgctttgatagcatgagcgcacttcggctttcgtgtatcgaccggtgtctgccggcggtaacacagaagacataaagtaccgaacactagcgttcgcgaacgcgtgaacgttaatgtttggggtaagtggttcatgaagaggaaggtgcgcgaatggcaacggcacaacttgatgtcgattcgaacaagttcaacctgcccgtggtgaaggctagtgcagggccggatggcatcgtcgtttccaagctgcgcaatgacggctgggtaacgctcgaccccggattcctcaccaccgcacagtgcgaatcgaaaatcacctacatcgacggcaagcattcgatcctgcgctaccgtggctaccccatcgagcagttgtgcgagaactccgattttctggaagtggcgtggctgctgcgccacggcgagctgccgagcagggctgagtatgagcagttctgcgcggacatcaaccacaagacgatggttggcgaagacttccgtaccttcatgggttcgttcccgcgctccgctcatccgatgagcgtgcttgcctccgccatcaatgcgctggccacgttctatccggacaccaccgatatctccgacaccgaccagctcgatgaggccgccaagatcatcatggccaaggcccgcacgattgtgtcgtacatcttccgccgtcgtcgcgatgagccgatgctgtaccccgattacgcgcgcggctatgtagacgacttcctgcgcatgtgcttcgctgtgccgtacgagccgttcgaatctgacccgttgtatgtgcatgctttgggtcgtttgctgattattcatgccgatcacgagcagaactgctcgacctcggtggtgcgtatcgccggttccgcccacgctaacctgtattcggcggtggccgctggcgtcaatgccctgtccggaccgttgcacggtggcgcgaatgaggccgtactacgccaattgaaggcgattcgtgattccggtaagtctgtggccgagttcgtgcgtgatgccaaggaggatggccagaagatttccggccttggccaccgtgtatacaagtcgtatgatccgcgtgcggcgattgccaagaagtatcttgagaagatcatggagcgcgaggatacgcagaaactgccgtccgacgagcgtgcgttgttcgatgtggccaccgagcttgaggatattgcgttgaacgacgagtatttcgtatcgcgcaacctgtatccgaacgtcgatttctacacgggcttgatttatcgggcgatcggcttcgatccggccatgttcaccacgctgttcgcactgggccgcattcccggttggattgcgcagtaccgtgagatgctggccgacccgaacaccaagatcggccgcccacgccaggtctacaccggtccggtcgagcgcgatttcatgccgatggacgagcggtgattgttggtttgagaaagcgcctcgctggagatccagtgaggcgctttctatatgtacagcgcaaaccggctatgctgcgacggctgcataagaacgagcagggctagttctgaaattgaaataatgtgtgcggtatcgaagcgtaccgagggaaggcgtacggaagtacgtcgaccgaggagcaacgaagataacgctccattatttcaatttcagttcttgtgcagcttggcgttgagctcaattcccaccttgcggtagcgggcttcgatacgtccattcaccgagttgcggatgaacaggatgttgtctttgccggagagctcagcacccttgacgacttcgagcggctcgccggctgcggccttggccttgtcccagatgctgatcttggtgccggcggtgatgtacagaccggcttcgacggtgcagttatcgccgagggagatgccgataccggcgttggcgccgagcagcgagtgctcgccgatggagttgcgcagcttgccgccgccggagagggtgcccatgatggaggcaccgccgccgatatcggaaccgtcgcccacgaccacaccttgcgaaacgcggccttcgaccatggagacgccgagcgtgccggcattgaagttcacgaatccggcgtgcatcacggtggtgccggaagacaagtaagcgccgaggcgcacgcggtcggcgtcgccgatacgcacgccggtgggcactacgtaatcgatcatgcgcgggaatttatccacaccgaacacgttgacggtggtggcaggagctgcggcaggcagtccggcctgagcagcgaaagcgagagcggcttcggtggaggcgcgttcgacatcggccttgcgtagtgtgaagtcctcaacggcgaaaggaccgtagttggtccacaccacattggcgagttgggcgaagatgccgtcaaggttcagcgtgttcggcttggccatgcgcatgctcatcagatggagtttcaggtaagcgtccgcggcgttgctgatcggctcgtccaactggctgacgacgaataccggcacgcggcggatgccacgggcgtcggcttcatcgtgagccagagtgccgaaattgtggtttggacgatcggcctcggccggtgcctcaccgagattcagttcggggtaccagacgtctagggtggtgccggcggcgtctacgctggccagaccccatccccatgcggtacgctcttcgctcatagttgctccttacatatcgttgcgtttgcgttgcatgtgcatcgcggcatgtgatggttccaccttagcgtcaagtacggctaggcgggggccatagttcgtggaatggcttgaaatcgagttgttcggtaaaaaattaccgaacgtgattggcgatgggatgataggttctccggtgaaattcgctggtgaacaactcggcaaggaggtgtgcgatgtgatgctgcatcattcgggagcataggctgtggccatgcgacgcccggcatcatagagtttgcgcttgagcgaatcgggctcaagaatcactacgcggccatcccaggaatactgcaatgcccaccagaacacggcgcgttcgggagcatcgacgatgacttcgaactgtgtgccgtccggcgaatgtttgatctgagggtcgtcgaaccattcgaacacattgttgagcatggattcgtctcgtacggccatgcggatgcgaatcggggcatcggctacgggatacgggcggtgacgcatgaagttcactgcgtcaaaatcagccggcgctggtttttccagtggaactgtgccgttcctgcctttggcgctgacgttggcgattcggttgaccacgaaaatgcggagattatcctcgccatgtagatggcagatgaggtaataccgtccgttcttgtacaccatctggtaagggtcggcggtgtaggtaattcgacctgcgcccgtacggcttttatgcggtatcagggtgccgtccgggccgtaatcacggtattggaaggttacgccgtggccttcttcaatggcctgattcagttggtcgatggtggataggaactcgccgttgatatgcgtgtaggtggccacgtgctcaaggtaacctactgcttgcccagcggcacctgcgagttcgcggattttaccgatgagatcgtccatggtgtcgaggctgatgcgagacaaggtgaggctgtcgagtagcagtcgcatttcggcggtggataggaatgcgtcaagataccagccgggttgtggattcttgcattcgatgccggcaaggtcgctttcggtgagatgcccgatatgtctgccgagaaattccgtggcggtaagctttttgagctgatttcgtatggttttctcggtcggcagctcgcttggatcttccagctggtgtttacgggcaagttcatcgagtatttgccgcacggtcaggccatgtccaaagtagctgtgacgccacagcacctcgaagatttcgagggtggtgttccctgcataggatttgcgttgcgccggcttgtctgcatccatacattaaggctaccgcgcgcctcgtctaggatagaagtgttggactgaaatgcattcgctggaaaggaggctcgcccatgagcaaagggtatggtgtatttggccatgttcccgataatgcggatgacgatgacctcctgccttatgaggatgatgattccggcgtttcctggggccatgcgttgcgccgtcgcaatccttggaaaaggggaggcgacgaaggtgccgattacgacgatgatcggtatggcgcagatgacacagatgacactaatgaggacaggggtctctttgccggcaagagcagcggtataggcggtatctctggcgaggcagatggaatgcttggtggcgcaggcgctgccggcagtagagccgtaacgtttggtggaacggacagtttgtccgccgccgatgcggttatgccctatcgtttcaggcaaggacgttccgtatggttcgaagatgaggacgaaggccatttcgccggggctgcgaagcgtgccgaagcccatgccgtccctatccttgcgttacgcaacgatgtggaatcgtcatcgtcgaatgccgtgctcgctcgtgcccgtagcattgcgcgcaaagcggccaccatggttatcaatccggtatacagcgaaaatcatcgaaccgggtatgccgagcttgacggtattctacgtggcaccaccagcccatcgagtaggtatcgtaccagcgtgcaattcgacctcgatacgggagaagccgtcggtggcaagtgctcatgcccggcttacggccgtggctatggcatgtgcaagcacatgattgcgctcgccttcatattctgcgatgatccgcagcgttttgaagggtaccgtgccggggctgtgaggccgtctcggacgctgatcgactatatggagcacgtcgataggcaagatgctcaagccaaagcgcgtcgccgcaatgcgctcatgcgccgattcgatactgcaaaaagacgaaatggcgcaggtggacgacgtacgaatagcggatacggctctcgtgccggcacccgaggcggcgggtatcagggcgatagtgagactgtgggcttggggcaggtgcagcttgttccgatattgagtttcatcgatggcgtgtggagcgtggagttcaagatcggatcgacttccaatgggtccagctatgtactgaaatcgattccgcaatttgtgcttaccatggcgaacggcgactatacggattatgggcagaagcttgcctttacccatacgccggatatgttcgacgatgattcgcgcccactgctgggcttccttgacgacgcgatggccgtgcgtcgtgcggccgagcagcaggaccggtattacgggcatatcgccatcgatcgtcacctgacactttcagcaccggaagtggcccggttgctgtccgtacgtgagggcagaggcgtacagctcgtgttgaacacatggttctccgggcagcctgcatcggtgccggttgatggtggcgagccagattttcttatgcgcattgcgcggcgtgatttcaatacgtatggtccggatgccggatacctgcttgccggagtgccggcggtggaaaccgtgattgatggtggcaaggatgtatggctgttgctcgcctccactaatccggccggtgcggtatccgccatgatggcgggctctcagcgtaaaagcgcagcgggatgccgattcgtccgttgcccgaaacgattgattccgttgcgaggactattgggagacctgtttgaacccgatggcgaggggcaggtcattgccggtgatgacatcgccctgttcgcacgcacgctattgcctcagctggttggtgccggactgttggaggccagtgagattcctcgcgagctggctgaattaagtcctacggaatgcagcctccagttttatctggatcgtgatgagcatggtgtgcaatgcgaggtcaaggcacactacggcgatgccattgtcccgttgctacccgatggcccgacggtgcatgctagggatgagcgttccgtccccttgtctcggggcgtgattgggcgtgatttcgacgctgagcatcttgcgattgatgtagtgcgtgaattctttaccatgcctgaccagcgcaagcgcgttgcggccgccactcatcagacggtgaatgggttccgaacgccggccgcgcgaaagaccgccaaacaattcgtgtctgatgcggccactatcgatcgcgatgacaccacgcagattgttcgtctttttgacgagggattgcccgcactgaaggaagtaggggaggtcttcaccacaccggcttttgaccggctgatcgcgcccaagccgccaagcgtcaaagtcggattgtccatcaaaggcaatttggtggagatatcacccctcgctgatgaagtaccgccggacgaagtgggtgccttgctgtcttcgtatcgtcggcgtcaacgattccatcatttgaaggacggcacgctggtcaaactcagcggcgcgaatctcagcacgttggaccgattggccagcgaccttgatctgagcgagcagcagctcaactccgggctgatcgagttgccgggcggtcgagcattcctactggatggtgagttgccggatgacggctccgatgtagtcaaggacgcttcgttcaccgaatacatcgacgatctcaagatcatcgaccctaagtcgtatgaagtgccggatagtctcaagcatattctgcgcccttatcaggtcgaaggcttccaatggctgaacacgttgtgcgacaagggttttggcggcattttggccgacgagatgggtttgggcaaatccgtgcagcttatcgccctgttgctgtcgcgataccacaacgaatctagtggcatgccgaccgctcaaggcatggatgccggtaatgctgttaatagtgaatcagccgtaaccggtcatattactttcgattccgaagatggcgggccgcatccatcattgatcgtgtgcccggcgtccttggtgtacaactggggtgccgaattcgccaagttcgccccgagcttcaacgccgtggtggtggccggtaccaaagccgagcgccgcaccgccatcggccgcgcgttccgggcggatgaccccaccgtgctcatcacctcatacgacctgctgcgccgggatgtcgatgattacaccgccaatgagcaacgtttcaatgtcatggcgctggatgaagcccagtacatcaagaatcacaccacgaagatagccaaagcggtcaaggccgtggccgccgaccatcgtttcgccttgaccggcacgccgatcgagaaccgactctccgaactgtggagcatcttcgacttcctgatgccgggactattgggctcatacaagcgattccatgagcgctacgagttgcccatctccaacgcccgggctgcagatggcagcacggccgaaggtcgggccgccgcacaggtcaatcctgaggccgcccgggtgtctcgccaattgcagtcgttggtgggcgtgttcatcaagcgcaggttgaagtcccaagtgctgaccgatttgccggacaagttggagaccacgctgaccgtgcagcttgccggcgaacagcgcaaactgtatgcggcccacgagcagcggctcagaatgcagctcgaacacagcgaagaagccgatttcaacacgtcgaagattcgcatcctcgccgagctgaccaagttgcgccagatctgctgtgatccaaggctgctgtatgccgatgccaaggatcagtcggccaagcttgccgccatcaccgaactggtggaaacctgcgtgaatgaaggcaagaaggcgctgatcttctcccagttcaccagcttccttgatctgatcgccgaacgtttcgacgcgcaaggactacgctactacaccatcaccggatccacgcctaaaaagaagcgtctcgaactcgtcgaccagttcaatgcggacgatacgcccgccttcctgatttcattgaaggccggcaacaccggactgaacctgaccggtgccagcgtggtcatccacgccgatccatggtggaacgctgccgcgcaggatcaggccaccgaccgagcacatcgtatcggccagaccgaagacgtcaacgtgtatcaggtggtggccaaggacaccatcgaagaacgcatcttggagcttcagcataccaagagcgagctcgcccgccagttcaccgatgcttccttgcttgccgacgaagccggcaccggcgccagcgccctcaccgaagcccccgcctccatcgccaccctcaccaaggacgatctcctcaatctgctgggatgagaagatcctgctcggtgctcttgagcttggtgatggaaacagtctgggctttgtggacccgttcgctaagccgagaccggagtcgatagcggtgtggcatggtgcgtgcgtggggagcgtgattcagttgttggctgaggcgattcggatgctgtcgttttgtgctttgttttgccgttgaccaattgaaatgctcgttggtaggagacccccaataaagctccgatttgtcgatacgtgagtccctcgttgcgtagggcccgtgcggcgagtcgggattcggcagccgcttgtgcgttggctttttttgctatttcgcgctgccggaacatttctgttacgtgttgtttggcttgtttcggcaacacaaacgtcaccttgagctccggattgtcgtcgtcgttcatgacagtgatgagatctttagccattggctcgatatcgtcaagtcctttggcctgggtcgaccgttcgatagctggtacctgaacgtaccaatatcggccatcgagttgcacaagcacgtcatagttgctcattgccaccacccctttccgagtttctgctcgctctcgttgatgatatccagcgtggttcgttctgagacttcattatggcgggggatgggtatcctcaacccgtccaggcagtaaacctcatgtctgctgccttgccgtaacaaatagaaatcgagccctcgctgctttgccgcttgccgaagtttcttgatgatgagttttcttcgtgtcatcataactctcaatctcgcactagacaaaatgcgtataccgaattgccgggtgggagttgtgggtaaacgtagagatgttcattggtccttctttctgttgtctgacgcgtcgttgcgtgcgggtgcatctgacggtatgggatgaggtttctgattggcaagctgaacgggggtatgtggttctagcttccgagttatccacattgataaagtgcttttttaaagtgactttcccgtgttggtcgtggatgctgcgagcaaggcaagaacggtcgatcgcgtcgcggtgtgtgtgggtgaatggtgaaagtgattttcgatatctttatattgatattcgatatattatgatggtgacatacggggcagtgcaggttcatccattgatattggattaaggagcatagccatgaacgctggtatcgcattcatctctcgcaaatctcgcaaagcagacgtcgcttggcgctatgccattgcacttggtcggtggcgggggagtcggcgttatgttcgacgtcagtgccgtcattggcagatggcgcaaccgccacgaacacaggggtctgatcgttggccagaatcgccttcaattcctcgtccgtgtatttcttgacaccgcctttgaacagatccggtcggccggcatgatgcacttcgagcacctgccgcagcagttcgtcgatttggggaatatcggccgccgtggccctacgaatcatcatgtcatccatttgattcagtctaatcgtgcagtctcgaccggcagatgatcattgcccgcgataagagacacggacgggcaagatgggtgattgttcgttcaggctttcatcctcgccgcaacgtcacggtagtctggagtgcgtgaatcgcaagaaacagccagtggagaagtatgagcggggcacccgttcgtacacgatgtcgcatattcgtggcaaagacaccaaaatcgaggtgctggtacgcagctatctgtttcgcaagggtttgcgattccgcaagaacgacaagcgttaccccggccacccggatgtagtactgccgaaataccacaccatcgtgttcatcaacggctgtttctggcacatgcatgaaggctgttccaaacattcgatgccgaaatcgaatgtggaattctggcagacgaagctactgcgcaatcacaatcgagacatcgcgcagcgggctgaactggaggccgccggctggcgtgtaattaccgtatgggagtgcgaattaacgaaagccgtgcgtgacgaacgcctcgcacggctgtatgagcagattgttgaaggagatgcagattcagcggaataatttcagctcccctctggaggggagctgaaatcagacctcaaacgggaacttcaggccccaacggtcgcgaatcgcatccatcagctccatgatgcggatggtgtcggcgtgcggcatcgcctcgcattcgatcttgccatccagcagcgcgttggctgcatcggccacctcatactcataaccggtcaactgcgacggcaccgcaacactgcgcacgggcttgtgatcgttgttgtagatatcgatggacttgggattgttgatattggtgaccaccaaatacccttcggtgccccacacgtagccgccgcgatcggaggaaaccagcatcgaactggtggacacggccatcgtgccatcatcgtaatacaacgtggtggaattctgtgcatccacaccggtttcggcggccatcatcgacgtatcgaaatgatccagcgtgcggccatggtcggcaccgatcgccatatccaggaagttcagcggatacacgcccacatcgagcagcgcgccaccggcacaggccggatcggtcatacgtgccttgccggacaccggatagcacaggttggcgctcgccgctttcacctcgccgatctcgccggactcgataacttcgttgatgagcttgcggctgggcatgtagcgcgtccagatggcctccgtgcacagcatgccggtttcctcggccacggccagcgcctcacgtgcctgcccggcgttcgcggtgaacgacttctccaccagcacgttcttgccggctttcatacacaggatcgcctgttcggcgtgcagactgtgcggggtggcgatatacaccagatccacatccgggtccgccgtcaactcctcatacgatccataagccttgtcaaaatgccattggtcggcaaaagcctgcgcgcgcgtaatatcacgggccgctaccgcatacgggtgaatccatgaggaatacagtgaaccttcagccatctgggtcagggtgtcggccatggtgtgagctatgcggcccgcacccagaatcgcgacgttgatcttttcgccgctggcctcgaactcggcgcgtttgccattgaatcgactcattattcctccttgaatacgggttggtacactcaatcgacctacagtgattatagaagaagaaaccttgtcccgtgaggcggatagaaccgaaatatggaaaacgaagcagcgcagcagccccaatctccggccgcgtctccagtcatgtcccgccgagcgcgtgaggtcaatcccttccgtgccatggtattcggcgaacaagcagacaagatgatcgcccaaggtatcagcgtcatcaaattaagccttggcgagcccgatttcggcgcgccgcccgccgtacgcgacgccatgcgcgaacagtacgacggccgggccctgccgtacaccgccgccatgggcctacctgaactgcgccaagccatcgccgacttctaccgcgagcgtcatgaccttgacatcgaccccaagcgtatctgcgtgaccgccggcggttcggccgccctgctgttggccaccgcgctgaccgtggaccccggtgacgatgtgattgtggccgacccctcctacccgtgcaaccgcgaacttgtgcgctcctttgaggggcgggtcatcgacgttccgacctcggccgccacccgcttccacctgaccgccgacctgtgcagccagtactggacaagcaagaccaaggccgtaatgatcacgtcgccgtccaaccccaccggcaccaccatcgacttcaacgtattggacgaggtgtgcaagctggccgccagccgcggcgcatggcgcatcgtggacgaaacctaccttgatttggccgaccgtgagccggacggcaccgaagtcaagtccgtactggcctgcgatcccggtgccatcgtgtgcaacagcttctccaagttcttcggcatgaccggctggcgtctcggctgggctattctgcccgacgaccccaccgtgctggaagcggtcgacgacctggccaccaactactacctgtgcgcccacacgcccacccagcatgcggcgctcgcctgttttacgccggagagtttggccgaatgtgaagctcgtcgtcaggaattgcttgcccgtcgtcgcattgtgattgacgggctcaagcgcatcggtttgccggttgaggtggagccgaatggcgcgttctacgcctacttcaacatttcccgtactggtctggatgcctggacgttctgcgaacgcgcgctggatgaagcccatgtggctctgactcctggccgcgacttcggtgcggccacagcggatacgcatgtgcgcctgagctatgccgcctcacgtgaggccctgaccgaggggctggaacgtctcggaacgttcgtcgaatcgttgtgaacggcgcggcatccggtgtgattgttgtacggtagtcgagtttgtgtgatgttcggctggcctcgcggtgttggttgccggccgaacgactcgccatggtggcgcacggctggctgattgcgatggtcggcccgttgttcggccatcacgggttgggtaaggtcaggaatagggatcatggtcaatctgcgttcgcgcaccacgcgacttggtgtgcttgatatcggttcgaacactatccacatgcttatcgtcgacgccgctcccggcgctcgccctgaccccgaggccagcaccaaatccacagtgcgcctgatgaagtatttaaaggatgacggctcaatcaagaagtccggcatcgaggcgattctggaagccgtgtcccagtgtatgcggctggccgaggaatacgaaatcacccaaccgccacggtagccaacaacgccgcatgatcggagccctcgactttgaccaccttgcattgcccggccttcatgccctgatcaagcaccacgtggtcaataccggcgaacatcggcatatacacgcggttcgtaggccacgaaaacgtaaacccatgtccggattcacgtgcggcatccacgaaccggtcgccaagaaaatcacggaatggcgtgtgatcgtaagtggcattgaaatcgcccatgaaaatataccgtgtatccgtatgcccgcgcatcggacccaactcatccagcgatcgcttccactgccgccaatagccgggtacgggagcggtggtgtgcacggatacgaatcgaatctgctgaccacccatatccaccgtgccgccgggcatgaatgaggcgctggaattcacgtcatcgtcggccggatcggcaagtggcgtggccgaccagaggccgttaccgaatacgccgtcagacgatgagacctgcgcatacggcagatagtgctcaatgccagcctcgttgagttttttgacgaaatcctcggtggtctcctgcaaagcgagcacttcgacgcgctgatcgcggactagttcgacgatggcttgtgggtcggcctgccccttgtatacattgaaggtcatgacgcgcgcgtaggcatcgctggtgttgggggaggccgcagccacggcgttctgcgcggcttgggggagcgggtcggtcgagtagaagaacggatattgccaatagccattgcatgcgattgcggcgatggcgattagtgcggcaaggatacgccgcgacacgatggccaacagtagggcaatcaggccaagcaacgtgaaccagggcgttgccgataccacaatcggcacaaatggcagttcctgtaaatcggcaggcagcgcgcgggcggcagtgccggcaagggcaagaagcgcgaacatcgtggcgagaaaaccaagcagacgatgccgtttgtgtggcttcacggcagacttggatactgggcgtgccgtggctttggcagagcgtggcttggcagcggcgcgagctcgtacgcttgcacctgtggtagtacttcgtgcctttgccatgctgccctttcctccggcttgtttactgttaccttgcttttcgtgcgatttgccactgtaccgtgtgcggcttgtctttcggtgtcttttcgccgtgcgcaagagcagttcgcaccaaaccagcacgaaaaccggccatgccttggtggcgggttctgccaggtagcttacacagactgccatgcgtcttatgtaggctgccacgcgaacatgatgcgactgggcgtgcggccgtgtacaatgaaacgtcgttgcccgagtagctcagtggatagagcaccgctctcctaaagcgggtgtcgtcggttcgaatccgatctcgggcacttggcttcggaaacatgacggtatctcagcctctattcatcggtgatgagccataggcattaggcatgtgtaaacgtataggttccaccatccatcatcccgtcatgtgaaactatgcaaagacatgtggggcttcacggttatcgtgagggtccatggctatcgaatacacggaagagaagcggtttactgtcgaacaggttgaggcgctgttcaagtcggttggttgggaatcggcgcagtggcccgaacggttgttcaaggcattgcagcattcggatacggtaatcagcgcatgggatggcggctatttggtcggcttggttcgcgtgctcgacgatacgggagggggcgaaagtggcggagtgtgctgatcgggggcaacgtacgtagtcattgacggttatcccgtagtaatgttcacgatacgaccccttgtccatacagtgaaaataacggctggcgtccgacgttgctgcgctatgactagagaccatgagtgaagacaaacagtatgacttctatgtggccggtccgttctttgatcctgaacaaacgtcaagtatggaacgtttggaaaagatattggaagaccatggcaaggtactgttcaagccgcggtttgtcagccagatcgaagaagtaggccctgaaggatgctttgcggacgatatccatggcattaatgctgctaaagccgtggtcgccaatcttatggacgaggacccgggcacgatgttcgaaatcggatatgcgcatgcgctgggaatcccggtgtacggctatttcgaaaaccttacgccaatggatcgtgtcaatctgatgattgcgcaagcggtcgaactggtgttcgtcggtcctgatgatgtggcgaaatacttggaaaccggcgaacatacggaagtcgattacattcagttctaagcagctctaacaggttctcagcaaacaggggtggcggcgttctcgtacatagtcatgtacgggaacgccgcagtggtatagggatattccaacaagcggcataatggagtcgtgggaaaaccagtcggatacaagtgaagtgtctgaatttcgtaaggagtgccgttatgagtaaccacaatcccatgaatattgccaccgactttgccaaggccacgggaggaaccgctcgcaaagttgttgctttgaccgataaaggtccgttgaatggctttaagaaattcctgtcgcgcggatcgatgattgatatggcggtaggtgtggtgatgggctctgccgttaccgctgtggtcaattccatcgtcgacaatctcatcagtccattaatcggcatgattggcggcgtaccggatctttccggactgctgaccatcacgttcaacaactcgactgtttcatttggtgcgattcttaacgcgctgattagcttcctgcttgttggcgtggcggtgtatttctgtgtgattttgccgattaataagcttcgtgatctcactgctgcccaggatgaggctgacgctgaagaacaggggcctagcgttgaagagcagactctcgccacgctgcaggagattcgcgacgagctgaaaaaggccaatgactccgccgagtaatctgctgaatgtacggtgcgacagatttacctggtttgcccgaaataacggattgccggggccatttggtctggacaatccgttgtttcgcgcgtgttttgtagcatccgtggagttacatggggagtatgactgaaaacatcgctgataaggccataaacgatactcgtatcgtcaagcagttcaccaatcccgtcaaggagccgattgacagcgacatcaacctgttcgatttgctcgatgagcgagccaagcgcgatcccgatggcgccatgatcgaatataaaactgaggatggcacctggcagccgtacagcgcccaggtcttccgcgacatggtcatcgatctggccaaaggcctgattggtctgggcgtcaacaagggcgactccgtggccatcgtgtctcgcacgcgttgggagtggaccgctctggatatggcgatcatgtccatcggcgcactcaccgtgccggtatatgagaccaactccgccagccaggtcagctggattttcaacgattccaaggtcacgctcgccatcgccgaggatgacggtcagcgcgacaagattgaatccgtgcgcagcgaggtgcccaccctgcgcaacgtgttcgtcatcgaagcaggcggcctgaacgccatcaagacctatggcgaaagcgtcaccgatgccgaattctgggaatacaagagcgcctcccacggcgacgaccgcgccaccatcgtttacacgtccggctccaccggcaccccgaaaggcgtggagctcacccaccgcaacttcgcgttcctggtgcgctccggcctgcagtacatgcctcgtgccggcgcatggcccaaccgccgtctgctgctgttcctgcccctgagccatgtgttcgcccgattcctggaattcttcagttttggcggcaccatttctctggccctgagctccaatatgaagaccatggtcaaggacttcgagaccttcggccccacgctgctgcttgccgtgccgcgtgtgtacgaaaaggtctacaacgccgcttcccagcgtgccggcagcggttttgcgggcaagatgttcatgcgcgccgccgaaaacgcgcgtgaatggtccaaggccgagcagaagggcgagaagctgccgcttcccggtcgtattgctcacgctttctacgagcaggtggtgtacaagaagattcgtaccatctttggcccgaacgccgactttgccgtcaccggtggagccccgatggattccgagctctcccacttcttcaacggcatcggcatgccggtgctggaaggctacggcatgacggaaacctgtggtccggtgtgcgtgagcttgccggaagacaatcgcatcggcaccatcggcatgccgatgtgcggcatcaccgccggcatcgccgaggatggcgagctggtgatcaagggaccgctggtgtgcaaggggtaccacaacaaccctgaggtcaccacccagcagatcaccgatggctggctgcacaccggtgatttgggcgatatctccgaagacggattcatttccatcactggccgtaagaaggacctcatcatcaccgccggcggcaagaacgtgtcgccgggtctgcttgaggcttccgtgatgacctcgcccgtggtcaaccagtgcttggttattggcgataagaagccgttcgtggccgctctggtcacgctggatctggcggatgccaacaactggttggaatcccaaggcgccaaaccggaacccgatctggcctcgctggccaagaacgccatcgttcatgccgaggtagagcgtgcggtgaacgccgccaacgagggcgtttcccgcgccgagtcgattcgtaagttcgagattctgccagacgaattcaccgaggccaacggcatgctgaccccgagcctgaagacccgtcgcgcgcaaatcgttgagcactatcgcgagctcattgacgacgtgatctacgtgccgttgaagaagtagctatcaactccctctgatccaaaaaataagctctctctgacgagggagctgtcagccgcaggctgactgggagagaccgcggctagcccgcgaaacaacaaggccgggtgcgacttgcacccggcctcagcttattcagtccaaaatcgccgaaacataatcggcggcggcctgatccagctccgcatcgccgatggtggcggtgccctgcaccaggaacggctcagcatagttcatgccgatcttgtacgccacgacctcaaacgggctcagcagctcctccatggtgcggctgtactcgccatccttgcggtacttggcggcgtcggaaccagtggtgaccaccagcttgagctccttgcccttgagtgcgtggcctccaccgtaggcccagcctgcggtgatgacctcgtcttcccattccttgagcagcgcgggggaggagtaccagtagaacgggaactggaggattacgcggtcggcggcctccagtagctcgtgctccttgtcggcgttgacggagaagttcggatattcggcgtattcgtcgcgtacgatgatgtcgtcctcgccttgtgcggcgagttcggcaagcagacgggcgttcactcgcgagccgtccttcaggtgcggatggaatacaagaatcagcgttgacatgggatttcccttctataactgctaccaatgtggcctaatcaccactatcgtatgccgggaagcagaactcagtccagtccggattcaggtgtgagccgcgggatgccgcgccgggaggcaactcagtcgaggttggactgcgtgcctgcggtggcttcgttggcggcttgctcggcttgtgcctggtcgagcttggctcgtacgtcgttgagcaggccctgggcgcgcttggccaaggcctcgccgatttcccattgacgcatcgactggtcaagattgaggccgccggtttccagtgcctggacagcctgaatcagcttgtcgcgcgcctcctcatatggcatctgggcgatgagctcgcgttccttgtccgtcagggacgaggcgggggtgttcttgtcggtgggtgtggtgttctcggtcatcttgttctccttatatatacggtatatatgcgtgaatgcatatggtgcattacgcggttgcggttgcggatgtggcggtggcggtaatgacgccctttttcagggtgacggtgatgccatccccggtactgacccgcgaagcgtcatccagcacatggccatcggaggactgcaccaccgcatagcctcgattcaatgtggattgcgggctgagtgcggtcagtgaggcatgggcgcgttcgacggtgagctgggcatcgtccacgatgcgtcgcaggccgatgtcaagccgctgcagggaatcgtcgatcagccgctgatgcggttcgagcatggtatgcggttgggtcaggcttggccggttcgcatatccctcgataagtcgaatctcgttctccacgcgcgaacggacccgcagtcgcatacggtcgatggcaccttcgatgagctgcgactgctcacgcacatccggcaccacgcgcttggccgcatcggtgggggtggaggctctaagatcggcgaccagatccagcaacgtccagtcatcctcatgcccgatggaggagattaatggtgtggtgcaggcatacgccgcacgaaccacacgctcatccgagaaaccgatgagatcctcaaacgagccgccgccacgggccacgatgatcacatccacgctcgggtcggcatcgagttgtgcaatggcctgaaccacttcggccgggcattgctcgccctgaacatgcacatggaccaccttgaaggttacggaaggccaacgaaggttcacattggtgatcacatcgccttccgcgcgtgcctgaggtgcgcaaatcaggccaatagtcttcggaaactccgggagaggcagtttgtgatcggcatcgaacaggccctcgcccttaagctgcttgcgcaattcgtcgatcatggccttgaggctgccaccggctccgaccttgagaatcgtgtccccgcgcaacgacagcgaagtgcgcttcatccacaggttcggtttgccatgaatcaccacgcggtcgccctgaacgaactggctggccgcggccgcgaacctgccgaagccattgacttccatggcgatatcctcgaagtcgtcgcgcagcgtgatgtaggccgagccggcgcgacgggtattgatctgcgtgatctggccggtgacccacgcggacggccatcgttccacggcaccgtagaacttctggctcagcacacttaccggccacggattttgcgcgctggtttcagcggcgcgtgcaggcagctgatcgatagggcgaggctcattcggcagattgatggtgccctgatcaggcgcgaaagtgccttgacccggctcaaagccagccgaggccagtgaagcggcggtcggtggacggccggtagatgggtagcccattgcagtagtcatgcactccactataagtgcgttggttgatgacggtaaatatttaccgtcgcctgaaaacggtgtgatgatgaatgcgagaaccgtacgaagcgatgtatcagccgatgatggagatggtctggtgcatcagaagaaaggagtcattatggcgaagaaacgggtgctatgaagaggagtgagatatgcgttgcgctgacgattgagagtcgttagtgagctcgctgtgcgacacgcgagcagaaaacagttacgctaatcacacacttgtggttttggcggaaaatagccgaaaaccctataaatagttcgacacaccactgttgagcactagatatagtggtggagatgccgtattcttctagaggttcaaaaaacgacatcaatgtaatttcgtgtggcccacgtcgagtgcggccaaaatgcggaactcaggagagtgttcgccttataggaaaggggtgcccgatgggcgcacaggtgttggaggaaatcgtcaccgataacgagaccaaggtggccgccaaggcctccaccgtgctcgttgagaagcgtgatggtcgtgtggtcgacttcgaccccattaacatcatctctgcggtcaagtctgctttcggtgacctgaacaaggaagtcggccccgaagaagatgccatgatccgtggtttcgccaaccaagtcgaaggcgaaatcaaggggcgttacgccggccccgccaagatcgaggacatccagaacctcgtggagcacgccctcattgacgcccacctgtacgatgtggctcgcgcctacaccaactaccgtctcgacaaggacattcagcgtgccaaggccactgatgtcaacgaggccgtttcccgcttcatcaaccacgacccgaccctgattcacgagaacgcgaacaaggattccaacgtctactccacccagcgtgatctgctggccggtgccgtgtccaaggccgccgcgttcaacatgctgccgccggcggtgtccaacgcccacatgaagggcgacattcacttccacgatgccgactactcgccgttcactgcccagtccaactgctccttgccgaacttctgggacatgttggccaatggcttcactcttggcaacgctccgatggcttccccgaagtccatcgccattgcggccacccagattacccagatcatgaaggacgtggcctccagccagtatggtggccagaccgccaaccgtgccgacgagcatcttgcccagtatgccaagaaggattacgagaagttcctcgaggaagctcgtgagaccatccccgacggcatgccagttgaattcgcccgtcgtcaggtcgagagcgccaagaggaacgagcccgccaagctgcatttcggttcccgcgaaccgctgccgatggacaccccgttccacaccgacgttgacgaacttgagcaggagcgtgaaatcctcgccaagattcgtacccgcaaggccatctatgatgccatgcagaccatggaataccagatcaactccaaccgtgtgtccaacggccagaccccgttcgtgactgtcggctttggtctcggcaccgactggttctctcgtgaagtgcagcgcgcgatcctgctgaaccgtattcgcggcctcggcaaggaacaccacaccgccatcttcccgaagctcgtctttactgtgcagcacggcgtgaacgccgacccgggtgacccgaactacgatttgaagcagctcgccctcgagtccgccaccaagcgcatgtacccggatgtggtgttctacgagaacatcgtcaagatcacaggctccttcaaggctccgatgggttgccgctccttcctgcagggttggatcaacccggagaccggcaaggatgaagaagatggccgtatgaacctcggcgtggtcaccgtcaacgtgccgcgtatcgccatcgaatcccacggcgacaaggcccgcttctggaagctgttcgaggagcgtatggaagtcgcccatcaggccctccagttccgcatcatgcgctgcaaggaagccaccccggtcaacgccccgaccctgttccgcttcggtgcgtttggtcgtcttggtgccaacgacaacgtggaccagctgttcaagaacgagcgtgccaccgtgtcgctcggctacatcggccttgccgagaccaccgcggtcttctacggcaagaactggattcgcgaccacggctgggatccggaaggcaaggagttcgcgctgtccatcgtcaagcgcatgaacgagctgtgcaagcagtggagcaaagcggagggctaccactattccgtgtactccactccggctgaatccctgactgaccgcttcaaccgcatggaccgtgaaaagttcggccgtatcgaaggcgtgactgaccacgacttctacaccaactccttccactacccggtgtggttgcagcccaccccgatggagaagctcagctacgagaaggacttcccgtactacgcttccggcggcttcatcaactactgcgagtacccgtgcctgcaggacaacccgaaggcgctcgaagccgtgtgggattacgcctacaacatcggcatcggctacctgggcaccaacaccccgatcgaccactgcttcgtgtgcggcttccagggcgacttcgagccgaccgaggaaggcttcaagtgcccggagtgcggtaactccaacccggacaagtgcaacgtcaccaagcgcacctgcggctaccttggcagcccggtccagcgcccgatggtgcacggccgtcacgaggagatcgcccaccgagtcaagcacatgagcggcgaaaccggtcgtgtgacgctggatgacggcaccacccgcgagtggttcgaagaggccaagtagggttattcgtgagtaggctcccctctctgaggggagctgtcagcaaagctgactgaggggagtccgaagagctattccgaagctcccctcagtcgcctacgacgacagctccccctcaaagaggggagctaatgctttccgcaaggagggaatcatgccggagttgcatacgaccaagcccgaacccaagcgccatgactttgcggccagcgagaccgggcgtggcccctccgtaccctccaacggtcttgccaacgatccgaaagccggtcaatgggatggccggcgcatgtccaagcggatgatcgccgactacaaaaccttcatcgtcaccgacggagaaggcgtgcgcaactccctttacgtctccgggtgccccttccactgcgtcgactgcttcaacgcctccatctgggacttccaagcaggccacgaatacacgcaaaaacttgaagacaagatcatcgaagacctgaaagcgccatgggtgcaaggcattacgttccttggtggcgagccattcctcaacactcctgtgctggtgccgctcgcacaacgtatccgtcaggaattcggccataccaaagatatctggtcgtggaccggctacacatgggaagagctcatgcgcctcggagaaacaccagacaagcttgaattgctgcatcttatcgacatcctcgtcgacggccgctacctcaaagaccagaaggactcgctgctgcaattccgcggctccagaaaccagcgcatcctcgatgtgtccaagtccctagaagccggcgaaccggtcatctgggccaagctccacgatcaagaacgagatatccccgaaatctatttgagagaccgcgaagccggcgaaggccaacaggcctcgtagtagcaggtccggaatgccgcactcagcaatatcgtcggaactgttggggaacgcccttcccgtgagcgaaatcaccatgcccggcgtcacgttgggcaggtggtcggactaatattccagaagaagtagccgggcgaagccgtccgcaggtatctgccagccgtcccgaaacggctcatggtgcctgaaggcgcacatacccggaagtcggaattaagaggaacacatggttgacatcgtcactgacgcgagcgtaaagcccgcttcacacccgaagcccctgcgtgtgggattggacatcggttccaccaccgtcaaggccgtggtgcttgatcagtccgattccctgaaagacaccctcttctccgattaccgacgccaccacgccaacgtgcgtgccaccgtggccggcctgttggtcgacatccgtaaagagctcgtggaactaggtcgaggcgatgagccgattcgcctgtctatcaccggttccggcggtctggcgcttgctgacaatctgcatgtgcctttcattcaggaggtcatcgccgaaaccgaggcgatcgacaaggaatacccgcaggccgacgtcatcatcgagctcggcggcgaggacgccaagatcacctacctgaagcccacgcccgaacagcgtatgaatggttcgtgcgcaggcggcaccggcgcgttcatcgaccagatgtccacgctgcttgacaccgacgccgcaggcctcaacgagatggccaagagctacgagaacctgtatccgatcgcctcgcgttgcggcgtgttcgccaaaaccgatctgcagccgctgatcaacgacggcgcggccaagcctgatctcgccgcctccatcttcaccgcagtggccacgcagaccattgccggcctggctgctggccgcccgatccacggtaccgtcatcttcctcggtggcccgctgttcttcatgtccgaactgcgcgccgccttccagcgtgcccttgaaggcaaggtcgacgagttcatcgtgccgaccgacgcccacctgtatgtggcctacggttcggcattgcaggccgacatggattccgacgatcagggccaccatttcgaggcccacacctgcgatgagatcctgaagcgtttggacgagctgaagaacctgccctccaacacgcccaccatgccgccgctgttccccaccgaggccgaccgcgaggacttcaacaagcgccaccacaaggaacacatccacatcggcaccctcgaaggcgcgcatggcccgcacttcctgggcatcgacgccggttccaccaccatcaaggccacgctcgtcaacgacgaccgtgaaatcgtctggtccagctacgccaacaacgaaggcagcccgctgaccgccgccatcaacatcgtcaagaagatccaatccgagctgcccgaaggcgcatggatcgcacgctcctgcgccaccggttacggcgaaggcctcatcaccaccggcctgcacctggacgagggcgtggtggagaccatggcccactatcgtggtgctgaaatggtcagccccggcgtcaccgccgtcatcgacatcggcggccaggatatgaaatatctggccatcactgacggcgtcatcgactcgatcgccgtcaacgaagcctgctcgtccggctgcggctcgttcctgcagaccttcgccatgtccatgggcctgacgattcaggaattcacgcaaaaggctctggcttccacccatccggtggacctcggttcgcgctgcaccgtgttcatgaactcctcggtcaagcaggcgcagaaggaaggcgcctccatcgaggacatcgctgccggcctatgctactccgtggtgcgcaacgccctgtacaaggtcatcaagttgcgtgattccggcgaactcggcgacactgtggtggtccagggcggtacgttcctcaacgacgccgtgctgcgcgccttcgagctgctcaccgaacgtcaggtcacccgcccgaacatcgccggcctcatgggcgcgttcggcgccgccctgaccgcccgcatgcactatcaggatgaggccgaccacttggatgtggtggttaaggccgatgggtccgaggaacagtccgaggctgagcccgcacccaagtccgagcccaaggccgcagccttcaagaagaccgagccggccaagcccgaagtccatgtcgttgtcgtggacggtgtgacccacaccgccagctccatcctgaccggcgacgcactcgacaacatgagcatgaccaccgagcgtgacgtgtgcaagctgtgccagaaccactgcaagctcaccatcaccacgttctctgatggttcgcgcttcgtgaccggtaaccgttgcgaacgcggtggtgacgccaagaagaagcgttccgaccgtccgaacctgtacgactacaagtacaagcgttgcttcgcctaccgccgtttgaccgacaagaaggccactcgtggcgagatcggcattccgcgcgccctcaatatgtacgagaactacccgttctggttcacgctgctcaccacgctgggcttcaaggtgatgatctccggccgcagctcccacgagctattcgagaccggcatcgaatccatcgcctccgaaaacatctgctacccggccaagctggtgcacggccatatcaagtggctgctcaacaagggcatcaagaccatcttctacccgtgcgtgagctacgaggagaacctcgtgcccaacacggacaatcattacaactgcccggttgtggccaactatccgctcgtcgtcggcgccaacgtgcctgagctgcgtgaagacggcgtgcgctacatgcacccgtacttcaacctcgccaaccatgagctcatggttggccgcatcgtcgaagagtttgcgtgggccaacgtgacccgcgaagaggccgaaaccgcggtcaaggccgcctatgccgaagacaaggtcttcaagcacgacgtgcagcaggaaggtttgaccgcgctcgcctacatgaaggagcacaactgccgcggcatcgtgctcgccggccgcccctaccacatcgaccccgaaatcaaccacggcatccccgaaaccatctgctcgctcggcatggtggtgctctccgaggattccatctgcgaactgcagccgggggagaagctcaacctcaccgaattcctctcggaaggcgaagccgacccgcgctccaagaacgccgccggattccgccacgtgggagaccgcacagtcaccaagatgccgttgcgcgtcaccaaccagtgggcctaccactcccgtctgtacgcggccgcacacttcgtggcctcctacccgggcctcgaactcgtgcagctcaattccttcggctgtggccttgacgccatcaccaccgatcaggtggccgaaatcctggcagacaaggcggacgtgtacacgctgctgaagattgacgaggtctccaacctgggtgccgccaagattcgactgcgctcgctcaaggccgccgtcgaggaacgcgaagccaacaaggcccgcgaagccgccgcggccaaggccgtgcaaggccccaagtccaccggattccgcaagaccggctccaccgcgccaacccccggccgccagattctgcttgacagcaccatggccgccaacccgaagctcaccaaggccatgcgcgccgcctccaagcgtgccgccgaacgcgacctgcaggccgcagccgccaacaagaacggcacttcggacggcaccaccggcgtgacgaacgccaagaatgccaagaagtccggccacaacaacgccaccatgtcccgatacgcgcatcgtgagaagttcgtcaaggacatgaagaagaactatacgattgttggccctcagatgagcccgattcatatgtccttggtcgaagcggtgattcgttccggtgggtacaagttcgacatcctgaagcacgcgagccgtggcgatgtggaaaccggcctcaaatacgtgaacaacgacgcctgctacccggccatcatggtcgtcggccagctcatcgacgcgattctggaaggcgaatacgatcccgaccatgtagcgctcgccatcacccagaccggcggcatgtgccgtgcgaccaactacttcggcctgatccgcaaggctttggtcgatgccggctacccgcagattccggtcatcgccatttctacccagggcctcgaagacaaccccggcttcaaggccaccctgcccctgctgcaccgtgccatcaaggcgctgattctgggcgacttgctcatgaagtgcctctaccgcgtacgcccgtatgaggtggagaaaggttcggccaacaagctgtacgagctgtgggacaccatcgtgcgtgagaccatcgagcatcacggctattccaagaccgcagccaagacgccgagcatcaagaagggctatctgccgtataacgtgctggccaaggagatcgtgaa

SEQ ID NO: 327 - DNA, 2565 bp, Unknown
  R42_10m  MAG No. k141_7294
catgagctgcttggcgaagtccttggaaccctcgatctgggcggcggccttggacgggccgaacgccttgatgccggcggcggcgaaatcgtccacgatgccttcgatgagcgggacttccgggcccacgaacacccagtcgtagccgttgtccttcacgaattcgatgagcgcggcatgattcgactggctcagctgtgtggtgcggatgccatccttgagcatgcccgggttgccgggcgccacggtgacttcgtcgacgctcggcgatttgagtagcgtgtaggcaatggtatgctcacgcgcaccggagccgatgaccaatactttctgacccatgtttttccttcctaaagtctttggctcccctctttgaggggagccggtatctggagctacttcagtacgatttgcgtgtcggtggtgtcggtggtgatctggccgagcacgtaggcgggttcgttgttgtcggcgagcagcttcagcgcctcgtccttgcgggcggggtcgatggccagcaccatgccgatgcccatgttgaagatgttgtacatctccttgtgatcgatattgccggccttctcaagcacgtcgaagatcgggagcacaggccaggtgccaagttcgatttcggcggccagaccgtccggaatcatgcgcgggatgttctcgatgaagccaccaccggtgatgtgggccacgcccttgaccacgcccgccttgaacagcggggagagggccttgacgtagatcttggtgggggtgagcagcacgtcgccgagctttgcgccgcccagctcggcgagctcagtgtccacggtatagccagcctgctcgaacagggccttgcgcaccagggagaagccgttggagtgcacgccggtggaaggcagaccgataagcacgtcgccctcagtgatggtggaaccgtccacaatggcggacttttcggcaacgccgaccgagaaaccggccagatcgtactcgtcctcgtcgtacatgcccggcatttcagcggtctcaccgccgaccagtgcggaaccggcctgcacgcagccgtcggccacaccggccacgacctgctcaagcagggccgggtcgttcttgccgcaagcgatgtagtcaaggaagaacagcggctcggcaccctgggcggcgatgtcgttgacgcacatggccacgcagtcgatgccgatggtgtcgtgcttgttggccagcttggcgaccatgagcttggtgcctacgccgtcggtgccggagatgaggaccggctccttgtagcccagggaggctaggtcgaacaggccgccgaagccaccgatgccgccgaccacgccgggacggttcgtgcgggccacgtgcgacttgatgcgcttgacgacttcgtacccggcttcgacgctcacgccggcgttctcatatgcttttggcatttggtggggcctttctgttctattttcaagctcccttgccggggagccacctgcaaaaagtggattttcgtttgtactaagctccccttgtcaggggagctgtcagcgaagctgactgaggggtagtcgtaaagaccaatgactgaggtgtagtcgaaggaccggccgaacctactgcacgtccggctgcacggtgttgtactcgttgccgatgtacttgctcttgtacagcgcgaattcaggcagacgcacacggtcctcgggcgtgagggacttcaggaagtcggcctcgtagtcgtcgagcgcagtggggtagtcgccgttgaagtaggcgacgcacaggccaccgtatggggcgtcggcgttcagtccgatggattcgaccagaccgtcgagcgaaaggtaggccaaggaatccgcgccgatgtattcgcggatttcctccacgctcatcttggctgcgatgagttccttggtggtggagatatcaatgccatagaagcaagggtacttcagcggcggggagctgatgcgcatatgcacttcagcggcgccggcttccttgagcagctgcacgatgcgcttggacgtggtgccgcgcacgatggaatcatcgataacgataacgcgcttgcctttaaccacgctgcgcacagcagagagcttcatacgcacaccctgctcgcgcagttcctgcgtgggctgaatgaaggtgcgggccacatactggtttttgattaggcccatttcgttgggcaggcctgctgcttccgcatagccggatgcggcggacaatgaggagttcggcacgccgataaccatatcggcctccaccggggattcggcggcgagacgtgcgcccatgcgcttgcgggcggagtgcacgttgacgccatagatatcggaatccgggcgtgcgaagtagatgtattccatcgagcagatggccagctgcgtgttgttggtgtactgcacgatcttgtagccgtgatcgttgaccaccacgatttcgcccgggcgaatgttgcgcaccagctcggcgccgacgacatccagtgcgcaggtttcggaggcgagcacgtaggcgccgttcttcatcttgccgagggagagcgggcggaagccgttcggg

SEQ ID NO: 328 - DNA, 80248 bp, Unknown
  R42_10m  MAG No. k141_8730
acgatgctgttgcccagctgctgggtcaggggcatctgggacatggcgcgcatgaaattgcccagggtgaagcccttgaacaggccgttggcgtcgaagaagaacgcgccgacgtagatgtacagaaccggcagcatgaccagcacggtcacgatcagggccagcacggcccacaggccctggctcacgggggaggtcttgcggatcatcagtagttcaccttgccttccaggaagcggaactgcagcaatgtcaggacgaacacgaacaggaacagcacgatgcccagtgcggacgcgatgccgaaattcgcgctgcccgcgttgaacgcggtggtgtagatgttgtaggtgatggtcgtggtcgcctggcctggtccgcccttggtcaggatgttgatctgggcgaacgcctgcagggcctcgatgcatgtggtcacggcgatatagaacagcgtcggtgtgatcagcggcagcacgatggaccactggatgcgggcttcgttcgcgccgtcgatgcgcgcggcctccaggatctcctggtccacaccgtcgatcgcggcgcacaacaggatcagcgcgaatccgagaccggtccagatggtcaccaaggtgaccgtgaagaacgcccacttcgcgtcggtgaggaacccgaccggccggatgcccagtttctcgatgatcgaattgatcacgccgctcgaaccgaacaacgccaggaagcccagcgatgcggccgccaccgagacgctgacgatcgaggtcatggccacacgcagtatcttgatgcccatgatgtgcctcgtcagcagaatcgccagcagcacgcccaaggcgatgcgccccgccacgaccagcacggcgtagaggaacgtctggataagcaccttgacaaacgccgggtccgtgaagaccgtcctgtagttctccagcccgatgaagcctgagggcgaaccgaagatgtccgtgccctgcatgctcatcatcaccacgcgcaccagcgggccgaacacgaacacgaccagcaatgccaatgccggaaccagcatgaccgcaccggtcaggcgattcttcgcaacgagaacgttcgccgtgcgttcgccgtgcgtcttggcgccgtgcggggattgcgacaaatgggttgatgacgccatctcgcgcttcctttctttctccggctccggcattgccttgccgagagccatgggtaatacccttttacgtcttttggttgtgagccgcagccgttccgatgacggacgcggcgtatcgagttgctgatttgctgctatctatatccgttgttgtatgggggggggtcactccatcttcggagcgctcccagtgattcatagtatatcctttcgacataagaaagtctaatcgacgatatacagccatttcaggctaaagatgaacgttcgctgaattcagtgctaatatttataaactcaataattacagtattgggagcgttctcagcaaggagggtgagatatgtgggttattcccatgttggcattggtgttctgcctgcttggaggaaggaacgacgggtctcccctggtggccatcaacctcaaggccgcgcgccgcgtcacggcggcccccttcctgatgctggcgacggcggtggccttgctgccggccgccaacagccgagtcggaggaaccatcgtcgccatggtctcctccgaaggatccggcggacaaagtccgctcctgctggcgacggtgctcgtcgccgcatcggccaccctgctggcgctcaacggaggtggcgtgcccacctcgatcacgctcgccctggtcggagcatcctccggagccggcttcgccggcggacatccccaatggcatctggtgctgcgcgtcctcgggatagcgatactttcgcctctggtggcgttcgccgtctcccgcaccatctacctgctgttccaatccagaaccccgcagtcctcgaccaccatggtcttcctcggattcctgctcacctgcatcgcctatggcagcaatgacgggcagaagatgatcgtcctgttcggcaccgccatgggagtcgatttgggaactgccacgcacagcgccgccatcaccgcaatcgtcgccgcgacgttcctggccggcgtgctcaccggcatgcccaagggagcagccgcattgcagcgcggcaccatcgtgccggattcccggcagatctgggtcaccctgtgggcggcctccgccgccgtgctcgtcagctcggcgctgggaagcccggtcagcatgacccagtccatatcgggcgcgctcatcggcacctgccagacgaacgactggcgcaaggtccgctggggcgaggcgcgcaggatcctcatcgcatggacggcaaccctgcccatggcctggatcctgggctacgccgcagccaacgggctcgatctgctgccactgtgatgcatcctcgggcgacgggtgctatcgctccgccgccaccacgcgcgggtgcctgggattgcggcgcgggatgcggcttccgttccgcctattgcccgtctatcgcccgtctttccaacgtggcagcgccacggtgcgcccgtggatgaattccccctttactggcagcgcctccacggcgtggtccccgccatccagacgctcgagcaccagatccacagcgcgagaaccgatctcctccaaaggctgccgatatgtggtgaatccaaggtacggcgacgcgagcgggccaaacccgtcatagccggtgacggacacatcctgaggcacggaaacgtcgcgccggcgcaactcgtccatcacattgagcatgaccacgtcggacggacacatatacgcggtgatcctgggatggcacagcacctcgtccaccagcgttccaacctcttcggcccctttcatatccatcaccttcacgcggatgccgagctgcccgagcagctcgatcatggccatgccgcggccgtactggctgaccgagtattccctgggcaccagaaacaccgccacctcccggtgcccgaagtcgtggacgtattgcgcgagcctgcggccgccgtcctcctcatcgcaaaacaccgaggacacggtgcgcgtcgtgtcctcgtgcccggccatcacgaacgggatccggtcgatgaacggcatgaaatcctccaccgcaagcatggcggagcatacgatcagcccctcgacgcgcagggcgatcaaatcgcgcagcgcctggcgagcatcatccgcggacagttcctccacgccgctgatggacaccatctgatagccgcgctcacgcgcccgcttctgcatggcgccctgaaggaacccatagaaaggcagcttcgcgttcctgaccaccactcccagcgttttcgtgcgcttcgaggcgagcccgctggccatggcgctcggcacgtatccaagcttcttcgccgcggcgagcacacggtccaccttctcctgacgcacgcccccttcgccgcgcatcacgcgggaaaccatggacttggagactccggcctccgcagcgacatcgaaaatcgtcggctgcctgctctctgcggcctccatgctgccctcctcatcgtcacaatatgcaacaccgcaagcgacggggcctcagcccaaatccgcaacgctgcccgttgccccgccatctcgacacaatggccttttcttagagattaccgcacttcacgccggagcatcggcgcggtttcgttggacggtcacggttcgagatctccgtctgcggcgagaaattccataatgtgtgaatcgccgggcttgcgtcgagcgggtagagcagtccgtagtgcatgatgaccggttcgggccagtccacggccacgttgacgagctgcgggtgaatgccggcccacatcggtttggagatgagcaggtcgccggattcggcgcagtcgttgaacgtgtcgaggtcgtaatggtcgatgtcgatcagatcgatggccggatattgttccagcaggtcccgggccgtgtcgttggcgccgcgatggcgtttgaggatgcggatgcgtgtgccttcgaggtctttcaatgtgagtagtgcatgtctcgccagtgcgtgattgcgcggcaccgccacgcacagcggctcggaatcgagggcgagggtgttgccggtgtcgtcccaatagccggtgtcgaaggccgtggatatcagatcgacgtcttcgccgagatgggtgacgatgtcgttgatcgcttcggagtcatcgggcatcgacaccagttccaggcggatgtcggtgtgtttgccggcatcgcgctgccataggtcgaggatgcggcggccgggtcgcagaatggaaacgccaaggcggacggtggcgatgccgtcggtgctgcgctgttgcgcacggcgtagaatctcctcgcattggcgcacgatcatctgcgcgtcctcgacgaactccttgccggctttggtgagttgcactccactgcgcgatcggtcgaacagcgtcagaccgtattctttttcgaacgtattgatctgtttggccaccgccggtgtggaaatatgcaggcgatggccggccttggcgaagctgccggtctgcgcggcggcgcgatcggcatggccgtattcggtgtggtcgccaccttcacgccctcgcttgacggctccctgtgtgtcgtgttcgttgcggccgaagtcggtgcggaatggcgcgttcaaccggaacgtggggtcaacaggatggctcaccagttcctcgaaaagctcatgggtgcgttccggcgtgtgatacccggcgttgagctccgccttgatcggcgtattgcccgaaccagttcagtagcagattgtgtacgggcgtgcgcagcgggaacagcagcggcacatccttgagattctgcggggtcaacgattcgcgttccgccagcgggtggtttccgggaaccatcgctgaccagtgctttgtaatgccggtgcgcaggaactcgtattgacttggtctgcgcacactcgcgcagcatccggccttcctcggtgagcgtgatggtgtgactgccgcgttcgaacagcgtgacgcccaattcctcttccaactgtttgagctgacgggagagcgtcggctgggaaatacgcagcaactgcgcggcccatgtgatattgccttcctcggcaaccgccagaaaatatcgcaggacgcgcagttccatcctcggggctccttcggtgtggatggacttctattgccattatgcccgccgcccgtgaactcattatgctaaacgcggatagtctcggtaatgacgcggcgaacagcatgcgagaggcggcgctcaatagcgaaagcctctcgactgccgtcgttggtcgtgatgatactggagaccatgaagctcgtgcggcggcggtctagggcgaggtcgagaaagaggtaacggcgtgacgcttgataataggtcagacagtagggtggcggcggagcagtgccgagcatgagcaacgatcagcggccgcagacgatcgaagtgcgcggggcgcgcgtgcataacctgaagaacattgacatcgacattccgctgggcgaactggtgggcgtggccggcgtctccggttcgggaaagagctcgctggcgcttggcgtgctgtatgcggaaggttcgcggcgttacctggaagcgctgtccacgtacacgcgccgtcgcctgacccaggccagccgcgcccaagtggacgaagtgctgcatgtgccggccgcgctggccctgcaccagcggcccaccgtgcctggcatccgctcgacgttcggcacgatgaccgaactgctcaacagtctgcggctcctgttctcccgcgtcgcctcgcacgtgtgcccgcattgcggggcgcgcaacgaaccgacgctgaacgtggcggccggactgcccattacttgcgtcagctgtggcaaggaattccacgcgcccggcgccgaatcgctcgccttcaactcggccggcgcctgcccgacctgctccggaaccggcattgtgcgcgaagtgaaccgtgcggccctggtgccggatgagtcgaaaagtatcgacgacggtgcggtgctgccatggggttcgctcatgtgggacctcatgaagcaggtgtgcggcgcgatgggcgtgcgcaccaatgtgccgttcagcgagctcacgcccgaagagcgtgacattgtattcaacgggccggccgtcaaaaagcatattctttacaagccgaagaaaggcgacgatttcgccgaactcgacttcacctacttcaacgccgtatacacggtggagaacgcgctcgccaaagccaaggacgagaaaggcctgaagcgcgtggctcgatttctcaaggagggaccatgcgccgactgcggaggtacccgactgagcgccgtcgcccgggctccgcacgtgcgcgggctgaaccttgccgaagccagcgcgatgaccttggatgcggcggtggattgggtgcgcggagtgccggaatccctgcctgccgacatgcggacgatggccaccaacatctgcgaatcattcctggacgtggcccgccgactgttggatctgggcctcggctatctggcgcttgaccgcgccggtgccacgctttcaaccggtgaacgccagcgtgtgcagctcgcccgtgccgtgcgcaaccgcaccaccggcgtgctgtatgtgctcgacgagccgtccattggcctgcatccctcgaacgtggatgggctgctcggcgtgatgcatgacttggtggcggacggcaattccgtggtggtcgtggaccatgacgtgcgcgtgctcaaggccgccgaccatcttatcgaaatgggaccggttgccggcgccgaaggagggcatgtgatcgcgcaagggacggtcggcgaggtggcggcgaatccaggcagccgcattgcaccgttcctgtcagatcaggcaaacgcgcgtattcgtgagcgcgtggcggaaccgcaggtgttcgaccttggccacatccgcatgacaaccagccagttgcatacggtcaagccgctggacgttgatattccgcgcggccggctcgtggcggtgacaggcgtctccggctccggtaaaaccacgatggtgctcgaatcgctgattcccgcactcaaagcgcaggcggcgggggagctgttgccggaacacgtgcgcgagcttgagaccgcgggcatcagtcgcgcgaatctcatcgacgccacgccgattggcgcaaacgtgcgctccaccgtggccacctatgccgatattcacgacgaattgcgccgcgccttcgcccgcacggacggcgccaaggcgggcggctggaaggctggcgatttctcatacaacaccggtcgactgcgttgccccacgtgcgacggcaccggttcgatctcactcgatgtgcagttcctgccggacgtgaccatcgaatgcccggattgcggcggatcccggtatgcgcccgaagccggcgcgattcggcgtgcggttaagggagaatctcacctttccctgagcctgcctcaactcatggcaatgagcgtggaccaggcgctggccgtgaccagcgacctcaagaaggttcacgcacgtctgaccaccctgcacgacttgggcctcggctacttgacgctcggcgaaccgacgccggcgctttcgggcggcgaagcccagcggctgaaactcgccagcgaaatgggcaaggcccaatcggacgcggtattcgtgttcgatgagccgaccatcggtctgcacccgttcgacgtgcgcgtgctgctgggcgtgttcgaccggcttgtggcgagcggcgcaacagtcgtggtcatcgaacatgaccttgacgtgatcgccaatgcggactggatcatcgacatgggtccgggcggtggcgaaagcggcggacgcatcgtcgccaccggaacgccggaacaaatcgcggccaatccgaacagcatcaccgggcggtatctgcgctgactcgtatggcggtaacgcgcctttgcataggaccctgcgcgagtaggatagccgtccatggtgcagattcatggcattagacgcgcaagcgcggacgcgaaatatcggcagatgaccgggcagccggtcaagccgctgattctcaaactgtgcttgccggccgtcatctccaacttggtgaccaccgcctacaatctcacggacacgttctttattggtcagctcggcaccgcgcagtccggtgccatcggcatcgcgttctccatcatgaccgtgatgcaggcgctcggcttcttctttggcaacggcgcgggcaactcgatgagccgcgaactcggcaaacagaacaatgagcgcgcctcccgactactggccgtgggcttcgcgggtgcggtgctctctggtttggtgattgccacaatcggattgctgaccctgcggccgctggtcgtcatgctgggatcgacctcgacgatcgccccatacgccgtgcaatacctgacgccgttgttggtcgccgcaccctgtgtatgcgggtcgttcgcgctcaacggactgctgcgataccaagggcaatcggcgttcggcatgatcgggctggtttcgggcgcattgctgaatttcctgctcgcgccgttgtttatcttcgtgctgcacctcggaatttttggtgccggcctggccaccgccatctgccagacggtgagcttcacgattctgaccacaatgagccgcaaattcggcgtgatgaaactgtccctgcgcaattgcaggccggatgtgctgctcatgcgcgaagtggccggcggtggcctgccctcgctgatccgccaaggcgccggttcgatttccgtgacctgcgtgaacattgccgccaatccgttcggcgatgcggccatcgccggcatggccattgtgatgcgcattatgctgggcgccaactcggtgatcgtcggcctcggccaaggtttccaaccggtgtgcggctacaactacggtgccggcctgttcgcgcgcgtcaaagaagggtactggttctgcgtgcggctcgccacctgcgtgctcgtggtgttggcggtgttgctgtgggtgttcgcaccgcaactggtcgagatcttccgctccgacccggccgtggtcgcggtgggtgtggccgcgctgcatatccaatgctgcacggtgattctcaacggcttcaacatgatgggcaatatgatgacccagaccatgggccgcaccggcatcgcctccttcctggccctgtgccgacaaggtctgtttttggcaccgatcgtactgattctgccgatgatgttcggcgtgctcggcgtggaaatggcccaatcggtgtccgacgtgctgacattcgtggtcaccatcccgttcatgcggcgaatcctgcacgaattgcggtagatgtcatcaagattttcgacttccagaccaggtggaccgagcatatctcgctgaatctctgtagtttttccttaccgttgcgttcattaggtcgattatgcgttcattaggtcggtgccctgcttagcatgagataatgagcattggaatgaagccattcttgaaggcagtgttcatcacaagtgacctaatgaacgcataatcgacctaataaatgaatggcggatggctaatacggagcctgaatgcagaatatgaaacgtatgaaagccaaccaggcacacaagtggcctgtgccggagcgcatcgaattgctgtaccgcaccatggctgacgcactcggcccgaccggatggtggccggcggagaccacgttcgagattatggtgggcgcggtgctgacgcagaatacggcgtggggcaatgtgaatcgttcgcttgcggcgttgaacgcggagggtgtgctcgaaccccataagctggtggccatggagccggagcgtttgcaggaactgattcgaccgtcaggcttttatgtcaacaaatccaagaccgtacagtcgctgagttggtggtatgtggagcgttgcggggccgcgcccgagggtgccgcggctatttccgatgccgaattacgggccgagttgcttggattatttggtattggcggcgagacggccgacgatctgatgctgtacgtgttctcgcgccgcacattcgtggccgatacctacgcgcggcggctgttcgccttccttggattcgacgtgccggccggctatccggcattccacagggcctattcgcccgtggtgctggatacgaacctcagtgtcaaggatttgcaggaattccatgggctcattgacgagttcggcaaggcctaccgcgacgacgcggccaaaagcgagtcctttttgggtggatggagggcttgactgcacggcgaatcgttctcaataagaaaagtgtgaggcccgcacggtgccaatcgcacatctgaatccttgactggctgcgctcgatgctgggtgtcgaaaacgagtctgtgacagaatagttcgaccgacacaatcgccaaaacgccgaacaggagccaatgatgaccgaagacaagccgatcgccaagccgattatcgatgatgcgacgcgcgagaaaatggcgcttatgttctctggcgaggtctacctgccggatgatgtggacggcttttttgatctgcaggccgcccagcgtgatctccagctcgaactcaacgccacgccgctgaccaacccgaagcgccgtaccgaactcatgcaggcgttcttcggcgcggcgggggagggtctgtacctcgaatgcccggtgtatgcgaactggggctgcaatacttattggggcgagcgctgttacgccaacttcaacctgacgctggtggacgatggtgagatcttcatcggatcccacaccatgatcggccccaacgtcacgcttgtagccaccggccatcccgtgcgtccggacctgcgctatcagggtgcccagtattcgttgccagtccacatcggcgagaacgtctggatcggcgcgaatgtcaccgtgctgcccggggtcaccatcggggacaacgcggtcattggcgccaactcgctggtcaccaaggacatccccgccaacacggtcgcctatggcagcccgtgcaaggtaattcgcgaaatcaacgaacgcgacgacgtctactactggcgcgaccgccaattcagtgagcgttttaagctcaaagagcagtagcgcgaaagctcactcccacacgtcgagcttgcgatttttgtagaaatactcgcggtccttgtcgccgatttcacgcacgacctcgcagggcgcgccgtaggtgacggagttggcggggatggaatgtgtcacgaccggaccggcgccaatcacgcaattgtcgccgatggtcactcccgacagaatcgacacgttcgcgccgacccacacgttgcgcccgagggccaccggaatgcaatacacgtagcggtgctcgcgcagcaccggcaacacggggtggcaggcggcgcattagcacggggaacggttgaacgagaagtggattggcatgtggtggtatcgaacatactgatgcgtgtgccgccgagcctgtccagatggctgcctatatgaaccagtgacagaaaagcacgggaacgcgagcgagaggagtgtgcatggggcagttcggcgtcatgattggccagttagtcggatttctgatcatgctgatggtcgggtatggatgtgtgaggcttcgattctacggtcagacggcgttggacggcatgtgctcgctgctgctcaacgtgctcatccccgtgcttgtgttctcgaacgccgtcgacggcgcggaccgcgcgcagcttgccgccaactggggcgtgatgctgctgaccgccgtgatgtacgcgctgctcatcctggtgttctggctggtcgccgaactgttgcggctcaaaggttcgcgtagccatgtatttcaggcgtcgcttattttcggcaacgccggattcatcggcattccgttgattatggcactttggccgcagaacggcgcgatttacgtggcgctgatgtcgatcatcgaccagacgctgctctggacgtacggcgtatggctgtgcgagccggtcgacgaagcgactgacggcaacgcgattggcgcgcgaggtgcggtcgtgaacggttcggtgaacggcgccggttcggtgggcaatgctggttcggcgagcaatgccgcaaacggtggttctccggccgtcgtccgcccctcgccaggcacccgcgtcctcggcctgcttaaacgattcgtcaatcccgccttcgtcggcgtgatgctcgccctgattctgattctgctcggcgtcaaggtgccggacatcatcctgaagccgctgcacaccatcggcaatatggccacgccgatgtcgctaatctacttgggcggcctgttcgcgctgaccaagtggtggggcgtcctcaaacgctacgaactctatgctggcctagtcgccaagatgatcgcattcccgctcgccttctacgcgctactgaccgcgctgaccggcgcattgccgcaactgccgatcacccatgacatggtgctgatgatcacggtcatcgccggactgccgaccatgaccaccattgccatgttcaccggtcgcaagaacaacatgcccgagtatgcggtcggcttcgtgcttgtaagcacgctgttctcgctggcctccctgacgattgtgtcggcagttgtgttctgaattgtccccttcgacgaaaagaatgccgggggcctccggcgcttggaatctcatcgacgccgccaacgactcggcatccgaggcggccgtgccgtatttcaaggagatattcgattacgcgcgcacgctcgatccgcagcatcgcccgctgacctacaccaatctactgatggccgccggaggcaaagacaagtgccatcagttcgcggatgtcatctgcctgaaccggtattacggctggtatgtgcaagatggatatcagctcatcggagccaagaaggccttcatcaacgagatgaaccaatggatgaacaccgaacccaacaagccgtttctgttcaccgaatacggtgcggacaccgatgccggtgcgcacaagctgccgagcgtgcaatggagtgaagagtaccaatgcgagtacctcaccatgcagcacgaagtgttcgacatgttcgaggcagtggtgggcgagcaggtatggaacctctgcgacttccaaaccggtgaaggcatcatgcgcgtcgacggcaacaagaaggacgtcttcactcgcgaccgtcagcccaaagccgccgcctatgtactcaaggagcgttgggagactaagtagcggcccgcccctggaatattccaggagcaacacacatcgcataacacacaacgcaacatacaaaaaagaacctcgtgaaacgaatttcacgaggttctttctagttacgctgaatgactcccattagactcccacaagagaagagcaatggcgaaatcccaacgttgctaagctctcaaactcagatgtggaagtagagctcgtactcgagcggggtcggggccaggcgagcctggtcgatctcgtcgcgcttgaggccaatccaggtctcgatcaggtcgtcggtgaacacgtcgccggcggtgaggaagtcgtggtcctcttccagggcgtccatagcctcggccagggagcttggcacctgcttgatgccagcgtgctcttccggcggcagctcgtagagatccttgtcgaccggctccggaggctcgatgtggttcaggatgccgtccaggccagccatcagctgagcggagaaggccaggaacgggttgcaggacggatccggagcgcggaactcgatgcgcttggcagccggggaggtgccggccagcggaatacggatggcggcagaacggttacgagcggagtacaccaggttgaccggagcctcgaagcccgggaccagacggtggtaggagttcagggacgggttggtgaaggccagcacggaggaggagtgcttgatcagaccgccgatgtaccagcgagccagatcggacagaccagcgtagcccttctcgtcgtagaacagcggcttgccgtccttccacagggactggtggcagtgcataccagtgccgttgtcgtcggcgatcggcttcggcatgaaggtcgcagccttgccggccagagcggcggtctcgtggacgacgtacttgtacttcatcaggtcatcgcctgcgtgctgcagggtgttgaagcggtagttgatctcctgctgaccagcgccggcgacctcgtggtgggaacgctcgaggatcagaccgaccttctgcaggttggcgaccatatcgtcgcgcagatcctgggtgtggtcaatcggcggaaccgggaagtagcccttcttgacgcgattcttgaaaccgatgttcggggtgccgtcctcttcggagtcaacgccggagttccacggagcttcgatggagtcgacctcgtagaaggagcgctgcatggagttctcgaaacgcaccttgtcgaagatgaagaactcggcctcaggagcgaaggatgcggtgtcggcgatgccggtggacttcaggtaggcctcggccttgccggcgacctgacgcgggtcgcgggagtacggctcgtcggtcagcgggtcgacgatggagaaggccacgtcaagggtcttgtgcttgcggaacgggtcaacgaaagaggtctcaacgtccgggaccagcttcatgtcggactcgttgatggcctggaagccctgaacggaggaaccatcgaacggcatgccgtcggtgaaagcgtccttcaggaattcgctagccggcacggtgaagtgctgctgaacgccgataagatcggtgaaacggacggagacatactcgatgccttccttgttgataagggcctcgacgtcttccttggacttgagttcggtcacgggaccgctcctttcgtatgagatataacggtatatatcgtaaaatagcgcgtttcgccggctcgaaacttgggttacgagaatgtttcgtgactgtggccgacaatcgcgcaggcgcgttatttcaacgaaacaccattacagaatggaaacggagactatcgggggagtaggtagagatgtccgcaacgtggacagtgggtattgacaggtgacgtaggtggatgtaagtggacgcgattatgagacatatgacgaagccccggaaccgattgaacggattccggggcttctgtgcgatttggttgtgtgctgccgatcagcgaccgcgcatcgcgcggcgggagatcttctgcgggcggttcggatccatgcccttggggatggcatagcccttcttggcctgcagcgtgcgaagacgatcgttcagcgtttccatctcggccttggtcagcaggaagcgacggcgcggatgaatcttggcgatcagtgcgttcttgtggtgcgtgggctcatagctcttggacttgatcaccgtgctacgcagcttggccagcggcacctgcttggggccgtggcccacggcgatgcggtatatcggaatggaggagccggcggtgacgcccttgatatcgcgttcctgacgatccatcgccttcatgacgcgaccgtattcgccttcgccgatcaggtagatgccgttcatcgaagtgccgcgccagatggcatccttggtcttcgggtcgatccacaccggttcctgcgggaagtcaaagccggctttctgcatgttgctcagcacgccgatggcggcaccaggcttgccatcaatctgcttgtagccgactgcatccgcgcggcgggtgagcatcatggtggccagcagaatgccgagcatgatggcggtaatcatggtgaagatccaggtcagccaggtccacttgacaatcagaccgatgatgatcatcacgactacaggcagcaggaaagcaccggcctcaagccacggcagggccttgtcttccttagccgtgtacttgtagatctggatgatctgcttgattgtgctctgcttcttcggcttcgcgtccttttccgccatcacttcttcctttgttgggacgaaacacactggacaatatcttatcaggtgcgctggtccgaacttgcttgtgctggttggtctcagcgtgtgtgcaacggtcgtccgtcggccttgagcagcgcctcgccgagcgtttcactgaatgtgggatgcgggtgaacgaggcgggctgcgtcggcgagcggcacatggttgccgaccagctgttcggcttcggcgatgatgtcggaggccatcggggagaccatgtgcacgccgagcacgcgcggggtgtccgggttggccgcgtcgcagccggagacgatggtcaatgagccggccgtgccgctcatcagcatgcgcgcgttcgccagcatcggatagttggtctccttgatttcgacgaggtcctctctcgcctgcgcctgttcgacggtgagcccgaccgacgccgcttcggggaaggagaacacgatctgcggcacagcggcttcgttcaccggcttgggattgagtccggcgatggtctccgcgatgacgatgccttgctcaaaagcacgatgcgccagtgcgtgaccggccgtcacgtcgcccaccgcccatacgcccggtttgtcggtgcgaccgtacgcatccgtggcgacatgtccgtggtcatcaatcgtcacgccccatgctgggtcggtgatcgggtcacgcccgatggcgacaagggcgatttcgccccaaacgctctgttcgccgtcctggccttcgcgcgtgtagtgcacggtggcaccaaggttcgcgccggtgtccacatgggtgacgctggcgcgggtgatgatgttcacgccatgacgtttgagctcacgggtcagcgtggtgccggctctccggtcccaggctgagagcacgcggtccttgcgaatcagcagggtcaccttcgaaccggcggcgttccacatcgaggcgaattcaagggcgatggccccggcgccgataatcaccgccgaagagggaaattcgttgacttccagcgcctgtgtggagtcgatgagggcgccggcgaacgggttaccgggcaatgggtgtggcttggcaccggtggcgatgacgatgttcgtggccgtgaggtccatcgtggggccgctgggttcggggacatcggccttgtgataggtgaggatgtcgctttggtcgggggagggaacgaggtggacgatgtggttggaagttgctggagtgatctcatccgcatggaacgcggcattggctcggaacacggtgatgccgcgatgggccagcagtccggccagtcctcccaccatcgtcttgaccacgcgcaggcgatagtcgcgcagcgtgccgaagtcgatgccattcaccgaggcgttgacgccgagttcggccgcacggtgcacggtgtcgatggtgtgggtggcggtgatgagcgccttggaggggatgcagccacggttgagacaggtgccgcccacggtggcgtcacgctcgacgagtgccactttcatgccgagttcggcggcgcgcagggctgtggaatagccgccggggccggccccgatgatgaccagatcaaactgttcgctcatgattgcctccttggtgcatataagtatggctcccatgctagggagccatatgcggctatcgccgccacttcgcctaaaaacagtccactggactgttttctttacggctcagcccctcaacgaggggagccagagtatatatatggacatcagtctgccggccagtgaccgcgcttcgggtaacgcggcttgggaagcctccaacgacgcatctgaatcgaacggctccaagcgtaggagaaggagcgggagcccttggacacggactgttcgccgtacttggcgatgagcttggccttgagcttgcgccacatcagccatacgtcgatgatcacggcaatcaggtaaccgtacataagcgccatcatgatgatggaagcccactggttctgcatcaaagaagtgacgaacatggagacgatcagaatcgcgaaggccaccgggatgaaccattcgccaaggttgaaacgggcatccacataatcacggatgtagatacgccaaggcaggcgttccgccttgggcatgtggttgatatcgcccttctgcatcgcctcgtactcggcgttctccttctcacgcagacgggctttggcggccttggcgctggccttgcggtccaccggaaccagcggacggataccggcggcctgagcctgcttcatcttcggggtaggacggccttttttctcagaaggatcggcggtcttcttcggggcctgctcaacgggaacttgagcctcttcttttttcctaaacggattccatgtcatgctttgaggttacggtgacgttcagacacttgtatactggcgcagccattgcaatgacgccgcttacacacatataaaggaggaccatcatggcaacgctcaccgctgacgagattcgttcgcgcgtcgaaaccgattggaaccgcatcgtcaaggtgctggccgaaaaggttgcgctgcagtcgatctccgccaagggcatcaccgccgaacatatgaagcgctccgctgaattcgtggcagacgaactgcgcctcgtgggtgtggatgccaaggtggtccaggcttccaatgccgacggcactccgggcgcatgggaggtcatcggctcgcatatcgtttctccggacgcccccaccgtgctgctctacgcccatcacgatgtgcagcctgttccggacccggccgagtggaacaccgacccgttcgtggccaccgaaatcgacggccgcctttacggccgtggctccgccgatgacggcggcggcatcgccatccactccggtgcgctgaaggctttgggcgacgacctcaacgtcaatatcaaagtgttcatcgaaggcgaagaggagatgggctcgccaagcttcattcccttcatcgaggctcaccgcgacgaattcgccgccgacgtgattatcgtggccgattccggcaactggtcggcggacattccttctttgaccacctcgctgcgcggcaacacttgcgtggacgtgaccgtgcagggccttgagcacccggtgcactccggtcagtacggcggcccgattcttgactccaacacgttggccgccatgctcatcgcttccatgtacgacgagaacggcgatctggccgtgcccggcgtggccgcggaagagccaatcggcggtttgcaacgcgaccttgacgaaaccaccgtgcgcgaggattccggcgtggtggccggttacgagttcgccggcaccggttcgctggcctcacgcctgtggaccaagccgtccgtgaccgtgatcggcttcgacgcccacccggtcgagggatccttcaacgtgatcgccccggagacccgcttccgtctgtcgctgcgcaccgcgcccacccagcgccctgaagaagcgcaggaagcactggctgcattcctcgaatcccacgcgccgttcggtgccaaggtcactgtcgaacgcggcgaaaacggcatgggctgggccatggacccgaccgccgtggccaccaaagacgcgctggaagccatgaccgaggccttcggcgttgagcccatcaacaagggcgagggcggctccattccgttcatccccgaactgcagcgcattttccccaacgctcaggtgctggtcaccggccccgaagacccgaaggccaacgcccacagccccaatgagtccatctccctgcccggcctcaagaacaacgtgatcaccgaggctttgctgctggacaagctcggcaagtaaccgaaccgcatcggtaatggtggcgagctgccgtcaggtaggtcacggatgtggctattgcctttgacggcggcttgctttatagtcggggagttgacacgggagctgccgttaggcggctgagaggagattcatagtctcgaccgatggaacgtgaccggataatgccggcgcacggaaatgtcgctcttacccacccgtgcctgaaccaacccgcgcgtggccacgaacatgtgcatcatgtgcgtacatatatccatgtatgttcggcctgcgtacgagcagaagaaaggcacattcatgactgaagctgtggccaaagccaattacaagtggcgcgtcgtcgatatcgtcgtcgccgcaatcatcgccgtcgcatccggcgtcattttctggggctgggacattgtctgctccgccccgctggccctgttcgaaggcgtgacccccggtttcgagggtctgctcaacggattctggctgttcgccggcccgctcgccgcaatcatcgtgcgcaagcccggtgccgcactgtttgccgaaaccctcgccgccttcctcgagcttacgctgggcaaccagtggggcgtcggcggctcgctgatcgtcggcatcctccagggtctgggtgccgaaatcgccttcgccgtcttcgcctggaagaagtggaacatcggcaccaccatcctgtccggtgcgctcgccggcgtgggctgctgggcctactactgggccaccaacccgggctggaacggcctgcgcgtcacttggtatctggttggctccatcatctccggcgtcgtgatcgccggcgtggtggtctggtacttgtctcgtgcgctcgccgccaccggcgctctggaacgctttgaatccggccgcagcaaggcgcgcgtctgatgcaggttaatccggctgcggtagaggccagcggctggggatggcggcacgccacgcgtaaggacttcgcgttgcgtgccgtcgatttcaccatccggccaggtgaacgtgtgttgctgctcggtgcttcgggggcgggcaaaagcacgatgatggccggtctcgcaggcgtacttggcggcgatgaggaaggcgagcaggagggctcgctcaccatcgatggcgtcgatgcgcgcgaggcgcgaggccgcgtgggactggtgcttcaggacccggactcgcagatcattcttgaacgactgggcgatgacgcggccttcggctgcgagaacctcaacgtgccgcgcgaggagattcggcagcgagtgcgcgaatcattggatatggtgggactcggcggactcgaactggatcggtccacccgccatctgtccggcggtcagcgccaacgtctcgcgttggccggcgtgctggctatgaagcccggtctgctgttgttggacgaaccgaccgccaacctcgaccccgaaggcgtggtcgaagtgcatgacgcggtcaaaaaggtcatcgaggccaccgggcagaccatggttgtggtcgaacatcatatcgatgtatggctcgatctggtcgatcgcgtgatcgtgctcggccgacccgatgcaagttcgcccacgggcgcggtcatcgccgacggcaagccggacgaggtgttcgccgagatgggcgacgtgttggccgccggtggcgcgtgggtgccgggccgtgcgattcccgattactcgccgaagcgggagcctgcgcacgatgcgccggtgctcagcaccgagaacttaagctttggccgtggaaccgctcttggcgttggcatcaatctggatttctatcccggcgaagtaacggctctgatgggtccgaacggcgcgggcaaatcgaccttggccctgaccttggccgggctgctcgagcctatcgccggcaaggtgctcatcgccgacaacctcaagcccgcgcatgccgggcgtgagccgattgactggaaaagcaaggaactgctgggccgtatcggcatggtgttccaggagcccgaacaccagttcgctgccaatttcgtgcgtgacgaagtcgccatcggccccaagtcgatggggcagagccaagacgaggcttatcggaccgccgaccgcatgcttgagcagatgaatctcacgcgcttcgccaaagccaacccgtataccttgtctggcggggagaagcggcgactgtccgtggcctccatgctggccgccgcacccaaagtgttggtgatggacgaaccgacattcggacaggatttcagtacgtggaatgaaatggtcaagctgatcgccgccatccgcgaccaaggctcgtgcgtggtcatggtgacgcacgatgaggcgctggtggatgcgctgggcgcacgacgcgtgatgttcgaggaggcgaggcatgagtgacgtggtaaccgtcagcccgcaggaaacgcgcgtggagccggtcaaagcctcatcgccctcatggttcatagcgcgcatcaacgcggtcagtcgcatcatcggtgcgctgttgctgtgcgttccgatgttcatcagtctggatgtggtatccgcatccacggcgctcggcatcgaattcgtgctgctgtggattggtggcgtggctccgtggaccgtatgccgtaagacctggccggtatggatcgccgccgccggcagttttatctccgtgtttctctacggccgtacctcgggcgagatcctgtggcagggtggctggattgtgatcagcgagggatccattaatctggccatcgccacggctatcagggtggcggccattgccgtacccggcgtgatcctggccctgggcctcgatcccactgatttggcggacggtttggttgagattctgcacttctcaccgcgattcgtatacggcgggttggctggattgcgcatgtttacgctgctgcaggaagattggcgcgcacttggcttgtcccagcgttcgcgcggccttggcgacggtaacgccatcgcccgtgccctctcccaagcgttcggactgctggtgctttccatccggcgcgccaccaaacttgccaccgccatggaagcgcgcggcttcggctccagcgccccacgctcccaagcccgtatctcgcgtctgaagcctatcgactggatcttctacgtcatctgtctggctgtcccgctggcctccataggcgtagccatcggcaccgggaattggcacttcgcctttcaaggtgtctgaaaggcgacagactggcacagtgcctttcaaggtgtctgaaaggcttacgatgcctccgccagcgggagcgagccacgactgacgtaatgacccggcagtagggtagtggctatgcccatcaacgcccagattcttgataatccgaaatccgaccgcgttcgccgcatcgccgatctgacccgcgccaaaggccgcgaacgttcgggccgttttcttatcgaaggcccgcaatccgtgcgcgaggccgtcacttggcggccggacgtggtgcaggacctctatgtggaggtttcgcaggcgttggaacatccgcgtatcatctcctccacgttggagaagatcgtcgaaacctcgcaggatgccacgatttatgtgcactactgcaccggcgacgtgatgcaccgcatcagtccagacgcccagggcatcgtggccgtcggcaatgccgagtccatgcacgccggtgccgatgacgtcgaacttggcaagaacggccggggcccgcagatcgccgccttctggcaggtgcgcgacccgggcaacgccggcaccgtgatccgtgcggccgatgcggccggttgcgacgccgtaatcttcgtggacgactgcgtggacgtgctgaaccccaaggtcatccgctccaccgcaggctccctgttccatctgccggtactcgccatgagcaccgacgaattcttcacctggacaggcgaccataatatgggcgtctgggccgccgacgtatacggcaccgaagaatgcaagccggaaagcctgcccgcagtactggcggacaaggcggcggtcgaggctccgaaagccgtgctgttcggcaatgaggcgcgtggcttggaaccggacatcctcacacgctgcggccgcatcgtctccatcccgctgtacggcaaggccgaatcgctgaacctcggcacctcggccgcggtgatgttgatgtcgctgtctatgtcgggtcatgttgaaagaatgtgaaaccggtaaaaacgctgtgaaacgctgagaaaacatcagacgaaagggttctcgtggcagaacaaatggtgttcgacgccgaccaggtgaccgctgaggttgccaagggcatcgagaaaatccagaacgcctccaacctggaggagctcaaggccatcaagacaacgtacgcaggtgccgattcggcgatgaccaaggccagcaaggccattggctccctgcccgtcgaccagaagaaggaagccggcaagctcatgggcaagctgcgcgccgacttcggccgtgcctatggccccaaggaggtcgagctcaaggaagccgccgagaaggccgcactcgccgctgaaaccgtggacatgacgctgccggtgaaccgcaagcctctgggcgcccgtcacccgctgcccaagctgatggaagacgtcgaggacttcttcatctccatgggctggcagatctcctccggtccggaaatcgaagccgaatggtacaacttcgactccctgaacttcggcccggaccatccggcccgccagatgcaggacaccttctacgtcaagggcaatcaagccaaggacgccgccggtttcgtcggctccaacatggtggtgcgtacgcagacctcctccgatcaggtccgtgccctcctgacccgtggcgtgccgctgtacatcgcgtcccccggccgtgtgttccgcaccgatgagctggacgccacccatactccggtgttccaccagtgcgaagccctcgccgtcgacaagcacctgaccatggccgacctgaagggcgtgctggacaagctcgccgtcgccatgttcggccctgaagccaagacgcgcctgcgcccgagctacttcccgttcaccgagccgagcgccgagctcgacctgtggttccccgacaagaagggcggccccggctggctcgagtggggcggctgcggcatggtgaacccgaacgtgctgaagtccgccggcatcgacccggacgtctacaccggtttcgccttcggcgtcggcatggagcgcacgctcctgctgcgcagcgacatcaacgacatgcacgacctggtcgaaggtgacgtgcgtttcgccgaacagtttgtgatgggggagtgattcagccatgcctatgatcgatatcgattggctcaaggaccatgtcgaggttcccgaaggcctgacctacgaacagctcgccaaggaccttgtcaaggtgggtcttgaggaagaggagatccactcctcccaggtgaccggcccgattgtggtcggctacgtggtcgacgccacccccgaaccgcagaagaacggcaagaccatcaactggtgccacgtggactgcggcgacgaatggaacgagaccgacgaagacggcaacaaggtgccgcgcggcatcatctgcggcgcgcccaacatgaaggccggcgaaaaggtcgtcgtcaccctgcccggtgccgtgctgcccggcgacttcaagatcgagccgcgcaagacctacggccacatctccaacggcatgtgtgcctccgaacgtgagctgggtctgggcgacaaccacaatggcatcattctgctgcgtcagtacggcttctccgaggctgaatatgaggctctgaagcctggtcaggacgccatgcacctgctgcacctcgaccagcctctgcttgagatcaacatcaccccggaccgtggctacacgctgtcctaccgtggcgtggcccgcgaataccaccactccaccggtgccgcctacaccgatccggccgtggcactgaacgagaaggccccggaacctgctgactaccagcccggcaccccggtggacatcgatgttgaaatcgacgataacaatccgattcacggcgtgcccggttgcgaccgctactacgcgcgtatcgtcaaggacttcaatcccaacgcccacacgcccaactggatgcgccgccgcctgattcgcgccggcatgcgctccatctccttggccgtggacgtgaccaactacgtgatgcttgacctcggccagccgatgcacgcctacgacctcgacaagctcgaaggcccgattgtcgtgcgccgcgccaacgagggtgagaaactcaccaccctggacggcaaggaacatgacctgagcgtcgaagatctgcttatcaccgattcgccgaacggcgaacgcggctcgcgcatcctcggccttgccggtgtgatgggcggcctgtatggcgaagtgaccgctgacaccaagaacattcttctggaggcagcgcacttcgatcaggtgaccatcgcccgttcggcccgtcgccacaagattccatccgaggcctcccgccgcttcgaacgcggcgtcgacaccgcgctgcagcccgccgccacccagatggccgccgagctcatggccaagtacggcaacggcgagcccagcgaacacccgaacgacgtgaacaacacgccgcgcgccaaggtcatccacttcaaggcctccgaagtggcccgcgtggccggcctcgacgtggacatcaaccgcatctccgacatcctgaccgacattggctgcacggtggccggcggcggcaacggcgagttcgccgtaaccgcgccgagctggcgcccggacttgaacgagccgtgcgacctggtcgaggagattgcccgactggtcggctacgaccagattccgatcaccgtgccgccggcaccggtcgagggtctggtgggcctgaccccggaccagcagcgtcgccgtcgcgtggcggacgagctcgccgagttcggcatggtcgaatcgctgagctacccgttcgtgggcgacgacgattacaaggccttcggcttcgacccggaagccaccaagaaggtcagcgtcgagatcgccaacccgctctacggcgaccgtccgtacctgcgtcgcgagattctgccgaccctggccaccaccgtgcagcgcaacatccgccgcggcatcgaaaacgtgtccctgtatgagctcggccacgtctacctgtgggatccgaacgcgcccgccatcccggcactgcccggcggcgtgcgccccaccgacgaacagctcgccgcgcttgacgccggtctgcccgaacagcccgaccatgtggccggcatcctgaccggtctggccgaggacgatggctggatgggcggcaagcgcccggtcgactggtccgacgccgtcgaggccgtgcgccgcatcgccggccgtatcggtgccgcaatcgaactcgaccagcccgccgccgacgatgtgcccgtccaatggcaccccggccgcgtcgcccgcgtcatggtgggcgacgtcttcaccggctgggttggtgaactgcacccgcgcgtcaacgaggcgctcggcttcccggcccattccgcggccttcgagctgaacctcaccgcgctgttcgccacgctgaccggcaagcccgtccaggccaagccgatctccacgttcccgccggtcaagcaggatttggccttcaccgtggacgagaccgtgaccgcaggccagcttgagaacgtgattcgcaaggccgccggcgcgaacctcgaatccatcgaactgttcgacgtgttcaccggcgaacaggtgggcgagggcaagaagtccctggcctatgcggtggtgttccgttcaccgagcaagacgctgtccgccgaagacagcgacgccatccgcaaggccatcgtggctgaggccgccgaaatcggcgcccagctgcgcgcctgacccaaccgatcatccgaatcgaggagcgtcatgagccaaccggagcaggacaagccgaaatacgggcagtaccagcagcctgaatatggtgctatgtctggccaatacggaccgaattacaacccgtatatttatggcgctcccgagccggataccaagaaggattccgccgcagccgctggcatcaacggtggcgcggcgcaatcccagcaggccggccagccgtacggtcagcagccggcgtggcccggcaatcagcaggcgggcggctggccgtatgctcaaggcggccaacagtccggtccgggcgcatatccgggcgggtacccgggcatgcaggggcagtcgtatggtcaacagccgaacggtcagcctcaccagccgcattattaccacggcatcgacctgaacgatccaaaccagaacccactctacgggcactgggattcgtatgcgatcatctcctttatcctcgccctgttcttcccggtgccagtgctctcggcactgatgggcgcggtggcaatgtggcgcacgcgcaccttccatatgaagggcttcggtttggctgtggccgccgtggtgatcaacgtgctgtacaccatcgccgtcatctggatggccttcaatggctatgacgccatgagcctctaccaggaagccctccagcaactcaccggcggcaccggctcctcctccgactccatctccgcataagtagcgttcacataccaacacacccactgcataaatatgcaatagtctgcataatcgcgtatactcatcccaagacacatcagtgaaaagagatgagtatggcgaaatatacagtggccgtggccggtgccacgggctatgccggcggtgaagcgctgcgcattctggccgcgcaccccgacttcgacatcacctgcgtggcaggccattcctcagtgggggagtcgatggccaagcacatgccgcatattccccaactggccaatctggtcgtcgaagataccacgcccgaagtgctgaacgggcatgacgttatcatcctcgcactgccgcacggtgcttcgggcaagctcgcctcgcagctcgatccgaatgccgtggttgtggatttgggcgccgaccatcgtctcgaagagcaggccgcttgggatgagttctacggcggcgatttctatgagcattggacctacggcatgcccgagctcatcaccggcaaggccgcggacggctcatacacccgccagcgcgcggcgcttcctggcaccaagcgcatcgcaggccctggctgcaacgtcaccgccaccacgctggccctccagcccggcatcgccgaaggactggttgaatcgcaggatatcgtggccgatctggtcgtcggatactcaggtgccggcaagaatctcaagcgcaccaacctgcttgccgccgaggccctgcaatccgccctgccgtattcggtgggcggcaagcaccgccacattcccgaaattctgcagaacttcgcccacgcggccggcaagagcgcggccgaagccagcgaattcacgctcggcttcacgccgattctcgcccccatgtcccggggcatcctcgccaccgtgtccgcccgcatgacggacaaggccaaggcactgagcgatgaggagattcgcgccgtatggtccaaggcctatgaaggccaggacttcatggtgctgctgcccgagggcacactgcccgccaccggcaacatcatcggatccaacgcagcccacctgcaggtcgtcgccgaccgcaaggccggccgcatctacgcttttgccgccatagacaacctcaaccgtggcaccgccggacaagcggtccaatcactgaacatcgcactcggcctgccggaagacgcgggcctgaccaagatcggagtagcaccgtgagcgttacatttgcacaaggtttctccgccgccggcgtggcggctggtatttcatccgtcgaaggcaagaaggacttggccctcgtggtcaacaacggcccgctcgacgcggctgcaggcgtgttcacctcgaaccgtttctgcgccgccccggtgcagtggagccgtaaggtcgtcgccgacggtcacgtcaaggccgtgattctgaactccggcggtgccaacgcctgcaccggcgaggccggttacgcccagtccgtcaccaccgcggaaacggtcgccggtctcatcggcgccgaaccgaatgatgtggctgtctgctccaccggtctcatcggtgaactgctgccgttggacaacgtgctggctggtgccaagagtgcccatgaggctcttgccgccaccgccgaagccggcgccgacgcctcccacgccatcatgaccaccgacaccaagccgaaaacggtcgaactgaccggctccaacggctggaagatcggcggcatggtcaagggctcgggcatgattgccccgcagctggccaccatgctgtgcgtcatcaccaccgatgcggtcgtctccgccggccagatgcaggccgcactcgccgtggccgccgaacattcgttcaaccgcatcgacgtggacggctgcatgtccaccaacgacacggtcctgctactcgcctccggtgcctccggcgtcgaaccggacaaggacgaattcaacaagctggtgcgtgaggcctgcgtctccctgtcccgccagatcatcggcgacggcgaaggtgcctcccacgacatccgcatcaccgtcaccggtgccaccagcgaagacgcggcacttgcctgtggtcgtgccgtcgccgcctcgaacctgctcaagtgcgccatctccggcaacgatccgaactggggccgcatcgtcagctccctgggcactgtgccgcctgaagtcgcgccttacgattcgaacaaggtgaccgtggacgtcaacggcgtgcgcatctgcgagaacggcggcgccggccgcgaccgcagcgaggtcgacatgaccccgcgcgaagtccacatcgacatcgacctgaacaccggctcggacgccgaggccaccgtctggaccgacgacctcacccacgaatacgtccacatcaacgccgactacgaaagctgacaaacagcccagtgggctgtttgtagcagccggcagcgatagcgtcgccggcgtcgcatataacgcaaacagcccagtgggctgtttgtagcagccggcggcgatagcgtcgccggcgtcgcagaaaagagaaaaattggctacagaattgaagggacctgggttccatttcgacgtgcacaccgatttgcgcgccgatcagaaggcagaagtgcttattgaagcgctgccttggctggaggagttcgccggccagcgtatcgtcgtcaaatacggcggcaacgccatggtcgatgaccatctgaagcagtgcttcgccgaagacatggtcttcctgcgtcaggtgggcctgcatccgatcgtcgtgcacggcggcggcccgcagatctcccacatgctcaaggccctcggcatcaaatccgaattcaaaggcggcctgagggtcaccacccccgaggccatggacgtggtgcgcatggtcctgaccggcaaggtgtcacgcgaactggtcggcctgatcaacgcgcacggcccgctggccgtaggcctgtccggtgaagacggcggcctgttctcggccatgcagcgcaggcccatcatcaatggcaagcccaccgatatcggcttggtcggcgatgtggtttccgtcgatgcctcggcagtcgaggatctggtggccgccggtcgtatcccggtcgtctcttccgtggctccgaacgaagaagatgccactgaagtgctcaacgtgaacgccgattccgccgccgccgctttggctgccgctgtgggcgcacgcaagcttgttatcttgaccgatgtggatggtctgtacgccgattggccggacaagaattctctgattggccggatcggtgtggaaaacctgcgcgatatgctgccggacctggaatccggtatgcgacccaagatggaggcctgtgtcagggccatcgacggtggcgtgccccaagcccatatcatcgacgggcgcaagccgcattcgattttgaatgagatattcacctccgcaggcatcggtaccatggttatgcccgatgaaggactggaaatgaggagctcttatggctactgagcatgaggaaaaactaggtacggaggacagcaagtggctgggagagtactctcaggtccacatgaatgtgttcggtacgccgttgcgcgtcatggatcacggccaaggtgcccacatctgggatgttgacggtaacgaatacctcgatttcctggcaggcatcgccgtcaattccctcggatacgcccaccccaagtgggtcaaagcggttgccgatcaggctgccaaggtggctcatatcagcaactatttcgcgtccgagccgcaaattgagctggcatccaaactggtcaagctggctggtgcacctgaaggctccaaagtctacttcggcaactccggtgctgaaggcaatgaagctgccctcaagctcgccaagctgtatggccgcaccttgcctggtgccctgccttccatcggcggcaagcccgcacgcattctcgcaatgactcacggcttccatggccgtacgatgggtgcgctgtccgccacatggaaacccggtatccgcaagccgtatgatccgctggtgccgaacatcgaattcgtacgcgccggcgacaaggtcgccctgcacgacgcttttgcacagaccggtctcggccgctatggcaagggtccggtggctgctgtgattctggaacttatccagggcgaagccggcgtgcagccgttgggcgccgattacgtcaagttcgtgcgcgaactgtgcgatatcaaccacgcgctgctcatcatcgatgaagtacagaccggtatcggacgtaccggcaagtggttcgcattccagcgtgacgatctgtccggcggcgtgacgccggatatggtgactttcgccaagggcgtggcaggcggattcccgatgggcggcatgatcgctttcggcgagaaacttgcggctctgttcactcctggttcccacggctccacctttgccggcaatccgctgggtgcggctgcgggactcgccactcttggcgtgattgaagacgagaatctggtggccaacgccgaagctcgcggcgaacagctgcgcgatggcattatggccaccggtaatccgctgttcgtttccgtacgcggccgtggtttgctggacgccgtcgagctcaagcatccctgctcccacgcggtgatgaactactgcctcgaacacgggctcatcgtcaacgcggtggctcccaatgcgctgcgtttcgcaccgccgctgattgtaaccgctcaagacgtggatcaggcacttgccatcctcaaggatgtgcctacggacctgcccgacgactgatttctcgccgtcactgccgacccaccgatccaaggagatcatcatgaccccagaacttcgccacatgctgcgtgacgacgacctcaaccatgaggagcagaagcaggtgctcgaacttgccatcaagttccaccatgaccgcttctacaagcagccgttcgccggtccgcaggccgtcgccgtactgttcgacaagccatccacccgcacccgttccagcttctccatcggcgttgccgagcttggcggctacccactggtcatcgacaagtccggctcccagctgggccgtggcgagcccgtggccgataccgctcgtgtgctcgaccgcatggcttacggcgtggtgtggcgcaccttcggccaggaccgcgtcgaagaaatggccaagtactccacccatccggtggtcaacgccctgaccgatgacttccatccctgccagattctcgccgacttccagaccatcgccgagcaccgaggcggcgtcgacaacctgaagaaccagaccatcgcctacctcggtgacgcggccaacaacatggccaactcctacctgctcggcggtgccgtggccggcatggacgtgcgcgtggccggcccccacggctacctgccccgcccggacatcgtggccgacgccaagcgcgtcgcggccgagaccggcggctccatcctggtcaccaccgatgccaaggaagcggtgaagaacgccgactgcgtgttcaccgacacctgggtctccatgggcgaggaggccgaatacgccatccgttccaagccgttctgggattaccaggtcaacaccgaacttatggcattggccaagccggatgcgctcttccagcactgcctgcccgcctaccgcggcaaggaagtcaccgctgaagtgatcgacggcccgcagtccgtggtgtgggacgaggccgagaaccgtctgcacgcacagaaagcgttgctgacttggttggccggcaaggcccgtggagacgaaagcctgctcgcatgagtgaaaccggtccatccctgcagcgccctgccaccagggcggcgcggctgagtgccatagaacaggcgctcgccacgcatatcatcacctcgcaatcacagctgtccaaaatccttatcgacgagggcattgcggtgactcaggcgaccctgagccgcgatcttgacgagatgcatgcggtgaagacccggctgaaggacggcacggtggcctacacggtgggtcgcagcgtcgttgcttcagaaggtgaggatgtaggggagcgcggtgaggcacagatgtcccgcgtgctgaacggactggtcacctcggtggccgccgccggaaatctggttgtggtgcacacgccttccggtgccgcacaatacgtggcctcggtgattgacaagcagccgatcgaaggcgtgctgggcaccatcgccggagacgacaccgtcatggtgatttgcaccaatgacgacaccgccgtctcccgctccgactggctactaagcctcgcctccaaataaccaacacgccgtgcataaatatacagtcctctgtatatacttgcatcagtttgtttttcagaccttgaatgaaagggaaccaatggcagataacaagcgcattgttctggcctactccggcggtcttgacacctccgtcgccatctcgtacctgaaggagcgcaccggcaaggacgtcgtggccgtgtccctcgacgtcggccagggcggcgaaagcctcgagaccatcaagcagcgcgccctcgcctgcggagccgtcgaatcctacgtggtcgacgcccgtgacgagttcgccaacgaatattgcatgaaggccctcaaggccaacgccatgtacgaaggcgtctacccgctggtctccgccatctcccgtccgctgatctccaagcacctcgtgcgcgccgcccaccagttcggcgccgacaccatctcccacggttgcaccggcaagggcaacgaccaggttcgtttcgaggtctccattgcctccattgacccgacgctgaaggccatcagcccgattcgtgacctgtccctgacccgcgatgtcgagatcgcgttcgccaaggagcacaagctgccgatcacccagaccgagaagtccccgtactccatcgaccagaacgtatggggccgcgccattgagaccggcttccttgaggatccgtggaacggcccgaccaaggactgctactcctacaccgacgacccggccttcccgccggtcgaagatgaagtcgtcatcgagttcaaggaaggtgtgccggtcaagatcgacggacgtgacgtcaccccgctgcaggccatcgaagagatgaaccgccgcgccggagcccagggcatcggccgcatcgacctcatcgaggaccgtctggtcggcatcaagtcccgcgagctgtacgaggctccgggtgccgtggccctgatcaccgctcaccaggaactcgaaaactgctgcctcgaacgcgaacagcaccgcatcaagcgcgacatcgacaagcgctggggcgagctggtttacgatgcgcagtggttctccccggcaacccagtcgctcaacgccttcatcgaagacacccagaagtacgtgtccggtgagattcgcatggtcctgcatggcggtcgcgccgtcgtgaccggccgtcgttccgactcctcgctgtacgactacaagctcgccacctacgattccggcgataccttcgaccagaggtcctccaacggcttcatcgacatttacggtctgccgtcccgcgtggccgcagcccgcgacgtcaagttcggcaacggcatcgaggtcccgaagaacaccgtcgagtaattcttactcagtcgcccccgctgcgaggctgtcggcatagctgactgggagtggtctttgaaaggactgtcctcagtcacactccatgtgacagccctcgccagcgggggcaactgtatgtttgaacacattgctacgcttaaacacagctattttcacttttcaaggagccttcatgactgagaacaacgaacatctggccctgtggggtggtcgctttacgtccggtccgtcgccggaattggcccgactgtccaagtccacgcagttcgactggcgcttggccgacgacgatatcgccggttcccgcgcccacgcccgtgctctcggccgtgcgggacttttgaccgccgacgagctgcagcgcatggaggatgcgctcgacacgctccagcgtcatgtggatgacggctccttcgcccccatcgaagacgatgaggacgaggccaccgccctcgaacgcggtctgatcgacattgccggcgacgaactcggcggcaagctcagggccggccgttcccgcaacgaccagatcgcctgcctgattcgtatgtggctgcgccgccactcccgcgtaatcgccggactcctgcttgacctcgtcaacgccctgatcgagcaaagcgaaaaggccggccgcaccgtgatgccgggccgcacccacatgcagcacgcccagcccgtgctgctcgcgcaccagctcatggcccacgcttggccgctgatccgcgacgtgcagcgactgatcgactgggacaagcgcatcaacgcctccccgtacggctccggcgcactggccggcaacacgctcggcctcgacccggaggccgtggcgcgtgagctcggcttctcccgcgtgaccgacaactccatcgacggcaccgccgcacgtgatctcgtggccgaattcgcgttcgtggccgccatgaccggcgtggacatctcccgcctgtccgaggagatcatcatctggaacacccaggagttcgccttcgtcaagctcgacgacggctattccaccggctcctccatcatgccgcagaagaagaacccggatatcgccgagctcgcccgcggcaagtccggccggctcatcggcgatctgaccggtctgctggccaccctgaagggcctgcccaccgcctacgctcgcgacctgcaggaagacaaggaggccgtgttcgaccaggtcgatacgctcgaagtgctgctgcccgccttcaccggcatggtcaagaccatgcacttcgacagcgagcggcttgaagaggaagccccgaccggcttcgcgctggccaccgacatcgccgaatggcttgtcaagaacggtgtgccgttccgccatgcgcacgagctctctggtgcctgcgtcaagctcgccgaaggccgcggccaggaactgtgggatctgaccgacaatgacttcatcgagaccttcgccgcgttcctgccggccgacaaggctccgggagtacgcgaagtgctctccagccacggttcggtcgactcccgcaacggcaagggcggcaccgcttacggtcgcgtgcgcgagcagatcgccgacgccaaggccgaggtcgaagaactcaagctcttccccgcatccacgtcggatggctccgcctacaaagcccccggcacgttctagtcccaatagagctccctcgtcagagggagctctattttgctgttgtcactgcaacggcatacactgagaaatcgtaacgaacgggagccgtgaggctgagaggaagtcgccagacttcgaccggggaacttgacgcgggtcatgccgccgtaaggaatcgttgttgcagatttgccgggttctccgatacagctttcattccgtttgcataattcagccgtgagacggtcgtgatggagccaatacatcacagcggtcgaacggtcgcatgattgggttcatgaatgggcgcaccacttaaggtacggttcgtttcgtgcacccttttttactatctgaaaggatattatgcaggtcaacggagagcaggtcacgctcgagacgccggtcagcgtcgccgattatctcgaagcgcacggattccgcgccgagcgtgtggccatcgaactcaatggtgagattatcccgcgcgataagcgtgccgacgccatgctcgacgaccagtgcgtcatggaaattgtgcagtttgtacagggtggatgaaaggaaaagctatgagcaatattaatccggttactgaagcatctgttgaggcgactccgctgccgccgcagcccgccgtcaccaatccggtcggtaccgccgcgccgattctgccagtggaagacaagccgctgaccctgggcggtcacgagttccagtcgcgattcattctgggctccggccgctacgacctgaacctcatcaaggccacggtcgaacatgcaggcacgcaaatcgtcaccatggcactgcgccgcgcgcagaccaccgagaacagcgtgctcgactacattcccgaaggcatcacgttgctgcccaacacctccggtgcgcgcaacgccgaggaagccgtgcgtatcgcccgactggcacgcgaagtgtgccacaccgacttcgtcaaggtcgaaatcgaacacgagaccaagtacctcctgccggacaacgccgaaaccatccgagccaccgaaatgctggccaaggaaggcttcgtggtcatgccctacatgttcccggacccgattgccgcacgccagctggaggaggccggtgccgccgccgttatgccgctcggttcgctgatcggctccaacatgggcctgcgcatgcgtgacttcatcgagatcatcatcgccaatgcgcatgtgccggtcatcatcgatgccggtattggccgtccgagccaggcctgcgatgcgatggagatgggtgcggatgcggtgatggcgtacacggccgttgcctctgctggcaatatcccgctgatggctgaggcgttcaagcacgccatcgatgctggtcgtgcggcgtatctgtccggtctgggcaaggtgaccgagggacaggccgtgccgtccagtccgactacgggatatttgcactgacacttttattagctcccctctctgaggggagctggccgcgtagcggactgaggggagctggaaacatggagaaaacatggcattgactgatgaacaggtggagcggtacgcgcgccatctgattttgaaggggctgggcgtcaaagggcagaagcggttgttggcctccagcgtgctcatcattggagcgggcgggcttggctctccggccgccctgtatctggcggcggtcggcgtcggccatatcggactggtggacggcgatgtggtggatatgagcaatctgcaacgtcagatcatccataccactgcacgtgtcggagcgcccaaagtggaatccgcggccacggccatccgcgcgctcaacccagatgtgacggtcgacacctactacgagctcgtcgatgccagcaacatcgccggcctcatcgaaccgtacgatctggtgatcgatgccaccgacaacttcgccgcaaaattcctcatcaatgacgcatgtgtactggccggcaagccgtatatccatgcgggcgtggtcgggttctccggccaggtgatgaccgtcatcccaggcgaaggcccctgctaccgctgcatcttccgcgatatgcccgccgcaggtgaaattccgacctgcaaggaggccggcgtgctgggcgcggtggtcggtgtgatcggcagtctggaggcgactgaggccgtcaagctgattgccggcgtgggggagccgctcgtggctcgtatgctcactgtggatgccctgaccatgaacatccgccgtgtgccgttgccgaaccatgtgcccgactgcccggtgtgcggtgagcagccgaccattactgctattgatccggccaactatattcagccggcctgcgcgatttagagctatgtggcacccctccttgaggggagccaagatcggaacgagaggggaagaacatgcctattgctttgcgtaatgcggtcgatgacgatgagagcagtgaagcatcgtaccgccgcatcacgccggcggaatttgccaagctcgacccgaatacggtcacgctgctcgacttgagggaaccagccgacttcgccgcccacccggtcgaaggtgccatcaatgcaccactcgaccctctggcccatgtgctcaaaaccgtgcccacagatcgaactgtcgtagtctattgtgctcaaggatggtggagcgaggaagtagctgaaatccttgccgatcgcggttacgatgtagcaagcctcgatggcggttttcagggttatctcgactatcttgaaacccaccacgattaacggttcccgttgtcgttcttttggatgagtgtgcacggacatacgtgtgccctacaatcggtcacggtattactcgatggattcttgaatatcgtcgggtaatcgtaattcacaacaagggattgcactgaaccaacccgaacggagggtcgaaaccgtgggacatctgctcacccgaacgcagattcaacgcctggtcgccaagcacggccgtgaggtcatcgagcatcgccacatgcagatcgaacgctgctgctaccagcacggcaacgtcaccacgttcgaacattccgtgcgtgtcgcctgcctggctgtgtggatggccgaccgcgcgcacctgtggtaccgcgtcgacctcaaatccctgattcgcgcggccctcctgcacgattacttcctgtacgactggcacgactgggataacggcgaacaccagtggcatggcttcacccatggccacgccgccctggtcaatgccctgaaggacttcaagctcaacgatatcgaacgcaacagcatcgagaaccacatgttcccgatgaccctggtgccgccgcgctatatcgaaggctatctggtcaccttggcggacaaatgctccgccaccgccgagaccttctcgttcgaccggttcaacaagcgcgcgttgcccgccgcgaagccctacgccgagatcgaagcccgtcgatgatcatcacactcgaacattatttcctctggtttctgttctacagtttcgtcggctggatgtacgaatccattctcgtctcctgccaacagcaccgcttggtcaaccgagggttcctcaacggcccgctgtgcccgatctacggcaccggcgcgatactcggcgtcgccattctcggcaacgtacataacccgatcatcatcttcctgatttcgatggtgggcgccacgatactcgaatacacaacctcgtgggtcatggagcagctgttccacgcccgctggtgggattactcgaatttccgcttcaacctccaaggccgcgtctgcctgctgggcgcgttgatcttcggtctcggcggcgtgggcgtggtacttggttcgcagccatatgtcgagcgggtcacggatatgattccgctgccgatgctgcatacgctggtcacggtcctggccctgatcaccatcatcgacttggcggtcacggttgcgggcatgctcggattcgagcaggtgctcgattccgtctctcaggtggtgcaggatgtggcggcacgcgccggtggcacgtggcagtggggctcccgtgcggtatccgacaggatgcgtgagctttcgcaggatacggttgagcgtctgcgctgggccatcaatggcgtcatcaacgcacagcagaagcgtatgctcaagtccttcccgaagttccaggtgccggatcgtcaggacatcatcgactctttgcgcgaacttatgggcccgcgccgctagaataaggcgttttactgaatcgcgcggctcggctggtgttcggcactgtcgccatgttctgcgaaacttgactgtgcccaattgggcagtctcattcacaattcgatagggagaagcgacaagctatggctcacgtcaccgacttcaaggaagcgggtttcaacaccctgcttgaggaactggaatggcgcgggttgatttcccagtccacggaccgggatcgactcgcagaagcactgaacggcgagcccatcacctattattgcggcttcgaccccaccgctgcatcgttgcatatcggcaacctcgtgcagctcatcaacatgcgtcacctgcagcttgcgggccatcatccaatcgccctggtcggcggcgccaccggactcatcggcgacccgcgccagtccggcgaacgcacgctcaacccgaaggacgtggtggccggctgggccgatcgtctgaagaaccagatcggcggcattctggacaccgaaggcgcgaacgccgtacgtttcgtgtccaattacgattggaccgcctcgatgaccgtcatcgacttcctgcgtgacgtcggcaagaacttccgtctgggcaccatgctcgccaaggacacggtcgcccgccgcctgaactctgaggaaggcatctccttcaccgagttcagctaccaggtgctgcagggcaacgacttcctccacctgtttgacgaataccactgcacgctggaactcggcggctccgaccagtggggcaacctcacctccggcctggacctgatccacaaggtgcgcggtgtggacgtcaacgtgttcaccagcccgatcatcactgatgcttccggcaagaagttcggcaagtccgagggcaacgccgtctggctcgacgccacgatgctcagcccgtacaagttctaccagttctggatcaaccgcccggacgtggagatggaaagcctgctgaaggcgttcaccttcctgcccaaggccgaaatcgaacgattggtcgaggaatccaagaccaaccccggcaagcgcgaggcccagaagacgctcgcctgggaggtcaccagcttcgtgcatggcgaggccgctacacaggctgccatcgatgcttccggtgcgctgttcggccgcggtggcaacctcgaagacatcgacgaggaaacgctggaatccgtgctcgacggcttcaaggtggtcgacgagaacggcgagcacgccttccccgtctccaagccgggcgatcgcgtaatcgacgccgcccaggctgccggactgttcaagtccgcttccgaggcacgccgcgccatcaagtccggtggcgtgtatctcaacaacaaccgtatcgaggatgaggagcaggtgctggccgaagccgacttcctggccggccgcttcgcgctcatccgtcgtggcaagaaggcgctcggcgccgtggaaaaccgttaatcaacaacgaattaaggaaaacaagtaatggcagaaggtaacgagcgttccggcaagtcctacggcggcggccataaggggtatggcgatcgccgaccgggcaaccgcggcggcaagggtttcaagccgcgcggcaagggcggtttcaagccgcgtcatgacggtgaaggtttcaagccgcgccgtcgtgaggatggcgaaggctacgcgccgcgccgtgatggtgatggcgagggccacggcggctaccgcaagtcgtacggcaagggtggcgacttccacaagggcggccgctctggtttcggtggcaagggcggctatcgcggcaacggtccgcgccgcgatggcgatggcttccgtccgcgccgcgaccgcgatggcgagggcttcaagccgcgccgccgtgaggatggtgagggttacgcgccgcgccgtgatggtgatggcgagggccacggcggctaccgcaagtcgtacggcaagtccggtggcttccacaagggtggttaccgcggcagtggtccgcgccgtgacggtgaaggtttcaagccgcgccgcgaaggcggctaccgttcccacgaaggcgagaacggcgagaacccgcgctaccagcaccgtgacaacgatcgtcgtgatttccgtcgcgatgatcgccgtgacttccaccgcgatggtgagcgtcgtgacttccgtcgtgacaatgatcgtcgtgacttccgccgcgatgaccgaagggataacgatcgccgtgatttccatcgtgatggtgagcgtcgcaacttccgtcgcgacgacgatcgccgtgatggcgatcgccgcaacttccgcagggacgaccgccgcgacaacaaccgtcgtgacggcgaattccgcgagttttcgcaggaagagaagcgccagtaccgtgaggagaagcgctctgaatacatgaggcgtccgcgccgtaactccgacggcacgatgagcttcccctcgcagaacccgtacaccgaccgtcgtcccgacgagcccaagatgcccaagggcatggaatggtcgatgctgtccaaggatgagcgcgaacgtctgcgcggcctgtccaaggagcacgcggagaacattggtctgcacatcctcgccgctttcgcgctggaggagagcgaccccgaacttgccttggagcacgccaagtgggtggcccgtcaggcctcccgcatcgactttgcccgcgagacgctcgcgttcgtggcctaccgtcagggcgactacaagctgtccctgcgtgagttccgtaccgcctaccgtatgaacggcttcctcgactacctgccgttcatcgctgactgcgagcgtggtgtcggtgaaccgaagaaggccgtggaactggcgctgtccgatgagggcaagcagctgcatggcgctcccaaggtcgagatgttcctggtgtatgccggtgcccttggcgatttggagatgtgggacaaggccattgaagtggttcataccgtcggccgctctcagggtcttccgggtgagtaccgtatgcgtgccgtgcaggccgagcagtacttccttgaagaggccggccgcagcaaggaagccgagcagcttaatgacctgctggaccgtcttgaggatcagtatgccgacgaggagattgacgaaaacagcgacgacgtggtgattgaccacgatctcgaagacatcaccgacgactccgacgtgctcgagaagctcggcatcgatccggacgaggcgcagtacgccccggatccggagcaggaatacggcgatgaggacgacgaggctgaagacggcgatgccgagtccgatgaggccgatgtcgaaaatgctgagtccgaggatgcatcggaagaatctgaggaatctgaagccgaggagtcttccgagtccgctgacgatgccgttgaaccggctgagtccgacgagaccgagaccgaaaccgaggagtgagcggcgtaatgacccgtttcctcaaaggcaccgatcgcccgctcgccgaggcctatcagcttgcgctgctggacctcgacggcgtggtgtatcgcggcaagaatccggtcgaatacgcagccgattccattcgtgcggccgaagccgccggcatgaccatcgaatacaccacgaacaactcctcgcgcttccagcacgtggtggccgatcagctcaagggcttcggcttggacgtggagccgtggcaggtcatcacctcttcggtggtggccgcccgtgtggtggccaaggcgttgcccgccggcgcgcgcgtacaggtattgggcgccgagcatttgcgcgatgaggtcacccgcaacggcctgaccatcgtggacggtcctcaggaccgcccgcaggccgttattcagggctggtatccggatatgacttggcagatgatggccgatgccgcgttcgcggtcgaggccggagccacgtatttcgtgaccaaccgcgacctgacgattcctcgtgaactgggcatcgcccccggttgcggatcgatgattcgcgccgtgatcacggccactggcgtcgaaccggtcgcctccgctggcaagccggaagcgtacatgtacgatgaggcccgcgaactgaacgccgccgaaggccacgatctggtgcccaaggaggcgtccatcgccattggcgaccgactcgacactgatatcgaggccggtaaccgcggtgactatgattcgctggcggtgctgaccggtgtcaccaacccgaccgaactgatgctggctccggcacacctgaggcccacattcatcgcccttgatctgcgtgaactcggcgaagcccaaccggagccggtccgcgacgagagcggtacttgggaatgccgcaaggctagcgcttggtttgaaaacggccaggtacacgtcagcgaccccaccagtatggacggcctgcgtgccgccgtatgcgccgcatgggaagccgccgaccaaggcgcacagctcagcgaggccacggtaccggtgttcgccatcgaggcatagtcctatgcctacggatagcgaacacgcgccggtcaccgagcgataccccgaacttgcggatattgatgaacaagacaacgaccgcaagcttgagacctatcgcaacgtgctggaatcgttacaacacgagcttgataacagccgcagctagcagaggagattcattctcccgccagcggaagatgacgtgaagtgctggatggtgggtccatgccgagccaccccgttggtggatggtgggtcgaaaggaaggtatatgaccgagcaacatatcgatcccgcgaccccacttgatcgcctcgacatgatgctcgtggcttcgggactggtcgaatcgcgggccaaagcgcagcgactcatcaaagccgggcatgtgcgcgtggacggcgagaccatcaccaagccatcgttcatggtcaaagccgggcacagcgaactcgccgtggataagggcgacgactacgtctcccgaggcgcttacaaactcttgggcgcgttcgagacctttgccggcaatggccttaccgggccggaaagcttggaatgtctggatatcggtgcctccaccggtggcttcaccgatgtactgttgcgcgggggagcggccaaagtcgtggcgctcgacgtcggccacggccagctcgacccgcgcatcgccaatgacgagcacgtcatcgaaatgagcggcgtcaacattcgcgaagtagaggccgacgacctgccttaccggccggcgatgatcgtctccgacgtctcctttatttccctgacctatgtgattccggtaatcgcgcgcatcgcggctcccggtgcgcagattgtgttactggtcaaaccgcagttcgaggtcgggcgggcaggactcggcaaaaacggcatcgtggaagatccggcattgcgggagcgggcattgcacgacgtggtcgcctgtgctgaacagcacggacttgacgtggtggccactgccgatagtcccatcatcggcacccacggtaatgaggaatacctgctttacgctgtcttgagatgaatgcgtcggcagtctccgttcaccagcagcacgctggaggtacggtcgatgcctattgcgctggcacacgtggcgctttccaccgcactgccgttgcgtagcatggcggagtccgccgtcaaagtccggcattgcagatggttggcttcaaccgtgacggctgtgatatggcgaaccatgctgccatcctcatacccatccatatcaaaacgagaaaacatcgtactgcgcagtggatgaacttccagagccctgctgttgacgtcatgacccttcaacacgccgttcaagcggactgtctgaccgctaatatgacgggtgcctagggagccattgacggacagatttccggaacaaacgatatcgctgttgcatcgcagtttgccggtaaaggttatttcatcgcaaataatgtcgccgccgacttcgatgtcgccgctgccgctgatgctggatacgcgaatatcaccatcacaccgcacaatgccactcttgatgaccagtttgtccccttctataactgaggcctcgagggtgctggtcacaatcatggtgtgaaaatgcgcgccatcggcaagacgggaacgttggtccactcctatggtgccgtagactcctttgcctatcaacatgcaattctgcgtatgcttgcccatgatgataaagccccctcaatatggacgtacagctttatggcttattgccccaataatgagcgcatccatgttgaggggggttatatcggtcacgatgtgagcagataggggggtatagcgagcgcagttaggggggttagccttggatgaagtggtcgatctgatcctgcttgcccatgaggatgagttcgtcgttgcgatgcatgaccagttccttggagccgtactggaactccttgcctggggccttgaggcccaccacggtcacgccgtatttgtcgtgcacctgcacgtcctcgatgctgcgacccaccgcgtataggggcgtgtggatcttgacgacggtgtacgggccgtcgatttcgatgtaatccagataattgccggccaccagatgacccacgcgcttgccggcatcggtctccgcattgatgatgtgacgggcgccgatgcgctgcagaatgcgcgcatgctcctgggacacggacttggcccacagatcggaaacgccggcatccagcaggttgccggtgatgatcaccgaagcctcgatgctgtcgccgatggccacgacggccgtgtcgaactgggaggcgtcgatctgctcgatggccagcacatcggtcatgtcggcctgaatggtgggcagatgcgcggaccaacgggccacaagctccgggttcttatccacggcgagcacatcctgacccatctggtcgagggtggcggccacggacccgccgaaacggcccaggccgatgaccagcacgcttttgttgccgctcggttttgctgccatgatgatggtcctctctatgccggatttctgtgtgccgattgaatggccgatcagccaacgataatgttttcctgcggataacgaataggttcgggagccatcggtctgctgatggagtaggcgatggtcaacgggccaagtcgtccgacaatcatctcggcggacagaataaacaggctggccggattgccggcgcttgccacgcccaccgaataaccgcccaacgagaaggccgagcaggcctcgaacacggcgtccacgaacgcgcagccggtggtgaacatcagcatcatcgcaccgaccataaccagcgcaaagcaggccgtggtcacggacacggcggtcatctggacgcggcgggggatacggcggcggaacacggtgacatcgcgatggccggtgaatgcggcgcggcaaatcaagagaatcaccgcgaacgtggtgacacggatgccgccggcggtggatgaggagcctgcgccgatgaacatgagtatgctcatgaacaccttggtctcattcgtgacttcgggcacccaggaaatatcgaaaccggcggagcggggcatgacggcggcgctcatcgcacggcgcatcttcatgccgggaccgtctgcggggaacaggccggtattgccccactcgaccagcaggaaccaagccagtgaggtggccaccagcacagcggtggtcaccaaagtgagtttggtgtgcaacgtccaacgtttcgggctgagatgtcggcgtgcgcactgcaccagattcagcaccacggggaagccgagcgttcctatgaatgcgctgatgagaatcggcagtcccacgccccaacggttcacatgcaggccggtggcgtcaggcgtgaaaccggtgttgttgtaggccgataccgcgtagaacagcgcctgccacaatgtacgtcccatattgccgtggttcacgcggaacaggtcgggcagcagcagcacgaaggtaagcacctcggcgatgatggaggtgcccaataccacggtgagtacgcctttgacctcggaaagcttcgtggtgcccagttcgttcgcggtaagcatgcgctgggagaccttgagtctgcgggaagcgccaagagccaccatcgaggcgaaggtcatgacgcccaggccgccgaactggatggagaataggatgacaacttggccgaacgtcgaccagtattcgccggtgttcaccaccggaatgccgcaggtggacagggccgagacggcggtgaagaacgcgaccgggaagttggtgaagatgatgtccgatgtggagatcggcagcagcagcaagccggtgacgatgatgatcagtgcgccgaaatacaccatggacagacggcccgggtgcctgagcagacggtcggtgatgctgatgcggcgaatgcgcttggcggttttatcgcttttgtctcggctcagtacatcggccgaataccaccatgacaggcccttcgaggcctcctcattggcggaggattcgtcgaagtcattggccatgggtcctcaagctcctcaactgatactgctgtatggtcatacggcatgccatcgcgctgcgcacggcacgcgtacggtgatcgcgcggctgtatgccattgtatgccgaagccttacgttaatcgactctgcggaacgttgtcggcgacgcgccacgaagcggcatttttcgaacacctgtacgactgatgacggtgtctgcggctagaataatgagcagtgcgaccgaatcgacaggaggatgccatggccaagcgcaacgcggtggtggtgacgcataccaggctcaggcagaccggaaccgtagtggccgaggcggtgagccagctgcgagtggccggtttcgaagtcaccatcatcgacaacaccgaggcccccgatttcggcgtgcagccgccgtgcgtgtcggacgacaccgaaatcgtcgtggtcctgggcggcgacggcacgatactgcgcgccgccgaactcgtccactgcacccaggtgccgattctcggcgtgaacatggggcatgtcggcttcctggccgaattcgaaagcttccagatcgacgaggcgatccgccgggtcgccacccacgactattcgatcgacgaacgcatgatcgcccatgtggacgtctggctgcctggcaccaccaagcccattgaggattgggcgctgaacgacatcacgctggaacgcgccgaccggggcaagatggtcgaactgtccatccgcgtggacgatgtggagatgaactcgttcggcgcggacggcgtcatcgtctccacgcccaccggttccaccgcctacgccttctccgcgggcggtccggtcatgtggccgaacgtcaaggccctgcagttgattccgttggccgcgcatgccctgttcgccaggccgctgatcatcggctccggttcgaccttcaccatcgatattctggacgattccatgtccgaaggctggatttgctgcgatggccgccgccagcgcgccctgccgcagggtacgcgcgtcatggtgcgcgaatcgcgcgataccttgcgcctcgcccgactctccggcgtgccgttcaccaaccgtctggtctccaagttcgatctgcccgtggtcggttggcgcgagcacgcgcgcaacgaggcctcgagccagccgctgcatcacgggcacacgttcccggcggccgcgtatgcggctggcgttgccggtgacgctggtgtcgctggtaccgagcccgacaagccgggcgaacgcgacggcaaggcaggagcctgatgctcgaagaactcgatatccgcaatctggggccgattcgagaagccgccattgcgccggccgcaggcatgaccgccatcaccggtgagaccggtgccggcaaatccatgctgctctccgcgatccgactggtctccggtggggccgccgaatcctcgcgcgtctcggccggggcggacgaggcttgggcccaggcgattttcgcgctcgcggatgatgccgtcgcatctgaacattccggcgacaccaacgatgccggtgacgatgccggttctgacgattctgacagcgggctcaccggtgctgccgcggccgtggccaaagcccacgacgcgggcgtcgaccccgaagacggcgaactgttcctttcccgcaccgtacgcgcttccggacgttcgcgggccgtgctcggcggcaagtccgtaccgcgttcggtgctgggggccatcgccggcgaactggtcatcattcatggccagaccgatcagctgaaaatcgcggccgccgcacggcaacgcgagtttctggaccgggtggccggagacgaagccgaactggccgcctaccgcaaggcgtgggatgcgctggccgccatggatgagcggctggaacgcctgcgctcgcaggaatcctctgcccgccaacaggccgactacctgcgcgaatccatcgaccgcatcaaccgaaccgacccgcagccgggggaggacgaggagctgaaggcgcgccgcgaacgcatcgaaaacgcggctgacatcgcccaaggcgtgggttcggcgctgggcgcgctggatgcctcgcaggtggatgtggacgccgccgacggcgcttcggccgtggaactcatcaatcatgcggtgacctcgttgcgcgcgattcgcgtcggcggcacgttcgccgagcaggccgatcggcttgaatccatcaatgccgatttgggcgacgtggtgttcgccctgagccaggagctgggcgacgaaggcagcgtggaggatctggaccagatcaacggccgtatccacgagcttggcgacctcacccgtcggtggggccccaccttggccgacgtgctcgcttggcgggacaaggcggcgttcgatttggaggatctggacgcctcgccggaaaaggtcgccgaactcgaatccgaacggcagacgctgtacgatgcggccctcgccgccgccgacgtgctgagcgccgcgcgcgtggctgccgctgccgacttgggcgcgcgcgtcactgaagaactcggctcgctcgccatgctgggcgcctccttggaagtgcgtgtcacgccgcgagacaaggccgatgatccgctcggtccgtatggtcgcgacgatatcgcgttcctgtttacgccgttcgaggggtcgccgcagttgccgatgggcaaaagcgcttcgggcggtgaactgagccgactgatgttggccttggagctggtggccgccgacacgcgcggcggtgccgaccagaccttcatcttcgacgaggttgacgccggcgtgggtggcaaggccgcggtcgaactgggcaaacgtctggcacggctggcccgcagcgcgcaggtcatcgtcgtcacccacttggcgcaggtcgcttcgtgggcggacgcgcagttcgtggtcaccaaggagccgccggatgccgatgacgacgatttgggcgtggtcaccaccatcgccgaagtcaacggcgaaacccgcgtccacgaaatcgcccgcatgctctccggcagcgaatccgaagcctccctagaccacgcccgagaactgttgaaggaaagtgtcctatgaccaaagccgccatattcgacctcgatggcaccctcctagactccatgggagtctgggaccaagtcgacatcgacttcctgaacaagcgtggcatcgcggttccgcccgactacacgaccacggtctccgccatgcagtttcgccagatcgccgaatacaccatcgcgcgattcggcctgaaagatacccccgaggagcttatgcaggagtgggatgacatggccagtgtcgcctactccaccacggtggaggccaagccgggcgcgctcggctatctgcacgacctgaaggccgccggcgtcaagcttggcgtcgccacctcgctgcccccgcatctgcgtgagccggcgctacgccacgtcggcatgttcgaactgttcaacgatatcgtctccgtcgatgatgcgaacgacgtcggcaaggaccagcccgacgtctacctgctcgccgccaagcgcctgggtgctgcaccggccgactgcacggtgttcgaagacctgctggtcggcatgaagtcggccaaatcggtcggcatgaaggtctgggccatgcacgacgactcctccgcctccgattggcccgaaatctgccacctggccgacggcgtcctcttcgacttccacgacgctccgcgcgtgctgtgataaaaaaagttacacccccgctggcggggctgtcggcgtaacggcgttgtttggcataggtgccccttcccgaggccattgtaggcgcggcccatgtttcgacactgtatgttggcaaggtgtttgttcactgtttagctgttatgtaacacaccttgacagttaagcagaacagttatactgtgttgtataacagctaaacagctggggtgctagtcaaccacaatcgaaaggggcataggtgaaactgatcatctcatccgtgtccggtgaacccatctacgagcaaatcaaaacccaaatccattcggcggtgctcagtggcgagttgaaggcgggcgaggccctgccttccttgaggaaactcgccaaggagctgcgcatctccgtactcaccgtcaccagggcgtacaacgaactggccgatgagggcgtggtgcagaacattcaaggcaaaggcactttcgtgatggacaagggcaacgaactgatgcaacgtcagctcaaaacccagattcgcgaaagcctggccgaggcaagccggggcgccaaagccgccggcattccgctggacgcattggaccgcatgctcgaagaggaataccgcaagaaataacctcaagaaaggaccatggccatgaccgccatatccgaatccgacgcgatggcgttgcaggtcaccgacgtcaccaaacactatgattccggcttcacgctggacgacgtgaccttcgacctgcccaagggctacatcatgggactgatcggcccgaacggcgccggcaaatccaccctcatcaaactcatcctcaacatgatccaccgcgacgccggttcgattcacgtactcggcctcgacaacatcgccaacgaggagcccgtcaaagaacaactcggcgtggtgttcgacttcagctacatgcatgaacagtggcaagtcaagaacattgaacgtatcgtcgcgccactgtatccatcatgggacggtggatgctatcgcaagtatctggatactttcggtcttggtgacgcacagaacggcaagaaacatatcaaggatctttcccgcggcatgcagatgaagctgatgctggccatcgcattgagtcatgatgccaagctgctgattctcgacgagccgaccagcggactcgatgtgcttgcccgcgacgaactcatggatatcctgcatgcctacattgaggatggcgaacattcggtactgttcagcacccatatcactgccgacctcgaacgtgccgctgacttcattacctacatcaccgatggccgtctctactacaccggtccgaaagacgagtttgaggaatcgttccgcctgattaagggcggtccagacgaactggcacaactgcctgcggacgtggtgctgggctcacatacgtatgccaccggattcgatgcgctggtccggtcagacaggcttgatgctgttgcgtcggtggtttcggggcttgtcgttgaatcggcttccattgatgacatcattcgactgaccaatgcccatgattccaatcgtgacttgagcgggaggtgagcggccatggaggcaatactgagggtgtcgcggtctcggcaacatgcattggccactgcattgcgcgtcgatatggcctacctgtgcgtcggcgaacggactgtgttctcgttgttgttggcaccgttgttctccgtcatctttcaaggtgaagcttatggtgatggcttcggctatcgcatgggtgtcatcatgacggtattcgcctgcgccatgtgggtgctaaccatggcggttgctgacttacagaacggatatcgacttcgtggcattattccggcttcgaggaagagtcaggtggccgcgcgatatgtggttggattggtgatttccgtattgtcgatagcgatgattgttctgattgacgggttgcaagtgctggtcaatccggattggtcattcgcgggcaatctgtgggcggctccgttgggaggtttctgcaccgcgctgatggtcgcgcttatcgtgcccacgggttatctgtggaccaaactaggcggtcttcaagtcacgatgatggtgatttatgtcgttgtattggctgtatccatactgctatctattttgcctgcttcggtgaccaaaggattggcccatgccgcgaatgccatcatcgcgcaacgattgtggctggttattgcggtattggcaacgacggttgtggcatatggagtctcgtatgtaattgcctctcgcatatttgcttcaagggaatggtgacgatgagctggaaatccgtagtaaagcaatgccgattcgattgtgtcgggacgggtctgttcagcgtggcgaatatggtatttctgctggttttcccggtgctgtctatcgtggtatcgctggtgatgatatcgacccacgtcgatgaacacgttgccagtggtctgatgggcggactcggaggtttggcatcggcgatggcatgtatgagtgcattggggcctgcgtcatccgaggaatctgcagggcacagtgccatgcgagggctgattcctgtttcacgcactgcacaagttgtaggtcggtacctttttctgttggtggttggcctgctctgggctttggacgtggtgatatgcggcggcgtcttcattgtctttggcgatatagcagatatggggtggattggtaccttggcagcaggtgcttccatcttcgctttggctatcattcttgggtcggtgctgctggcctgtgcataccggttcacctcccgcaagatgatgatggcctctggcgcggtcattgtcggcttgtatgcagtcattgcgctgctggcccgattgcctgttgactggcaatggctattgctgaatattgccgatttcctgacgatctggtggcatacggcgcttgttctcgccgtgttgtgtctgctcgcatattttggctccatgcttatagccatccgcatctaccgagccaaagaactctaaccgcgcatctgtccgaccgcgatgatcttcagccacatgtcgatcggcagcggcacggtgcggaacatcgctccgccgaactgcaccaccagcacctgaagtgcgaacatcagcgcgaacacgccgatcatcaccttattgcgtagcagattggcgaacaggctggcgttgcccagctcgcggctgttgaaggcgttgaacagctggaatactacgaacagcgtgaacagaatggtcgactgctgaacagctggaataccacgaacagcgtgaacagaatggtcgactgctgttcggcggtgccgcccatgaagttcgtccagcttcgcgagcttctcctgcagcggcgtcataccggtgttggcggctttggcgctcggcacgctttattgcggtttgggccgagcccttcgccgcaatgctgtctactccctcatgggactattcagttgcaggaacagaatctgacaagccacatggattttcccattcgccggcagcatggcgattcccgccttcctagaaaattcaagcaacacgccgttggcccattgccggatgttcaaccgagattcgcatatcttgactcatacggcaaaactgttatatttgatgtagaacaaatagaacagttcttgagaggggtggaattgaccgtgattgtggaaatcgatcagcgcagtgacgtgccgatttacgagcagctgcacaggcagctcatcgcagccatcgcgggcgatgagctgtcgccaggtgactcgttaccgtccgtgcgctcgctggccgtggaccttggcatcaacctgcacacggtgaacaaggcctatgcgctgttgcgtgacgagggatacatcgttatgcgtcgtggtgccggtgcaaccgtcgccgagcatgacggcgggggagaagcaccgaaccgaactgccgaagcacaggatgagcggatgggcgaggaactctatcgccttgccttggcctacagggcgcgcggcggtgattcggccgcattcctcgatgccaccaaacggcaatgcgaacgggcatacggcgtgcgctcctcgcagagcgttactgacggtgcaacaaaaggaaatcaggggagataacgatgaataatacagtcgtgtcgatgaacatcgcgttgtgtgcgtttttactgttgccggtgatagtgaccgccggcctggcaggggttccatgggttaccgaccggcatgaggtgttcggtgtcacagtgccggccgccgcccatgtcaatacgcgcattcgcggatttaaagtcgcgttttcgggaattacggtggcgcttggcgtatgcgccatactggtctcgctggccgtttggcaactctgcggagtcgacgcggcgttctggaccgtgtccatcgcagcggtggtgattgcgatatgtggttttgtgctgcagcaggtgtttcgccgcaaagtactgtccatcaaaaccaatcagggatgggaggcgtccagtgctcgccgtgcggcattgataggtgagcgggacaatcccgacccgctgagcctgaagtgggaattgctgcaagtcgtttgtctcgctgtcaccattgcggtcgggctgctgggctatgaccggatgccggagcgggtgccgattcatgcggatatcgccggcaatgtgaacggctgggccgagaagagtccgatggtgatttggtacgccgtgctcgcgcaggtggtgctggcagcggtgatggtggccagccatgtcgcgatcatctacgccaagcacccgattgatcccgaccaccccgccaccaccgggtatgcctatggtgtgttctcgcgggtctggagcatctacgtgctggtcatcggactgctgacagccggtggattgggcctaggcgttcagcttgtcgccattggcgtgctggatgtcaatctaatcggcatcatcggcatgttcatcgctgtggcggctctggtcggcgcgctgatgatcggcgtgtattacgggcagaacggggcgcgcgtctatgccggtgttcggcacagtgacggcggtgacatttcggacgataatgccatgccgtatgacgatgacctgcactggattggcggcatcatctacatcaaccgtgacgatcctgccatcatgatccccaaacgtttcggcgtcggctggaccgtcaacctcgcacgccccagcgtgatcatcggcactatcgtgctgttggcaatcgccataggactgccagtcgccgcgatactgatgtaaacgcaattctgatgtaaaaaatggctccccgctctgaggggagccaatgtgctggtatgttttacagcgcctgggcggccttctccacgtagtcctccatgccgtcgatggccacgacgtccttgaaccgcacgtcggcggtctcaagaccacgcagggcggccggggcggtggtgccggtctcgtgggccagcacatccatgcactcgaagtcggtgccggtggcgtcgaagcccaatgcctcgttcaccacgcgcgggaacttgtaggggctggcggtggagagcagcacgcgcggggtcagcgggtcgcgcggcatctgctcaagcaggtagtagccgcaggcggtgtgcggatcgatcacgtagtggttctcgtcccagcagtgtttgatggactcgcgtacctgatcctcatcggcccaaccggtgccgaagatctgacgaatcttggccagcagttcttccgggatctcgtacgtgccccacttgttgaggtcgttcatcagcatggagatcagacgggtgtcgccctcggacaagtagtacagcatgcgctccaggttggaggagatgaggatgtccatcgagggggagatggtctggaagaacgggcgctgacggttgtaggtaccggtggtcaggaagtcgaacagcacgttgttcttgtcggaagccaccacgaggtgcttgaccggcagaccgagcagcttggcatagtagccggcgaggatatcgccgaagttgccggtcgggaccacgaactcgacctcatcgccgacgttgatcacctggtcggcgagcagctgggcgtaagcggagaagtagtagacgacctgcggcaccagacggcccacgttgatggagttggcggaggaaagcaccacgtgcgaattgccggcgagacgctcggccagggcacggtcgccgaagatgcgcttgaccgcggactgggcgtcgtcgaagttgccttccacggcggccacctgcacgttggagccggcctgcgtggtcatctgcagttcctggacctgggagaccttgccttccgggtagaagacggtgatcgcggtgcccggggcgtccgcgaagccggccagcgcggccttgccggtgtcgccggaggtggcggtgaggatcatgatcttctcgtccgcgtcgccatcggccggcgtggtgtgcgccatgaagcgcggcaggatctgcagcgccacgtccttgaacgcggaagtcggaccgttgaacagttcgagcacgtaatcgtcacccaggggcttgagtggggtgatgcgctcatcggaccactgttcgccgtaggcgtcggcgatgcactggcccagctcctcggccgtgaagtccggcagcagcgcgcccagcacctcggcggcgatctgctggtacgacttgcccggcagggaggccacgtccaccttggtcttgcccaacgcgtccgaaacgaacaggccgccgtcatcggcgatgcccttacgaatcgcctgcttggcggtcagcgaatcggtggtgctgcgggtggaatggaaggtggttgtcacgatgaatccttctgcctgaaagggatgatgaatccacaccagtttagcgtgggccgtgggcagaagggccgtccgtctcgcgtagccgaccggtcaaaccggcgaaaatcaccattgccatcgaacggggaccggccatatcatgaaacagtccggctacaaaccggccatacagtaaggcgacagcggcgaatcaattgtcgcccataccaaaggagcacccatgaccgcttcaccccttgcgcagaaagcgaccgatgctttcaacgcgccgatctgcgaaaccgatcctgagatcgccgaactgctggactccgaactgggccgccagcgcaatggccttgagatgatcgcctctgagaacttcgtgccgcgagcggtactgcaatgccagggctccgtactgaccaacaaatacgccgaaggctaccccggccgccgctactatggcggctgcgaatacgtggaccaagtcgaaaccatcgcccgcgaacgcgccaaggccctgttcggcgccgaatacgccaacgtccagccgcactccggcgcccaagccaacgccgccgtctaccaggcgctcgtcaagcccggtgacaccgtgctcggcctggccctcgaccacggcggccacctgacccacggcatgaaaatcaacttctccggccgcttctaccatgccgaggcttatggcgtgaaccccgagaccttccgcatcgacccggaaatcatccgccagcgtgcgctcgaaacccacccggccatgatcatcggcggttggtccgcctacccgcgcatcgaggacttcaaggccatgaaggagatcgccgacgaggtcggcgccaaattctgggtcgacatggcccacttcgccggactcgtggccgcgggcctgcacccgagtcctgtgccgtacgccgacgtagtctcttccaccgcgcacaagaccttcggcggcccgcgctccggcttcatcctcgccaagcaggaatacgccaagaagctcaactcctccgtgttccccggccagcagggcggtccgctcatgcatgtgatcgcgggcaaggccgtgagcttcaaggtggccggcacccccgaattcaaggaccgtatgcagcgcacgctcgacggcgccaagatccttgccgaacgactactggccgatgacgtcaaggccaacggcatcagcgtgctgaccggcggcactgacgtgcacctggtgatggtcgacctgcgcaacagcgagatggacggccagcagggcgaggatctgctcgccgcctgcggcatcaccatcaaccgcaacaccgtgcccttcgacccgcgcccggcctcggtggcctcgggcctgagaatcggcacgtccgccctggccacccgcggcttcgggccgaaggaatacgaggaggtggccgacatcatcggcaccgcgctcgccgccggaccgtccgccgacgtgaccgcgctgaaggctcgcgtcgacaagctcgccgaagacttcccgctctaccccgacctggaccagatccactgatttgctgattcgctaatccaccgtggtgcaccggttagtgatgattcgctgaccggagcgcatcacatcaccggcttcccgcctgagatggaggggagccggttctgtttgcgattcaaaacgtcagacatcccataacaagcgggtcggagtaagcaatcagccgcgttgtgagttacgcttgactgttatgagcgatgaattgagtcctgaggtgttcgacgcggtgtgccgccaggccgatcaggccgcacgcgcgcaggagcgtcttgcacaggcaaataccgaagccaaaaacgaactgctgctcgccattgcggacgcgctggacgggcacgccgcggacatcgaagccgccaacgcgctggacatgctcgaatccaaggaaaacggcatggatgcgggcaagcttgaccgcctgctgttcgacgtgccgcgcgtggccgccgccgcccaaggcgtgcgtcatgtggccaccttgcctgatccggtcggcgaaatcgtgcgcggatacaatctgcccaacggtctgcgccttacccagacgcgcgtaccgatgggcgtcatcggcatgatttatgaggcccggccgaacgttactgtggacgtggccagcctgtgccttaaatctggcaatgccgcgttgctgcgaggcggtcacgccgccgaacgcaccaatgctgccacgctgggcgtcatcgccccggtgcttgaagcacacggtttcgaatccgcactggtgcagtccgtcgaccagtacggacgcgccggtgccaccgccatgatggaggcgcgaggccatatcgacgtgctcgtgccgcgaggaggagcgggtctgatccaagccgtcgtgcgcaactccaaagtgccggtcatcgaaaccggcgccggcaacgtgcatatctacatcgacaagtccggtgatctcgccaaggccatcccgatcatcatcaacgccaaaacccagcgcgtgggcgtgtgcaacgccgccgagaagctattggttcataaggatgtcgccgccgaattcctgccgcagatcgccgccgcgttggccgaggcgaacgttgtactgcaggctgacaccacgtcgtatgacatcatctccggcgcggcgatcgagggccttgacctcaaccgcgccaccgaggaggattgggacactgaatatctggccctcaagatgggcatcaaggtggtgccggatctgggcgcggccatcgaccacatcaacacgcattccacgggccacaccgaatccatcatcgccgaggattatgcggccatcgaggaattcgccaagcgcatcgactcggccgtggtcatggtcaacgcctccactcgcttcaccgatggcggcgtgtttggctttggtgctgagcttggcatttctacgcagaagatgcacgcacgcggtcccatgggattgcgggagatgaccaccaccaagtggatcggttacggaacaggccaggtgcgcgcatgaacgaggacggcaacatgaacactacggctgacacggcaaacaaggcaagcgaactgcggcccgacatcgacctcaacgatcccaagctcggcctgaagatcgcggccgaacggctcagcatcgtccgctatgtgttcctcgtgcagattgaggacggcatcgcctccgccgcccagcgtgcgtcgctcgaatacgcggacgccgtgctcatcggctggcccgagaccgattcacccgaagtcgtggacctcaacgatgcccagctcaagatcgtgcgcgaacacatggaactcatggaaggctacatcggcaaatacagccagatggagcacgacggcgacctcgacggcatgaccgacacgctcatccgcatcaccgagcgcgtggccgaggtccgccgcctctaccagccggacttcccgctgcccaccttcgccgagattcgtcgcgtggtccaagacgaatgggatgaagacatgggcaagatcgatcccaaggaagacaatccctccgccggcgaaatcgaagaggaaaccgaatcagccgatgacgccgccggcgagggcggccaggcatgagtggtgttaccggcagccacaaaacggctgcgtcagttcagtccgaaaaaacagtggaatccgccgagcccgccgaaatcattgccgtcacccaaggcgaaaccgaacggcgcatgtccgacctgtccgtaccggccggggccagcagccacggcaaaggcaggctttccgcacgcggcaactggcatacacgcctgcgcgtcggcatcatgggcggcacgttcgacccgatccacaacggccacttggtcgccgcctctgaagtcgcctgggtgtatgacctcgatgaggtgattttcgtgcccaccggccgacctgtgttcaagctggacaagcacgtcaccaacgccgaggatcggtatctgatgactgtgatcgccaccgcatccaaccccaaattcaccgtctcgcgtgtcgacatcgaccgtccgggcgtcacctacaccatcgacactctgcgcgatatccgcgcccaacatcccgacgccgagctgttcttcatcaccggcgcagacgccgtggccgaaatcatgcagtggaaggacgccgacctcatgtgggacctcgctcacttcgtggccgtcacgcgccccggctactccagcccggacggcgtgaccttgcccgaaggcaaggtcgatacgcttgagatcccggccttggccatctcctcgaccgatgtacgccgccgcgccgaacacgacgagccggtctggtatctggtgcccgacggcgtggtgcaatacatcggcaagcatggtctgtattcgtacgaggactgacgattcgtacgaggactagtgtgcatttgtacgagggctggtgaggattagcgcgaatcagcgcgcatcaatcctcgccagtgcaaggatgaacggtcaggccagtcccatcttgattttcaatgtcattacgcgagtcgccgccgccgtcaccttcgaagcgaaagccggatcggacttcgcccgttcgttgaggccgtccacaattggctttacataatccgtctgaccgatgcagggcatgtcgccgcccgcctcgacaagatttactcccaattggcttacatcgtagctgctcaacgcttcggcagacatcgaatccgaaatcaccacgcccgtgtacttcaggacgttgcgaatatgaccgtcgataatcgtagaagaaaacaccgccggattattcgggtcgatggattgatacgtggctgacgacatcatcaccattgcaggatcggccttggtaatcgcctggtcaaaggcacctgcctcggccccgtccaacgtggtggtcgtatccagaatgccttcggtggtgaagtcggtattgccgcttaccgcgcccaacccaggataatgtttgaccgccgcaccgacttgagcgtctcgcaaaccttcaataacggcgatgccatgttcggcgttgccggccgcatccaatccgaaatcacgatccagcgcgccaatcggagcatttgaggcacgattgccaaccactgtgccaagcaccggtgccaaatcgacatttatgccagcagtggctaattgcgaaccccacgtgcctgccgattgacgcaatgcgtcagcggacattgtgccctgctcaacggcactgggcattgtgtcgaaaccggtaccagtcagatgctgtacctgaccaccctcctgatcggtggcgatgatgagacgattgccggccggcgcatatccttggagttgcgcggtcgcggtcttgaccgtatcgacgccggtattccaattgccaatgagaatggccgagccaatgtgctcgtcggcgattgttgaagccaacgaggagggttcggaaccggcgaacaacggcaccatcactaactgtcccacacgttcctcaagcgtcatggcggataccgcacgttgggcttgtgccgccggatcgtcgttcttcttcggggaaggaacgtcggtgcgcggtaacgcactcgtctgggaggtctggggagtggtggtgttgccgtttgatgtggatttggcgaaccatccgacatgccatccgtagactgccacaccggccaacaccaccgccaaagcacatattgccgccacgattggaatgctcctgtgccgaagttggcgtgtggcgtgtgctgagggacgcatatgttgtggccgttgtctgtccataccggcaagcgtagaacagagcgtagaacaggatgttgcctcattctgtgctcagggcataaccgacctcccgccctttcgataggcttgagttatgtcttttaacgatcctttctcagtactgttcggcaatggcggcgattcacgacgcaacaatgcgaacaatgacgatccgatcatcctcgatgtcgaggccgatggggacggtccggcccacaacaccaacgctggcccctccgggtcatcccgccctccacgtggtccggccaatccgcgtatcacccgtaagccagcgtccggtggctcaggagccagccgtggcagcaagattctgatcggcgtggtgctggccttggccatcatcgtcggtctgttcttcggcctgtcccgattcatcaccgatctgatgtggtacggtcagctcggcttccagtccgtggtctggacccagctcggggtgaaaatcggtctgtgggtggcctacgcgctgctcatggccctgaccggcttcgtttccgcctggctggccattcgagcacgccctgattcggccgacggttccaccattcgcattaacggcgatgtggtcgaggtcggcaaatccgtcagctcgaaaaccgctcgccgcgtggccgtggtgatttcgctgatcgtcggcgtcatcttcggttcccagtttaacgcgaactggagcgagattctgctcatgttcaacgcgcagtcgttcggcaccaccgatccgcagttcggtctggacaacggcttctacgtgttcgtgctgccgggcctgaagctcgtgctcgccgccgtggccatgctgctgggcgtgggccttgtgttttccgtggtcacgcatgtgctgatgggcggtatccgcattaccatgccggttaacggacgcggcctgttctccattaccaagcgttgccgtcgccagcttggcatctggctgatgctcaacatgttcgcttgggcagtgcgccagatgattggcgtcttcgaccagctcaccgtgcagggttcacgcatcaccggtgcctcctacaccgccgtacatgccaacatccccgtcaccttcatcatggccgtgctgaccgccatcctcggcgtggtgctgggcatctggctcatgcgctcccacacgctcgaaggccaggcgtccatcggcgtgcgcgcttccgccgcgctcaaggcctggcgtgtgccggtgacctccattgccgtcgtggtcgtggtgggtcttgtactcaccgtggcatggccggtgctgttgcaacgcttccgcgtcaacccgaacgcacaggagatggaatccacctacatccagcgcaacatcgacgccacccgcgccgcctacggtcttgacaagctcaagaccgagcaatacaaggtgaccgacaagggtgagcagggcgctctggccaaggaggccgacaccaccgcgcagatccgtctgctcgacccgcaggtcgtcagccccacgttcaaacagttgcagcagtccaagcagtactacaccttcgccgacaccctggcggtcgacaagtacgagattgacggcgtctcccaggacaccgtgattgccgcccgcgagctcgatctggccggcaatgacaaccgcaactgggtcaatgaccacaccgtgtacacccacggttacggcgtggtggccgcctacggcaacaaggtgaccgccgacggccagcccgaattcttcgaatccggcatccccacccagggcaagctcaccgaatccgaaaagtacgagcctcgcatctacttctcgccgaacaccaccgaatactcgattgtcggtgcccctgaaggcacgcaggcttgggagttcgactacccgaccggttcggaaggtgctctgaccacgttcaagggcgacggcggcccttcggtcggcaacctgttctccaggattctctacgcgatccgcttcggctccgatcagattctcttctccgaccgtgtgaccagcgaatcgcagattctctacgatcgttcccccaaggagcgcgtggccaaggtggcaccgtacctgacgcttgacggccgcgtgtatccggccgtggtcgatggccgcgtcaagtggatcgtcgacggctacaccacctccgacgcctacccgtactcgcaaataaccgacctcggctccgccaccaaggattccaccaccgtctcttccgcaacggtctcgtccctgggctctcagaaggccaactacatccgcaactcggtcaaggccaccgtggacgcctacgacggttccgtggacctgtacgtgtgggatcaatccgatccggtgatcaaggcatgggagaagatcttccctggccagtaccaccagctctccgatatctccggcgacctgatgagccacatgcgctacccggaaagcctgttcaaggtacagcgcgagctgctctccaagtaccacgtgacctctgccagccagtactactcaggcgaagacttctggcagacgccggtcgatccgaccgaatcccagtcccagcaggaccaggacatcctgcagccgccgtactacctgaccttgcagaccggtggcaccgaggaaccggtgttctcgctgacctccacctacattccggctggccagtccacccgtgagatcctgaccggcttcctgtcggtcgactcagatgccggcaatgagaagggcaagataggctcgaactacggcaccatccgattgcaggagctgcccaaggattcgaacgtaccgggccccggccaggcgcagaacaacttcaacgccaacgccgatgtatccaaggaactgaacctgctgcaatccggcgacacgcaagtggtgcgcggcaacctgctcaccctgccgctcggtggcggactggtgtacgtgcagcccgtgtacgtcaagtcttcgggcgtgacctcattcccgttgctcaagaagacgctggtcgcattcggtgatcaggttggattcgcggatacgttggatgaggccttggatcaggtgttcggtggcaattccggtgcggccgcgggcgatgccgagaacgtgtccggtgaccaatctggttccgataccaatggtggtcagtccggcaccacggacggaaagtcggattccggctcgtcttccgaccgcagccccgaactccagcaggcgttgaacgatgccgcccaagccatgaaggacagccagtccgccatgaagaacggcgactggaccgcctacggcaaggcgcagcaggagcttgaagacgccctcaacaaggccatcgagctcgacaagtaacttggcttccctcagggtgaggggagctatcgccgaaggcgactgaagggagtcggttacctcaactgacatagcccgtccttatcataaggacgggctatttgcgtattcaaaggaacttcatgccatacaccttccatccggccgtcgaatccgacatccaagccatcaccgacatctacaacgctgcggtggtggcgggtggggccaccgccgacctcaccccgcgcaccctcgaccaacgccgcgcctgggtcgaatcccatacgccgccctacggcgtttttattgtggaatcggaagacggttcaatcatcggcttcggtgcgctctccgtgttctacgatcgtgccgggtatgacggcgtcaccgatttggcctattacatcgatccggcatggcaaggcaggggagtgggcacgttcatgcttgacaggctgctcaccgaggcgcgggcccgccacatgcgcaaggcctgtggcatcattttcgccgataacgtcggctccattgccctcatgcgccgcttcggcttcacccaattcggcctcatgcccgccgctgccaccgactccaccggcaccatgcgggacatgtcctactggtatttggacctgtaggcccgaggcggtttacccttgctctccatggattccggtgtcctataacactaaaaagttgtatcggatcagctcttttcctcgaacgccatatatcggacgcgcttatcccagataacggcaaactgcgggacagcacgcgattttcgtccgttttgacgtggcgtcccgcaatcacgtgggatgccacacacgtcaaacgatgcacatagctagcgtcccgcaactctgcctgcgaaatcattggaattctgccattcttatgattcggtgcagataacgtgcgataacgcttgcgggatgccacgccaagaacgcccaaaatccgctgccgtcccgcaatatgtcatccgattgcagggaagcgtcatctgtctgagctgtttcccttgcttggcgtcgtaaacgacaagttgttgattgccgctgcatgtttctcctatttgagaaccgaatgctacatactgagattttttccaaccggagttgatgttaaagtgacgccaagctgggacacgctgttcgtgtgcggcatcctgtgcaacgtgctcgtctgcctggccgtgcgcatcggattcgccgcgcgctccgtatccgacaaggtgctgggcatcctgctgccgatcgccggattcgtggcgatgggcttcgaacactgcgtggccaacatgttcttcctgccgatgggcctggtcgccaaaacgtttggtttcggcgccgacgcggcgggcgtcgcggcgctcgacgtgtcgggaatcctctataacctgtccgcagccacgctcggcaatatcctcggcggccctgttcgtggcgctggcctactggtacctcaacggcaaacagcgcgaaaaggtcgctggcgacaccgcctaatagacgcgattcactcgtctccatctcttgtaatactggtattacaaggaggtgcgatatgactatggccatggtgacggcgcgcgtcaatgccgaacggaagcgcgacgcggagaaagtgcttaagcgtaatgggcgcacctattcggacctgattcgtgatctgaccgactaccttgcggatacgggggaactgccggaattcgagcgtctgacgctctccctgattcaggagcgggagcgtaggaaaaagcaggagttgattcaacgtttcgccgaccggaatttgccggaggcggaaggcgatctttcggatgaggagattctcgcgcaggcacgtatggaacgatttgggggacgggatgaaactgctgtttgacacgaatattctgctcgatttgtgcaatgacaaacgagcgcctttccataaacaatgtgttgatttgctcatggaagccgttgcacagccaaacattgagatcatggcgccggtatcgtcattgaatgacgtgtattgcgtgttgcgcaagcattatggcgaggagcgggcggcgcgagacgatatcggtggactgatggaattgttcgacatccgtccacttatggaacgccatgcgtgtatgtcgtaccggtccgatgagcccgacttcgaggacgggctcatccgtgccgttgccgaggacaatgacgccgacgtcatcgtgactcgtgacgtcgaagcgtttcaccattcatcggtccgatcgatggatgccgagcaatgccgtgccctgctgcttgccgattccaaggcttgacggcggcgttgagtacaatcttgacggttgaatccggccgggcatgggccagtgcgcgaggcgaacgcgcgcatgacgtacggaacgtacagaacgtgcatacgggaatataggaagacggacgaggagtggattatggcatcggatttctggctgattgcgggactgggcaaccccggcaaaaaatatgaggacacgcggcacaacatgggcttcatgaccgccgacgtgctcgccgaacgttggacggtgaacttcgccgaccacaaaggtctggccatgctcggtaaaagcgtgatgaacctggacggccgcaccgtcaagttctttctggccaagccgctgacttatatgaatgattccggcaatgcggtggcttccattagcgcctattaccagatcgagcccgaccatatcgtggtgattcacgatgacatggacttggaattcggtcgtatcaaggtcaaggcaggcggctccgcagggggccacaacggcatcaagtcgattgaccgttccctcggcacgccgaaatacgcgcgtgtgcgcatgggcgtcggtcactccaagcgcggtgcgaacgcgcatgacaacacggtgaactgggtgctgggcggattcggtccggaccagcgcaagcagctgcccgaattcctggctgacggcgccgacgccgccgaggacatcatcttccgcggtcttgccaagacccaggagaagttcaatggccggtgaggcgacgcacccggacctgatcaacggctcactggtaggcatcctgtctgagctggaacaggacaagaccttccttagactcgccactggtgacatcgaggtttcggacgacatcgacaattccgttctggccggtgtttccgaaggcttgcgcccggctttggccgccgccatcgggcagggtgtgaccggcaaacccggcaagccggtcgtgctggtcgtggcctccggccgcgaagccgaagagaccgtgggctcgctgcgctcctggtatgacggcgacccggacgacatcgcccagctcgaagcctgggaaaccctgccgcacgagcgtctgagcccgcgcgcggacaccgtggccagccgcatggccgtgttccgcagactcaagcatccgagcgataccgatccgatgttcggcccgattcgcattctcgtcatgccgatccgctcgctcatccagccggtcgtccaaggactgggcgacgtcgagccgctcgtgttcaccgtgggggaggacctgcccctcgacgaagccgccaaacgtctgatcgaaaacgcctacacgcgcgtggacctggtcatggaccgtggcgagttcgcggtgcgcggaggcattcttgacgtattcccgcccaccgcaccgcacccggtgcgtatcgaattcttcggcgatgaaattgacaccatcaaggaattccacgcctccgaccagcgtacctacggcgacggcctcaagaccatctgggccaccgcatgccgtgaactgcagctgaccgacgccgtgcgcgcccgcgccaaagccttggtcggttcgattcccaatgctgaggacatgctcgaatccatcgccaacgccattccggtcgaaggcatggaatccctgatgcccgcgctcgtggaccatctggaaccggtgggctccatgctgcccaagcacgccgtgatcctcctgagcgacccggagaaactgcgccgttccgccgaagacttggcaaaaaccgcgaacgagttcctggccgccagctggcatgtggccgcctccggccacggcgccggcgcgcccatcagcttcgacgaagccagcttcctcgactatgcggaaaccatcagctccctcgaatactccgaacatccggtgattcgcctcaccagtttcggcgtggacaccacgctgaccggccatgtgcagctcgacgcccagaacccggccgaattccgaggggatgaggccaaggcctcccaaggcatcgaaggcctgctcgacgccggcttccacgtcaccatcaccgccgctgcggccggcaccttggccaggctcaggcgcgcgatcaacactaccggcatcgccaatttcgacgtcatccgctctcaggccatcgacggcttcgtggacaaagccgccaaaatcgccctgctcaccgaacgcgacctgaccggccgcacttcggccgtggccgtggccaaaacgccgaaacgccggcgcaaggccatcgacttggtggaactcaaaaaaggcgattacgtggtgcacgagcagcacggcattggccggttcatcgaaatgcgccagcgcaccatcggcaccggcgccaacaaaaccactcgcgaatacctggtcatcgaatatgcgccttccaagcgcggcgccccggcggacaaactgttcatccccaccgaccagctcgaccaggtcagcaaatacatcggtgccgaagcccccaagctcaacaagctcggcggctccgactgggcggccaccaaggccaaggcccgcaaacacgtccacgagatcgccgacgacctgatcaagctgtactccgcccgccagcgcgccaggggcttcgccttcagcccggacaccccatggcagaaggaactggaagatgccttcccctatcaggaaaccgccgaccagctcaccaccatcgacgaggtcaaatccgacatggagaagcccgtgccgatggaccgcctcatctgcggcgacgtgggcttcggcaaaaccgaaatcgcactgcgtgccgccttcaaggccgtgcaggacggcaagcaggtggccgtgctcgtgcccaccacgctgcttgtccagcagcattacgagacgttcagcgaacgattcgagggtttcccggtcaatgtggcggccatgagccgattccagaccaccaaagagatcaacgagaccatcgagggtctggaaaccggcacggtggacgtggtcatcggcacgcacaagctgctgaacccgaaaatcaagttcaaggatctggggctcgtcatcatcgatgaggagcagcgtttcggcgtggaacacaaggaaacgctgaaagccctgcgcaccaacgtggacgtgctgtccctgtccgcgacgcctatcccgcgcacgctggagatggccgtgaccggcattcgcgagatgtccacgctggccaccccgcccgaagaccggttgccggtgctgacctatgtgggcgcctacgaggacgcgcaggtcaccgcggcggtgcgccgcgaactgttgcgcggcggccaggtgttctacgtgcacaatcgcgtgcaggacatcgcgtccatcgccgacaagatccatacgctggtgcccgaagcgcacgtcggcatcgcccacggcaagatgggtgagaagcagcttgaccagatcatccgcgacttctggcatcgtgacatcgacgtgctcgtgtgcaccacgatcatcgagacgggtcttgacatatccaacgcgaacacgctgatcgtcgaccatgccgaccgtttcggcttgagccagctccatcagctgcgtggccgcgtcggtcgcggccgcgagcgcgcgtacgcttacttcctgtacgacccgtccaagccgatgaccgagcagtcccatgaccggctcgccaccatcgcgcagaacacggcgctcggctccggtttcgatgtggccatgaaggacttggaattgcgcggcaccggtaaccttctgggcgacgagcagtccggccatatcgagggcgtgggcttcgacctgtacgtacgcatggtgtccgaagccgtggagaagtacaaggagcccgaagagaacgtcgagccggtggccgtgtccatcgacctgcccatcgaagcgtcgattccgatcgagtacatcgattcggacaagctgcgtctggaagcgtaccgcaagctcgcctccgctcgcaacgaggccgatttgaaggatctggaagaggagcttaccgaccgttacggcaagccgccggtcgaattcgagaccctgttcgacgtggcccgtctgaagttcaaggcccgcaagctcggcatttcggagattctcgcgcaatccaaccgcgtgcggatcggccgtatcgacccgcccgaatccatccagatgcgtatgggccgtatttacaaaggcgcccaataccgcccggtcacccaccagctcatcgtacccaccccgttcaccggttccctgggccaaggccccatgagctccgaccaggtagtcctctggactaaccaactcctcgatgacttggcatggaggccacaacgatgaaaaaccaacacgcggcaacacttgccggctatgagattccccgcctcggcatgggcacaatggcgctcgccatcgaggggcgcccctccaaccgtgatcaggcgatcgagaccatccatgccgcgctcgatgccggagtccgttatttggacacggcttggtcctattatctgcccagcgcacccggcaccggcgaaccggaggatatgggctatggcgaatatctggtccgcgatgctctgcactcgtggcatggccccaaagatcaggtgctcgtagccaccaaaaccggctggctgcgcacgcttgacggcaacggcaactacggctggcaggccgacgcccgacccgaaaccatgatcgccaatgccaaggaatcagcccgccgcctcggtgtcgatacgctcgatctgctctactcgcactgcaatgatccgcaggtgccgtacgaagaccagatgggcgcactcaagcagctcgtggacgaaggtgtggccaaagcggtcggtatctccagaatcgacaacgcggacatcgaagccgcccacaacattttgggcgatcgtctcgtggccgtccagaaccagttctccccggttcaccgcgaccccgaacacacgttggagacctgcgaaaaactcggtttggctttcgtctgctggtcgccgctcggtggattccttgacccgttcaacgagcatctgttcgaccggttccgcgaagtcgcgaagtcccacgactgctcctaccagcgcgtcacgctcgcgtgggaacttgcgcaataccaatatctgttcacgattccctcggccagaaacccgcaggagattcaggactcgttcaaagccagcgaactgaaattgtccgacagtgaaatcgactacctcaatggcaaggacgtcgactgagcgatttcgtccgtactgccttgcaatcaggcggcgcatcggcattgtgagcgctaacaataaattttgggcgtgttgttcacaacgtccacaaatcgcactactcttaagaatgtcattcaagatacacaaccgttttaaggagtagttgtggcagtaattgaaagcgtgtacgcgcgtcagattctggattcccgtggcaacccgaccgttgaggtctacctggagaccgaagacggcgctcagggcaagggtctggttccgtccggcgcctccaccggtgaagctgaggcttgggagcgtcgcgatggcgacaagtccgtctacggcggcaagggcgttcttaacgcggtcaaggccgtgaacgaggtcatcgctccgaaggtcatcggcatggacgctgctgaccagcgcgctctggacgacctgatgatcgagctcgacggcaccccgaacaagggcaagctgggcgccaacgccatcctgggtgtctccctggctgctctgtacgcttccgccgagtccgccggcctgccgctgtaccgctacatcggcggcaccaacggccacatcctgccggtcccgaacatgaacatcatgaacggtggcgctcacgctgacttcgccaccgacattcaggagtacatgatctccccgtacggcttcgacacctactccgaggctctgcgcgctggcgttgaggtttaccacaccctgaagaacgttctgaagaaggaaggcctgaacaccggcctcggcgacgagggtggcttcgccccgaagatgaagtccaacgaggactccctcaagtacatcatggacgccatctccgccgccggctacgagcctggcaagcagatcggcatctgcctggatgtcgcctcctccgagttctacaacaaggagaccggcaagtaccgcttcgacggtgaagagcgcgactccgcctacatgctcgactactacgagaacctcatcaacgagtacccgatcgtctccatcgaggacccgttcaacgaggaaggctgggaagactgggctgccatcaccgctcgcctcggcgatcgtctgcagttcgtcggcgacgacctgctggtcaccaacccggctcgtctgcagaaggccatcgacctcggcgccgccaactccctgctggtcaagctgaaccagatcggttccgtcaccgagaccctcgacgccatcgagctggccaccgccaacggctacacctccatggtttcccaccgctccggcgagaccccggacaccaccatctccgacctggctgttgctaagaacacccgccagatcaagaccggtgccccggcccgtggcgagcgcgttgccaagtacaaccgcctgctcgagatcgaggaggagctcggctccaccgctcagtacgccggctacagcgccttcaaggcctgcaagaagtacttggccaagtgagctgaaacgcccgtaaaggcgtgagtttccactgaagctcgatacccgtcgtgttcgtcaagtcgaatgcggcgggtattttcatgtgacatgagcaagtcgtcccgtaccggcaaacctggcaaaaccggcaaagcacaagtcaggaaaaaagggtcggcggggcccatagcgttcttcgtctccctgttcatcatcgcactcggcaccatccagctggtctccaccttccacacttatgccctgaacctggccgagctcaatggcctcaagcgtgaggaagcctcgctgatcgcccaaaagcaggagttggagaacgatatcaagcgttgggatgacaaggcctacatcaccgcccaggcccgtgaacgcctcggcttcgtattccccggcgaacaggccgtgcgtgtgctgcatcccgaagccgtgaccggctccgatcgcgaatcccagaaaacggaagattccaataccagcaacaaaaaagtcctgccatggtacagcgaactgtcttactcgctcaaaaaggccgatgagcctgtgaccgatagcgagtccggcaaatccgatacttccggttcctctgactcgtcatccaacgactcatccaagcagtccgataagtcagaccagaacaccccatccgatcagaacacccagcaaaacacaggggagggaacccaacagtgaccatcgatatcgccgccaaggccaaggcccttgtcgacaccatgcttgccgagcccgccaacgaccatgacatcgaccaggtgcagcgtcagctcggccgatacccgcgcggcatggtcgccgtgggggcgcgatgcgtctgcggtaggccacttgccgtaatcacccgtccggtgttgcccggcggaatccctttccccaccacgtgctatctgaccggtccggaagccgtcaaggccgcctcccacgtcgaggccgccggcgtgatgcagcaatacaacgacatgttggcctcggacgaggagctcaaggccgcatatgagcaggcccataacctgtatctggcattccgccacgaactggcaggccgtcttggcgacagtgaggagcatattgaaggcacttcggccggtggcatgccggtgcgcgtcaagtgcctgcatgccctgctggcccagtccttggttatggggccgggcgtcaaccccattggcgatttggtgctggaacgcgtcaaagacgaattcgatccgaccgtctgccgctgcacgctggatgattgatcaacagatgagccaccgcgaacagtccattcatacgcactaagggatacgaggagaaggcaatgagcaaggaatccgtaaccgtcgccggcattgattgcggcacgaactccattcgactgaaaatcgcacgtgtcgatgccgatggcatgcatgaggtggtgccg

SEQ ID NO: 329 - DNA, 10296 bp, Unknown
  R42_10m  MAG No. k141_8815
catgaccaggtagacgatcagcgcgccgatgccatacgccagaatggtgccgatggggcccgcctgctggatggtgtatccggagctcaggaacaggccggtgccgatcacgccgcccaacgagatcatctgcaggtggcgggattccatgccgcgcttcaggttggtatgcagcgcgtgctcgcctttgccgtcatgtggcgactcggactggctgatttgcgctggttggttcacctgttccggctggttttgacggccatccgtctgaatctgcggttcctgctgcgaggacggcgactgtgccgccgtgtcggtgtcgggctgactcatgtttctctctttgccatgcgtgcgttccataggcgtcgtcgtgacggcccggaatagtatacccgcactgaggatatagctgcgctgcatgatgctgagtcaaaatcagcttcaaggggctgatttggcgtttgccggaggtctacttccgtttcaaggggctggtcaactggcggaacgcagatagaaatggcattgttctatcactattccgccgtttttaaccagtggctactttggcatcagccccttgaaacggaagtagatgttccgcaaagtcaaaatcagccccttgaaacggagataggcactcgcagcggctacttcaccttctggatacgcagcacgaacacggcagcgcacacggccatgacgatggagatggcgaacgccggcgtgtaggtgccggtcgtggtcttgaccacggaggtgatggtgggaccgactgcttggccgagcgtggtggccaagctgaggatgccgaggtccttgtcggcctcttccttgttcggcaacacgtcgacgttgagtgcctggtcgatggccgagtacacgccatagccgaagccggcgatgcccgcgtacaggtacatgcccgtgacactcggcatgatccacggggtgcggcgtcccatcttggaacgcgtgtggtcggagaggttgccgaacacgaggttggaaaccaggcccacgatggcggtgaccgagttcaacgtgccgactgccgcatccgggttagcgacgccgatgtccttgaacagctggggagcagcacggtggccaccacgtacaggccgctgctccacagaagaccgaaagccagaaacccgacagttaatcgaatgttgtttgttttgatgtgtccttggacatgtctgtcagcctcctatggtgattgcgtgccgttgtatggcgattgtagaccggctcggattggcggttttccgggctttttgagtgtgtggtagcggccgtatgcgccgttgcaatattgatcttgtgaacggttaatgtactcggggctcaaaatatattccagcgtgcggcgcgtttcttgtttaaggaaagtaattcgaaaaaagcagccgatgcatggccgtatcaggtgccgtatggcgagcggcgtatggaaaaagtgtctccgtcgggttgtgatgagcatctatgagattgacgtatgtcgtcaggggcagcaattggcatgtgcgggtggatttgcggctcaaagatggggaaacgatatgagactggcgatggcgcagatggcgatgaccgacaatatcgacgaaaacgccgatagggccttggcctactacgatcaggccggcgaggccggtgccgatctgttgttcttccctgagatacagttctccccgttcttcccccagtatgagaaccgcgatgcgtcgcgatatctcatggacctgaccgaccgtcacgtcgccgcattacagaacaaggccctgcaacacggcatgtacgtttcaccgaacctgtacctcaaagcccaggacggccacaactacgacgcttcgctatggatcaacgaacaaggccatatcagcggcatctcgaccatggtgcacatcctgcaagcagaacgcttctatgaatgcgactattatgcgccctcccgagacggattccacgtgttcgagaccccgttcggcaagatcggcatcgtcatctgcttcgaccgtcacgtgccggaaagcatccgtacatgcgcattgcgcggtgccgatctggtcatcatcccgactgcgaacatcagcgccgaaccattggagatgttcctgtgggagattcgcgtccaggtcatgcagaaccaggtggccatcgccatgtgcaaccgggtcggcaaggagggcgatgtggcgttcgccggccaatcagtggtggtggacccgtacggcaacgtcgtcagcgagactgatgaccatgaacagttgattatcaccgacatcgatctcacacaaaccgcagcagcgcgcaaacagcgaccattcctgaaactgcgccggcccgaatggtacgcctgacaagaacgaaccaacgtcagcccggaatcttctcgacgatggtgttcaaggtgtcgaaagtctcatcgatttggtccactacctgcttgccctggttgaccatttcggtgatctgttctgtgtggggttgcggcagcgcataaatcgacgtcttgacgcgcttcaagaccacgccggcgtcggacagatcctgcttgatggaggcgattttgggaatggacagcgtgccgtcggagaagttcatgccggacagcagctcttcgatattgaagtccaccaacgtgccctgcgcggcactgtcgattttgggcagggcgttggtcgcggcgtcggcggccgcgcccagcatgccgcgcaccgctttcacgtccgaaccgtaatatggcacgtattcggcggcctgccatagcgcgccctgggtttcgtcgtgcgccgtgacgatgtgactgccagcgctgtccatctgctcaagcgcctgcttgaagtcgccctgcccgacggattgctgtgcttcagccgcatattcgcccgcctgctgcgcctcgccgatcacccgttgtaccgactgccagaatagccagccggaaatgcccgacgccagcagaatagcgaccagtattgcaataacaacagtgccgatatgtttgcgcttagccataggaccaatgtacctgccactctgaccagtattatttacggattagcatcgtggcctgggcctcattctggctcatcggtatgttattggcgatgcgtagcggtggttatgcaagtgtcttttgattgatatcggcgcatgacaggtgaataacgtgtagcgggaaagcacgtctatggtcatattggcgttctcggcacagcaataaccgcggtattttttaaggtttgccaattcttccatctggtatgtgccgaacatggtgctgtcatgcgattgcttgacggcatattgcctggcttgaacgatacatcccattatcgcttgcggttgacgttgcgtaaacgtctatcctgacggcaacgccgcgaaacacgcacggcgggtagaggataatcggcttcaagggggatgatcgatcatgaacgagaacgacaacacggcgaacgccgtcaacggttccggcgcgttcgatgtggagggcaatccgctggatacgggccggttgtggcccattgatcaggcggcattgatcagcggcgtgacgacgcgcacgttgcgctactgcgacgagaccggtctggtcaagaccgcccgcacccgggcggcacagaatcaaaccgcgaccgtgatgaacgccatgccgctgtccggctcgttcggggccattcgctccgcgctggtcggcgatccgcgtttcgccgacccgtgtggtgaggcgctctacggcagcaaggcatgcgccgacttcgtcaacgaagccaagaacatccacgcacggcaaatcgccgaacggttcgcggcggaacaggatgtacggaatcagccgaaatgacagggcgtccggctccgattgcgcgacgaaccctgcgaccacgtcaccggcttaatcatccaagctgcgcgaagcggcgcaaaagatgatgagtcggcataagcggcgtagggttcagtctgcgtgttttgcacagtgagttacaggtcctgaacgttcatacgggccagctcggcgcgacgattgatcttgtcacgctgatacaagtagatgccggccagcacgatggtggatacgttgttggacaggaacgcgatgaatgcggaaagcacgacgttccacatgttgccatacgcaccgatgtccgccctggcgaagacggtaatcgccgccacaagcgacagcagcaatgtgatggcgggcaataccagaccgggccacttgctgtccatcttcgaaagcctgatctgcaatatgatgaagccgatgcagatggcgatgagaaacacgaaaaacactacggcaaatcttgtggcgccaatcatgattactctccttgcttgagctgcttgcgatattcgctgatgaggattttggcggtgtcgaagtcgagcttgtcgtcgaccgcgagccgtttgatgagcgcgatatacggctcgttctcgatctgctcgcccaacttgattttctggatgagccggtcgagccgaagccgaacggtggggtaggagacgtcgtactgcgcggcgacctccttcatggagcctgatgcgagcagaaaccgtttgatgaacgtcatatcctcgtcatcgaggttcgacatccacggcgggatcatcgtcgtatccatacctgcctccttcaattcacggcgggtttaataaaattaagtataccataaataatattaaaatcaaatagatatctgtttaaagtttttcgtagattagtttgaggtcgtgatgtaagaatgcgtacgcggacgcgaaggaccggcacatgtcggcacgcatgtagaagcatcggtcaatcggatatgcatcgacagcaccctaaggcattgacggatagccgattcctgtcatgcgatcgcttgacagcatgttgtctgattgactctttgagtgccataattgagatggcatgcgtacgcgtcggactttatggaatgcggggacgatatggttgcggacgatgaggtgcgggcctcccatggtgggcgtcggaatcaaggtctgctgtggtttttcggcgcttccgccacattgggcgtggccgccgtcacggccatcacgtgcgccgtcatccggtacggctggaatgacggggagttctggaagctggtggtgccggcggccgtggcgttggtggcggccatcgtgtgggcggcgctcggcttcatgcgtcgcgccgggcggacgcctgacgttccggccgacgcgaacgataccagcccggccgaatccaggttcgattcggcggccgcccagattctggcgatcgtcgccatcaacgtgtggggcgtcatgttcatcgtcttcgatacgttccagattgacccgtggcggtacgtgacatgggtcgtgcccgtgatgttcctgctttatctggcggtcttgggcatcggcagggcttgtttccgcaaacgacagaaggatattcgcttcccggaggaaccaagtatgacgagcagccgtccatcatacttggcataggcgggcagttggacgatgccgggcaggtcctcgttgtcgctggtctggttgagggcatattgggtgccggtcatggaacgctactggaatctgtcaccctagggtgtcactttccgtgtttacctcgacctgccatgcccctggcgcgaaggttgagaaaaacggcgtcaactttcacgacagggggctacctcatgacttggcaaaatgccggcacaccgattcaggcgctcggactggtgaaacggacagggttcgatgctcgaaccgcctcccgacccgcaaacacgcagactgttctcaataatgtttcgttggatattgatggagcgggcttgacggcgatcgtcggtccgtccggcgcaggcaagacctcgctgctgtatgtgctgtccggattggacaggcccgattccgggcgggtgaccatcggcggtaccgacgtctacgcactgaatgaggaacggcgttcgcggttcattcgcgggcatatcggtttcgtgttccagcaatacaatctcgtgccgtatctgacggtcgaggagaacgtgatgttgccgctctcgctcgcccatcgcaaggccgactacgtgcaggtcacgcagctgctgtcccggttcggtcttcgccagagggcgaagacgacggtaagcgccctgtccggtggcgaacagcagcgcgtcgccctgtgccgtgcgctgctcatgcgtccggcggtggtgttcgccgacgagccgaccggcgcgctcgacaccgcgaacagcgagcttgtgctgcaggtgctgcgcgagctggcggatgcgggctccagcgtggtcatggtcacgcatgacacggatgccgccgctttggccgaccacgtgatcttcctgcgcgacggtcaggtcacccacatcgctggcagactcaccgccgagcagattgccgatggcatacgccgcactttcgtaccggccgggtcgccgccgttggttgcggcggcgcggtctgtcggcccgatgatggtgaacgcccagcctatccaatccgtccaaccgggccgaccggtccagcgcgtggcgtatccgcagcagcggaaggaggctcatcgtggctaggtatgtgctgcgtgtgttccgcgacaatgtcacgggatgggtacccacgattctggtggtcgcagtggtgaccacgctggtgggcatatgcatgaaccaattcgtgtggacctcgtctccgtcgttcacattggccgcgcggcaggcgggtcttgatccggccgagttcggcatggtgtcggtcacgatctatgtggtggtgtcattactcgcgttcttctcgttgacggtggtcggctcggccacggtcaaccgtattcacagcacgttcgcgcaatggcggcttatgggcgccagcccgagtcaggtgcttgccagcatgtggatgctcgtgggtgtggcgagcctgttcggttccctgatcggctctctggctgcagtgccggccagcctgctggcggttcccgagttcaacgccatggctgcggaaagcttcgccgatggattcggctcgttcgcacctcctgcgttcacgccgtcgatggccgcgtggctcggatccctgctgttgggtgtggccacgtgcatgttgggcgcgtccatcccctcgctgcgcgcagcgaagatccgtcccatcgaggtgattcgcggcacgggagccatcgggatacggcacggttggcggtcttgggcgcactgggcacttggtttgattgtcatggcggcggcgctggcattggcgttctccggcatgggcacgccacgggcgctcgcgttcggccaggaggcggggcagacattcaacagcgcgctgtgggccggcatcatcgcctcgttcggcatgtacatccttgtcagcatgctgattccgattctgttgggcatcggacgtgtcgtgtgtcgcctgtgcgggtccgcgaccggcgtgctcgccgcccgttccgccgaggcgaaggccgccagcaacacgaacacgattgccccgctcgcccttgccatgggactgtcggtcaccctgctgacctgcgcgcgatcctatggccggatactcgccttgggcggccatccgaagagcctgaactacgcggactcgctgctgctcataacgatgctgtgcatcgtgtccctggccaccagcatggcggtcatcgccctgtcgaaccgcagcatggtcgccgaccaggcattgctgcgcagcatcggcctgtccccacgtcgtgtgatccgcatgtatctctggcagagcctgcagctggccgccggcgcggtcattctctcgctcatcccggtcgccgtcagcgcaagcgttttcgccgcaagatccgcggcgctcgtcggcatccccgtggccgaaatcccatggccgggcgtaatcggcatgggcacggcctgctggctggcattgttcctcatccagttcacgcagattcgccccgcgctacaccgcagcgtggccgacacgatacgcacatgctgacatgcacgcaacatcatacaaaaagagccacaatgggagccatgaaaccgcaatccgcgcaggccaataaggtcacggtcctggccgtgccactggtcatcgccgtggtcgaatgtgcagcgatgctgtgggagcatgcgatcggagcgccggccgacaccatgtatacgtttgccaaagatccgctgggattggctctgctgctggcgatgaccatagccagcagtgcgatactgcttgtccgttactggctgccagccgttgccttggcgcttgaagcggtattgttaatagttgcctcgtactggcggttggactcaatcgtgatgattcagacgctcgtcgcctgctatgcgttcgcccggacagcgaggggacgcgggctgtgcgttggaggcatcggcatgatgctgtcgatgaccgcgtcggccatcatggtgcatccggacgttctcgcgaccgaatgggtgagtcgagtggtaacgttggcagccgtgggaggcggcgcgcttgcagtacgtggcaggcaacaggccaaggaagccgaacacaaagctgccgaggaatgccgtcgggcagccgagctggccttccaacgcgatgccgcaatacgccgttcgcgcatagccggtcaactacacgacagtgtgggccaggatctgaccgtaatcatcgcactgtctgagggtctggccggcaaaaccgatgacccacgcgtggaggatgcgctgcacggcatcaacgaaatcgcacgagagagtctgggcgacacgcgcaaagccgtccgcgcactgaccgagttcgatggagcggcgaacggtgacgatacgcacacccaagaatcagaccagcattcatgggatgacattcggccgattctcgcgcacgcacgccggctgggcatcgtcacggtgttcaccgagactggtacgcgcgccgatgacgaagctcaggctgatttgtgtttcgatgtgactcgcgaagccatcaccaacgccatacgtcacggacagaacgtggtgcatatcagcatcgcctggaaccacagcgagaacggcaccgtcgccgtgattatccgcaatgacggcagtcccgcgcgcaaggacgcgcgcaaggatgacggtactgggctcgtccgtctattccaccgcgtcgaatcggcaagcggcatcttcgaatacggtccaaacgaagacggcgaatgggtcgtcgaggcgaccatcccgtccaacggagtgaacgaaaaggaccacaccgcatgattcgtataatgctcgtagacgaccagcgtttcgcgcgacttggcttccaactcatgcttgacgatgcttccgacatcgtcgtcactgcccagtccgctgacggccgatccgccatcgagacgctcgaacagctcgccgttcagcatcgtccattgccgaatgtaatcctcatggatgtgcggatgcccggtatggacggcatcgaagccactcgccgcatcaccagacgctggcccaccatcagcattctcatccttaccacgtacgacgaggacgattacgcctttggcggtctcgacgccggagccagcggcttcctgctcaaggacgtcaccaagcacaacctcatcgacgcggttcacgccatcgccaacggtgacgcaatactcaccccacgaatcaccagacaagtgcttgaacgaggcgttccgcatcccaccagcagccagcgccagcaagaaatgcgcaaagctttcgacgcactcacccctcgccagcgtgaaatctgcgcactcatctccgaagggctcatcaacgaggaaatcgccaatcaactcaccgtcgaacctgcctccgtcaaacgtgccgtgacccgtatcctcgcaactttgggcctgcgcaatcgcactcaaatcgccatcggctggttcaaagcaggcatgtagacctgctatttgctcagcagctcattcaagcggattgttgttacgaatgcgactaccgcacgccccccccccaagacggattccatgttcgacaccccattcggcaaggtgggcttggcggattttagtggtggttgcaacacctgtgtgttttgccgctcttgatggcggtcttggattggtgcgatcgtatcatgctgtgttgatgagttcgagtattttctcggatggtttcctgtagccgagtgttttgcggggccggtcgttgagttcctcggcgaccgcgtcgaggtagtcctcggggtatgcgctcaggtcggtgcccttgggga

SEQ ID NO: 330 - DNA, 13638 bp, Unknown
  R42_10m  MAG No. k141_8964
aactggcaatcattgactataaagaagtagtacaaacacgctcttgagttctcaaaccaccaccacaccagcaagacaggaaaccaaccagaagaaggaacccgccgcgctgagcggcaacaggtgaataacttacacgcaaccacgccacaacgcaaatcaaagcgcacaagaacccaaggaatcggcataacagcgcggttccttcggcgtgtcgcacagagcccaatttgctctgatagggctagcgtaacccctcgaatgtttccggaaaacatcgaatccattattcggctggcgtgtcgcacgagttttcggactgtcagctccatgttcatcgttcggcaaccacaccaccggcgcacaatcaatgcatggcaacaacgctccatcatcggatttcgttcatgaatcacgggtatacctgtagttatgaccaagaagattgctgtattaaccggggcgggcatttccacgtccgctggcatccctgatttccgcggtccggacggtgtgtggaccaagcatcctgatcaaatgagcgtttacgacatcgatctgtttctgcgtaacaaagaagaccgtgagtactcctggcgctggcagaaggaatcaccagtatggaacgcacagcccggcaccgcgcataaggcgctggtcaagctggaacaagccggcatgttgacgctgctggccacgcagaacttcgatgcgctgcatgagaaggccggcaacagcgacagcgtcatcgtgaacctgcacggcaccatcggcacctcgcattgcatgaagtgccatcaggaatatgccacggcggacatcatggcccgtttggatgaagaacccgatccacattgccatcgcaaactgaagtatcgtggcgatatgccatgcaatggcattatcaaaaccgatgtggtgtatttcggtgaggcactgccggacggagcgatggagaagtcgtacagcttggccaccaaagccgacgaactatgggtaatcggatcgacccttgaggtgtacccggcagcgagcattgtgccggtggccgcgcaggcgggcgtgcccatcaccatcatgaatatgggtcacacgcaatatgaccatcttgcgagccgcttgattcatgaggatatcgccgtcgcgctgccgaagttggtggacgagacgattgcggagaacaagtagtcctcagcataacgaaagcgccggtgggtggttaagcaactgatgattgttggttaaccacccaccggcgctttcgcgccacctcccgctagcgggaggtattggagcacacttctgcgcggcctcccgccagcggtattggaatcagtagatgcgcttgggctggaatccagcttccctgagtgccacgaggatgcggtcgatgtgctcggggccgttggtctcgaccgtgacgccgagagacaccgcgttggtgtagtggccggatgccttgaactggtcgtggtcaagctgaatgacgttggcgcgctgctcggcaagcagggtggccaccttgacgagctggcccggagtatccggcagctcgacctcgaagttcatgatgcgaccgcgggcgatcatacctttctgaatcaccgcacccatggtcacggtgtcgatattgccgccggacataatcggcaccaccacgtgcgggccggtggcggcggcgaacttgcgcgaacgcaggttcaggtgttccagcgcggccagcgaaacggcaccggccgcctcgaccaccagcttgtgcttctcgagcatgagcagaatcatttcgttgatgtcgcgctcggtgacggtgaccagatcgtccaggaactcgttgatcagagcgaagggcaggtcgccagggtgcttgactgcaacaccttcggcggaggtgaccacatggtcagccggagacacacgacccgcgtccagcgagtccttccaggccggggagccctccggaatcgcaccgattacgcgcacttcaggcttgaacgtcttgatggcgagcgccacgccggcacccaagccaccaccaccgagcggcacgaccacgtcagtgacgttcggcacgtcttcgaggatctccagaccgatggtgccttggccgcaaatgacttcgtaatcgtcgaacggcggcacgtaaatcatgccttccttgtcggcgagctcagcagcgtgggcggcggattcgtcgaacacatcgccgtacagcaccacatcggcgccgtaggccttggtggcatcgaccttcagcggcggggtgatctgcggcatgcagatggtggccttcgcaccacgctcacgggccgcataggccacgccctgggcatggttgcctgcggatgcggtgacgatgccacgggcgatctgctcttcggtgagcgatgcgatcttgttgtacgcgccgcgaatcttgaaggaaccggtgacctgcaggttttccggcttcaggagaatctcatgaccggtcatctcgctcaataccggcgaagggataatttccgtatgacgggcagtccctttgagacgtttggcggccagcttcagttcggctgcatgatcacgctgcagcgccttcaaaacatccttttgttccatagctttccattgtaagcaccacaatgccgagagacaccggctatctcgcttcacagaggtacattcggcctcttgcagacagctatctgcttttcacaggggtaccgagcatcgaaaaccccgagtataagccttgatttttcaacgcttatactcggggttttgacgttacggtacctctttcaaggcggatagcatttcgcaatagcccggaagtatctctgtgaacggagaaaggtactcaatccgctacaatcgctccaatcgctacagctgaatgacggcggcctcccaaggatcgagctcacggttggcgagggagaccacggcgtgcggggcatcatacgtgctgattaccacgttcgactcggtgattccggcggcggccagttcggcggtttcgcgcggtagatcaacggttcggccggacatgttgaccacgaccagcagcttctcatcgccgagggtgcgggtgaaggcgtagacatgcgcgtcatccgcatcgagcagatgccagtcgccggccgccacgacaggcatgtcgtggcgcagcgcgatgagctgcttgtagaaggcatacaccgaatccggatcgtcgaattcgccggccgcgttgatcgccgcatggttgggattgacggagatccatggctccttagcggcatccggcgcagtgaaaccggcatagacagagccgtcccattgcatcggggtacgcgaattatcacgaccgcgcgcggcgatacccgccaacatcgattcgggcgactgcactttggcttcctcaaccctttgacggtaagcgttcagggactcgaggtcacggtactggtctaggcgcgtgaagtgggcgtcggtcatgcctagctcttcgccctgatatatgtacggggtgccgcgatgcatgtgcagcatcaggccaagtgccttggccgaacgcacacgagattcctccgaggagtcatcaccccaacgagaaacgacgcgaggctggtcgtggttaccagtaaacaggcttgcccagcctgcattcttcacggccgcttgataaccggccataatgctcttgagcttcggcaggtcaagtggcagtggcttccatttgacgccttcgcagtcaaaatcaacgtgctcgaataggaagagcatgtccagctcgccgttggcggggtcggtgatgtattcgttgcgctgtgcggtaacgccgggagcctcgcccacggtgaggaagccctcacggccttcgaacacttcacggcgcatttcggccaggaattcgtcttggcgagggccgtccgcgcagaacggattcgggttggaatagccttcctcacccacgggcagatcgtccagctcggaaccgtactcgccgggcagcttgccagacaggtccgtgcgcttggaaatcagcgtaatcacatccatgcggaagccgtcaacgccgcggtcaagccaccagttcatcatgtcgtataccgcgcggcgcacagccggattttcccagttgaggtccggctgcttcttcgagaactgatgcaggtagtattcgccacgctcagggcaatactcccatgcagaaccgccaaagtaggagccccactggttgggctcggcaccgggctcgccggcagtggtgccgggacgggcgggacgccaccaataccagtcggcgtgctcatcatccttgtttttggacgcttcaaaccaggtgtgttcatcggaagtgtgattgacaacaagatccatcacgatcttgagcccgcgcttgtgggcctcggccagcagctcatccatgtcgtcgagtgtgccgaacagaggatcaatgtcctgatagtcggaaatatcgtagccattgtcgtcttgcggagacttgtataccggggatagccacagcacatccacgccgaggtcggccagatagtcgagccgtgacgtaatgcccttgagatcgccgaggccgtcgccgttggtgtcttggaaggaacgcgggtaaatctggtaaacgaccgcattggaccaccacggatttggggtggcaccgttggtgcggatggaatctggaattactgtgcgttgtgaagtggtcatcgttggctcctccattatttatggtctacattgcctgttgctcatagtctaaaaagcgctgaattacatttccattggggaactgcgttggtgtgccggaaacaaaaactgcaaagagccggaaggcactgctacggctcaattctcataagctgcacatgctatttagcaacatatgggccctttcgctgtttgtggtgggtgactgtgccgtggggtgatgttggtcgggtaggttggaggcatggatgcctctcacctgttcaccgccgcgcttcggctgcggtcgccttggagggtcgggtctgcggacttccgtgacgccgacggcgacgggcgggagccgcacatcacgatcggcttcgagcccggcagagggttcatgctcctgttcgaggcgtgggtgtggctatatcgcctgtgctcgtggatgatgcactcgaggctcgaacctatgaaggagctcgcccgcttgttccgccgccacttcgccaccataatctacctgacctgcggcagctcacatattaacggttcttctgattgcgacgcgcaagagcaacttcgggcgcgcttggattgcctgcttgaacccactggtgcggggatagatgatttagttgacacgcctgcgggaatctggtggggatttcgctggcacaccggatttcaagcaaaccccgcctcgggaaccgctccggacttcggcgttggcccggttcgtatgtcaatcgattgccgtctgaaccgggacagaatccgctgtcccggttcgcgatttttgtccttttttacaaacagggacaagccaatctccgcagttcatatgctccgtaatacaaaatcggcggaatagagccgatcccggaatcaacatgttgtcccggttttcacataaaacgattgacattcataccgggacaatgaaaattgtcccggttcgtgaaaatcgcccgaaaccgcgaaccgggacagcggattctgtcccggttcgcgcgtcaaacggttgatatgtggaccgggacaagccagtggcacggcgacacagcagatgcgctcaattgcaccgtaagccgtacggtttcgtcactttttcattcgcacaacgagcaaaaccacatgacctttgtgcgccaccgccacatcaaccgaccgtcgcctttattgtggcggtttccagtatggcaacaggacagaagagcctcctccggtgagagccggaggaggcttgggtggaagcggacctttacttcacagagtcctgcaattcaggactggcctacggccagacccaacatgacctcgcgagtacgcgacctatccggccgcccgggccgggaaacagcccacggggctgtttccttaatcggctcgtctcgctcgacgcggtgaagtaaagcagcgcctgcgctgttttacttgaccgctcccctcatcacaccaccgacgacccacttttgggcgaagatgtagacgatgaggatcggggccatggccatcaggtagctggagaaggccatcgggtagttggtggcgaactgcgagctgaagacgtactgggcgagcgggatggtctggttcgactggtcggtcaggatgatcaacggcaggaggaagtcgttccaggcccacagtgcggtcaggatggcgatggtggcgttaatcgggctcatcagcgggaagatgatggtccagaaaatgcgccacgtggatgcgccatcgattcgggccgcctcttccagcgaaactggaatcgaacggatgaagccagtggcgatgaacaggttcgtgcccaggccgagcaccgtgtacaggatgatcaggccgacctggttgtccaggtgcagggagcccatctgcttcgcaatcggcagcatgacgaccgggaacggcacgaacatggcggcgatgaagaagtagtacaggaagcggaagaagcgcttatccatgttgcgggccacagcgtaggccacgaaggtgttggtcagcaaggtgagcaccacggcggccaccgtgatgatcgcggagttgagcgcggccttcgggtagttgaccttggcggaggcgtcggcgaagttgtgccactgccacgaggtgggcagggcgaaggtgccggcttcggccggagtcttcagcgcggtgacgatggtgaagtagagcgggatcagaatggtcaggctcagcacggccacggcggcggtcagccaccagttgatcttgtggtccctgcggaacttggcgggcttgccggacttggacggggtaactgttgcagtagtcatttcttatcctcccctaaatcagatctgttcctggctgcgggagatgcgcagctgtacgaaggcgatgatcgccagcacgatgaagaagagcacggcgtttgcggtctggtaggcgtactcgccaccggtcaggccacccttccagatgaggtaggtgacggtttcggtggaggagttcggaccgccctcggtcaaggcgacgacctgatcgaaggtgccgagcgcgttcttcatggacagcacgaggttgatggtgaagaacggtccgatcagcgggaatgtgatcttccagaacttctgccaggcgttgacgccgtcgatggcggcggcctcgtagatttcgtcgtcgatggtctgcaggccggcgaggtagatgagtaccgagtaggcgatgccctgccagacggcgaggaagacgattgggatccagctgagttgctcattggtcaacagcgaggtggacagccacttgatgcccagcgccttgccgagctcgggcagcgggttcatgaagatgtacttgaacacgtagccgatgaccagcacggagagggtgtaggggatgaagaagacggctcggaagccattcttgaaggcgatcttcgagttcagcagcaccgacaggaacagggcgatcacattaatcagcaccgtgatgagaatggcgatgaggaacgtgaacaggtaggcgtggcccacgcggttgtcttggaagagggcgatgtagttcttcaggccgatgaacttgtaatcgccgtagccctgcgagttggtgaaggaatactttacgccgtcaagaaatggcaggtacaggaagaaggcgaaaatgatagccgccggaaccaccatccagtagtaggcggggtccaccttgcgggtggagaaggcggagaccttcttcttggcgggtttcttggcagcggacttagcggccggagcagcggtcttagttgcagttgcgtgtgacatgatgttctcctctcctaccgatcactcgaaggtcctggcttggaccttgtcccattcggtctgcatctggttcaggaagcggtcggtgttgccggaggtcaccatggtctgcaggtagccgccgatattgatggacgaaggaatgtagtgatcgcagaagtcggccactcggttttcctcgaagaacgggcgcacggtttccagcgcctcattgccgaagtaggtgtccttgagtggggtgatagcggactgcgcatcggcgtaggcgtcgagctgatccttctgcatgaggaattcgacgagtttcatcgattcttcggggtacttggtgtttgcgccgatggtcagcatcacatcgtcgcctgcggtgaggatctgttcgctggcgtcatcggtggccggcatctgggcgaaaccaagttcaatgtccgggttgatgagcaggatctgtggaatggcgtaggtaccgagcggaatgattgcggccttgccttgggcgaagttctgcgtgccctgctggtaggtgacgccagtatcggcagtggagtaggtgaagagttcggattccttctcgactgcggtcttccacagttcctggaacgtggtcttgccttgcttgagctcggtgtacttcgattcgggaaccagcgtgccggccagggaggcgagcggtgcctgggtggtccaggcgtcggccacggaaccctgcagcgggttgatgccggcgtccttgaaggtgttgagcatatcggtgaactcgctccaggtggtcggcggattctccgggtcaaggccaaccttgcggaacagagccttgttgtagatgtagccggaggcgttacccgcgaagggcaggccatacaggcgcttcttggaggaatcggtggtctgcaccaggtttttggcgatctgcaccatgccggggttgagggtgtccacgatgggctcatcggtgaagtcgtagaaaacaccggatgcggcgaagttgccgaagctgatgtcgccgttgaaggtgattacgtccggcacgcggttcttgacgaagcgggtgcgtagatcggtctgggcgttggcggagttgttgatgttgaccttgatggtcgggttctgcttttcgaagtcggcgaccatggacttgaactggtcggcggcctcggacttgaactggaagaaatccagcgtaacggtacctgcggtgctcgatccgcagcctgccaggccgaagccgacggcgatagcgcacaccacagcagcagtgcgcacggccagacgcttcagtctaggcgttgaatgtggggaatcggacagcatattgttgactcctttatctctttccttccggcttcagcgccggcggctcttccactttcaaaagtaacgattgcgccatttcattcccagcgccagcgagcccacttgcacaagaaacaaaaagcgcggtattttgtgattaacgcaataaataatgcaaaggggcttaagcatgtctgacgccaatgcgattccgcaatggttttccggatccgagcatacgcatcgcgtggcggcagccatcgcccaatatgggccgattgcgcgcaccacattggcacagatgctgggattgagccagggtgcgctctcccgcattaccagcgatttgatctatgccggagtcatcgaagaactgccggctgtggccagaactacaggcaagctgcctgaacggtttactcccaaggagagctcggatcgtcgcggccggccgcagaccgcattggtattatgctcgaacgcacgcaccttcgtaggcgtcaaagtgcacggcacatccattgtgtcggccgccgtgaacgcgcatggcgaggtggtttcctgccgacatgagataccaattggtgctgatcagtcggcagaatatgtgacatcgtcgatagccacgctggttcgtgaatgctctgatgatgtcgccgccaccggcctgcccgctcccactgccgtgggcgtagcggtcggaggtcacgtgatcgatgattccatcgtcacgttcgccccattcctgcactgggagggcaccacagatttaggcgcaatggtatacgaggccaccggattgccatgcggcgtattcaacgatatcgattcgctgctggtggatgcctcctggttcgggccgggtgtcggcgtggatatgttcgccgtggtgaccatcggcgtgggtgttggttattcgctggccgtgaacggcaagccagtgcagtacccggataagagctatggtctggtgggccacgtgcttatcgatccggaggggccgcgctgcaccagcggacatatcggctgttcacaatgcttgactgacgattcgatcgccgaacagtactctgcgattgtgggtcgcgcggtcagttttgaggactttgcgcgcgatgccaagggacgcgtgccgcaggccacgcagttggtgaaccggacgtgtttccggttgggttcgctggtggctacggtggcgaacatcgcgatgcccggacatgtgatgattgccggggagtccgcgtttttggccaagctcggcaccgattcgctgcgcgatggcattcgtttctaccgtcacagccagacccagccggtcaagttcacgattatggatcacgactggcagctctgggccaaagccgctgccagtcgcgtgattgtgaagcatattgggtaggccgttcttggctcccctctctgaggggaaccaagaacgttgcttcgccacagtcactccgccacgaccagcaattacggacttgcctatcggcaaggctcaatcccaccttcgctcagctgtcgcttcgctcaggccgtggctactgacagcctactaggctgtcagcttaacgccacagccttgagcaatactgcctgctgggggtggagggacgggggacggatgccgtagcgctgcagggcttcaccggtcaggactacgccttcctcactccaccagccgagagtgctctggccgttggtcagaccggtcaaatccaagctcgggtcgagcgggctgacgcggtaggtgcgctcggggtcaagtccgggcaggtgcacgggcgcggccggataggtctggctggtggtcagctgggtgaagcggtagatggcggcgtcgcggttcggcatcaccatgccatccaagcgcacggccggatcgttggagtcggcgtgcacgcaggtgtcgatggcgaaccagtcgcggtgcttcttgaattcggccacccacacggccagcttggcgagcgcctcgtccggctccttcaacaggttccattcgatgcccatgtggccgaagaacgccatggccatgcgcagttcctggctggtggcacgctgggtggagtgcgcgggactggcacccacgtgctcgcccatcatcgccggcggcaccagcagcgaggtgtagcgctggatgtccgcgcgctcgaccgggtccacgcagtcggagacccagatacggtcagcgtgctctaggatgccgaggtccacgcggccaccgccggaggagcagctttcgatctcaaggcccggatgtgcggtcttgaggcccttgaagatgttgtagacggcgagggtctgcgcgtgcacggccgggcggccggagcggcgggaaccgggctcggtgacgagcttgttgtggtcccacttgatgtagtcgataccaagctcgccgacaagctggtccatgcagccgtagatgtagtcgaacgcatccggattggtcagatcgagcacctgctgagtgcggccctgcagcggcagtcggccggtggtgggcgaaagaatccaatcggggtggttgcgggccacgtcggaatcggggttgaccatttccggctcgaaccacaagccgaattccatacccttggcgtgcacgtagtcggcgagcgccttcagggacttcggaccatcgggccagacgtcctgcgcaatctgccagtcaccgaggccggaggtgtcgtcgcggcgggagccgaaccagccgtcgtccaccacgaatcgttccacgccggagtcggcggccttgtcggcgagcgccttcagcgtatcgaagttgtggtcgaagtacacggcttcccatgtgttgaggatcaccggacggccgtgcgagaacaggcgcgggtgcagggagcgcacgtaggagtggaagcgggcggcgatctcgttgagaccatcgccataggagccgaacagccacggggtgtcgtaggagttctggccttcgccagggccagcgagcgtcacttcgccgccgaacaggagttcgccgccgccgatcacgccggttgtgtagggcagacgttcggcggacagcacggagttgccgctccagcccacgtgcaccgaataggcgtcgccatgctcgaagccgaaaccgggcacgccggcggtcaggagcagggatgcgtcgaagtcagggcggccggcgagctgcggcttttcgaaacggccgacggtcagcggctggcgctgcggactgcgttcacgtagatggtgaccggtggtggtgaggatttcgccggcggattcgggcagcgggaagccgagctcgatcttgccgatctcgagcggggctccggcgtctgcaccgaacaggttggttacggtggccttctgacggaccaggccgccggggagcagttcgaggtgccactcgacttccacgccctgctcctcatcgcgcgcggtgactatgacgccgggcacgcggaccggaccggtggcacgggcatggccggccacatcggtgtagctttcgccggacacggcatcgagggtggcttccagcacgccgccggcctcgatattggtcacggtgaacttggggaagagctcgacgccggcgcggcgcagcaccacgcgctgctcgccgatccagctttcggcctgggtgggcaggatggacggccaggcggtgtcgtcgagcgcgccggacacgcgctgcggcttgagcgcatcgtacgcagcgagcaaggtctcaggattgctcagcggacgaccccaatgaatgatacgcggcaggtcatcgccggcagcgaccagaccgattgccacgttggcatcgggctctgcaagatagatggcggtgagcacggttccgtcagcggcggtaccggtgaaggtggcggtgttctgggccatagtgtctccttcgacgtatacggaatgcattgaactactgattgtgatggtagaagaaatggaatatgttgccttggtgccgcgtgttggatggatgaagtaagtatttgagcgatttaccgccgatgagcgaagaacgcgctgaggagagcctggcaatcggcttctgccacaccgccatacacttcaggggcgtgaccaatatggggatcgcgcgggatatcccagattgacccgcaagcaccgagcttggagtcccacgcgccaaacacgatggtgccgatatgggtttggatgcatgcgccggcgcacatcgggcaaggctcaagcgtaacagccagtgtgcaatcggagagattccacgagcctaatgcgcgggcggcctcacgcatggcgatgatttcggcatgtgccaatggatcgccatcggcctcgcgtgtgttgtatcctcgcccgataatctggccgtcggcgttcaccaccactgcgccaaccggcacatcgccggctgccgcggcccttttggcgagctccagcg

SEQ ID NO: 331 - DNA, 61595 bp, Unknown
  R42_10m  MAG No. k141_9361
atgtcatcgagcacgggctcgaaagctcccccaccttcgtgctccgcaccgctgatccggccgccgaagacagcccgttccgctggctgctggccatcaaccctctgccttcgcgcaaggcgttcgccgagggcgggctgcccagccacctgcatttccagtacgccaacgatctgcacacgctcgtcgccacggatgaggccaccggcgccgagaccttgcgcaatccgcgttggtacgcacaccatgtgctccaacgagggaaccaccgaggaccgttgcgccatcatccgtgcgttgcaccacttgcagtagatctggcaacatacggcggtatgacggctccccgctagtgaaacagcatcgcttcagtagccatgcgagtgcagatactcatcatcgaagccggaataatggccgatctcgtgcaacacggttttgcggatctgttggcgcagctcggcccgtgttgagcatacgcgttcatgcggtcccttgaacagggtgatggcgtcccggcatcacgccgctgtagcccgtggttcgctttgtgatgggtatgccctcatacagtccgagcagctcaccgcacggattgctcattgtggccagttcgcgctcattgggctcgtccgcaacgacgatgccgacattctccagcacccgcgcaaaccgttcaggcaaatcatccaacacctgttcaatggcccgttcaaactcatcgtcaccgatgtgcatactcaatccttcacctgttgcttggctcccacgataacagacatattccgggttccggcttcttgcgggtgccataacgttgcgcggaacgcttccaatcattcattaggtcgattcttcattcattaggtcatgaggctgcgattgtcggtgttggaatggcaccattccagtggtgactgtcagagctcaccgacctaatgaatgaagaatcgacctaatgaatgcgtccggtcatatctcattgtgaaaatgacccggtattgcggtattccgcaattgcacttccaacgattctgaagtattcatccagattctgcgtggtagcgaacgttcttcttgtggcgggaaaagtcttatagcccgcgaaggagaggttgttccttttctcgatatctccttcccatcggtttcggtcatagtggtaccgtccgtcgtattccagaatcacatgatcattcggatacaccatgtccacaaccacctctttgttctgcaatgggaggtatatcggagcattcacctccaattcgggtaatccacgttttaccgattcaaggcgaaggatgctttcctgcggcgaatcggtgttctctctgcacaacgagagcgctttgcgaaataatctgatacctgggaatctacctatatcggcgaggaacaacgatatcttgtctttcgttgtctgtttcaaatgctcattacggcaggtggcccaatccaaggcaatgaccatactttccacatcgacgaactgtgcgatctgacacagcgcctgttccactgaaaccacggcgataagatcatcaatcatcgtctggtcaatgccatgaccccaataatggcattgcgtttcggtgagattcgacaatctttcagccccggacaccgtaacgtgcagtttgttggggtcatagttgggcttgtaattcagtgtagccgtcatgccagcaagctgtagcctggtgccatggctgaagcaaagctcctgtgaagtgcgcatcgatctggcacggcattgttccagtgttttctgggcgaggtctcgcgcctcatcaagtgtgaagaacgtgttgtatgcataggactccatgccatccccctgatggttgtatccgtgaaccgcgttattcacggatacaactcacgatggcataaccaacttctgcgcgcaaccagctcggccgaatcggtggatatgtgtataacctgccagctcagctgttgcggttgatctcgatgtcggtgacggtgaggttggcctcgttgatcaggttgaagaggatgacttcggccagcggaccgggctgcatgaaggtgtgctgcttggcttcggacacgtaatcgtggctatcacggtagaaggcggtgtcgatgccgcccggatagacggcgaccaccttgacgctggtgcccttgtatgcggcctgcagactcttggtatagcccttctcgccccacttggcggcgcagtacacgctttcgttcgcgttgccgcgcgtggcggcggtgctcatgatctgggcgattttcacgtcgcgctctccacaggccttgagggtttccaccgtccacagaatcatgcctttgagccccttgaggcatttgtcaatgtcagcggcttcataggcggtgggcaccttgaacgaaggctggccggcgttgttgatgagcaggtcgatgtggccgagcgcggcgatgctcgccacggattccttgacaaatgcttcgtcggtgatgtcgcctacgaaggcgcggtaggattcggctggccactgcgcgctcagctcggcctgacgttcggcgttgaagtcgatgccggccaccagccagcccttggcgatgagttggctggcgagctcgtagcccaaacccagcgcgctgccggtgacgatggcgattttcttacctgttgtggttggcatggttgtttcctttgcatgcttgcgagactcccctcagaccgcctacggcggccagctcccctcagcgaggggaacctagggttaacccgttctttgctgacagctcccggtaggggagccaagaggtaggactattcttcggctacgagttcgaggtacgaatcattccagaggtcttcgtcgccgtcgggcatgaggagcacgcgctcggggttgagcgcctcgacggcgccctcatcgtgggtgacgagcacgatggcgccctcatacttggcaatggccttcagaatctcctcacgggaggcgggatcgaggttgttggtgggctcgtcgagcagcagcacattggctcgcgaggtgaccagcgtggccaaggccagacgggtcttctcaccgccggaaagcacatgggccggtttcatcgcgtcatcgccggagaacaggaacgagccgagaatcgaacgggcctgcgtgttgtcgagctcgggcgccacatgctgcaggttctccaacacggtggcgttcagatccaaggtgtcgtgctcctgcgcgaagtagccgatcttgcagccgtgaccgtattccacggaaccggtgtccggctcctcgatgtgggccagcaggcgcagcgtggtggtcttgccggcaccgttgtagccgaggatcaccacacgcgagcccttgtcgatggccaggttcacgccggcgaacacgatgttggaaccgtaggccttggagatgtccttggccatgatcggcgtgcggccgcagggcgcgggctcggggaaacggatgtccgccaccttctcggccttctgcgcctcggaggtgttttccagcagcttttcggcacggcgcatcatgttctgcgctgccacggccttggtggccttggcgtgcagccgaatgccttgcttcatgagacggtcggccttcttctcggccacttcgcgttcgcggcggcggcgctcctcgtccaccacgcgctggtgcaggtaggccttccagccgagcgaatacatgtcgatctggccgagctgcgcatccagatgccagaccttgttcaccacttcgtccagcagttcggtggagtgggagatgaccaggaagccaccctcgtacttcttcaagtagccgcgcagccattcgatggaatcggcatccaagtggttggtcggctcgtcgagaataagggtgtcggcgttggagaacaggatgcgcgccagctcgatgcggcggcgctggccaccggagagcgtgccgagctgctgctccatgacctcctgcggcaggccgagcgaggcggccatggaaatcgcctcggactgggccgcgtagccgccagccttgtcgaagtcctgcatggccttgtcgtaccgggtcatggccttgctcatcacgtccggatccgggtcggtcatatccttttcggccttgcgaatgcggctgatgatggtggcgatgtcacgcgcgctcatcatgcggtcgagagcggtctgcgtgggatcagaggcgtgcgtgtcctgcggcaggtagccgagcttgccggagacgcgcaccttgccggcggtgggcaacatgtcgccggtgatcacgcgggtcagcgtggtcttgccggcaccgttgcggcccaccagaccgatcttgtctcccttggccacatggaagttggtggggtgaagcagcgtgcgcgcgccgatctgaatttcaagtccctgcacctcaatagccatgaataacctacttgtctgttacgaatactgtctcttaccaaagtccgactgtccatcatagcgaacactatgccgaccgggctcagccgacgctcatgcgtccatacgcttatatgcccgtaggctcatgtaatacctgcaatgtgcgcgataagacagttgaatcgtgatttccgtcgtacactatccatatccgggcacgcttgcggcgcaatgcgtgtgcagtataggaaggatttcccacatggaaccaaattatctcgtgttattgggaatcgtgatcgtgattgtgggtttcgccctcaaacttgatgcgattctgatcattatcgtggcggctgtggtgactgcgctggtcggcggcattggcgtcgacggcttcctgaccacgttgggtacgtcgttcgtctcgaaccgcagcatggcgattttcatcatcgtgttgctggtcaccggtacattggagcgcaacggtctgaaaaccgcagccgcgcagctgatcggcaaagtgaagaatgcgacgcccggtatggtgatcgccctgtatggtgtgatgcgtctcgtgttcgccgcgttcaacgtgagttttggtggcgtggccgggttcgtgcgtccggtcatcatgccgatggcggtgggtgcgattgcagcgtccggtcacgagccgaacgacgagtatgtggaagagctcaagggcatggcttccggcatggagaacgtcgcatggttctttggccaggtgctgttcgtgggtacggccggtgcgctgctcgtacagtccacgttgaagccgctgggttatgacgtcgaactgttgcgcatggccattatcgagattcctgtcgcggtgattgccgtggcggtcaccgccgtctattacatcatcaaggacacacgactgcgcaagaagtactacggtgccgaagccgccgctcaggccgccaccgctaccaccaccggcaaggaggcctgatatgtcgttcttcatggaccccagcgtgaccgttggcacgaaaatcctcgagttcttctatattttcatgggtttcatgtccgtgtatgcgggcgtacgcaacctactcgataaaaccaacaaggcccgctacggcactttcgtgttctggacggcgctcggtatcgtcatcgcgttcggccgttggattccggccattgcggacggcgtgctcattatcatcatggtcattcccgccatcttccgccaagtgcgtaagggctcggcatccgattcgagcgctcccagcaccgccgaagtggccgcgaacttccagcgcatcggcatgcgcatcttcattcccgccctgtgtctgggcgtgttcgccattatcggcgccctgattcccagcgtcagcgccctgaccggctgctgcatcggtgtgatgattgccgccgtgattctgttcgcgttctcgcatgacaacaagccggtcgtattcctcaacgattcggaacgcctgttgtctgccatgggtgcgctctgcatgctgccgatgctgctggccagtctcggcgcgattttcacagccgcaggtgtcggcgacgtgatcgccacgctggtcggcggcattattccgaagggcaacgtcacgctgggcatcatcgtattcggtgtgggcatgatgctgttcacgatgatcatgggcaatgccttcgccgcgattaccgtaatgaccgtgggcattggcgcgccattcgtgctcgccttcggtgcggacccggcggtgattggcattctggcgctgacctgtggctactgcggcacgctgtgcacgccgatggccgccaacttcaacatcgtgcccgtcgcgatgctcgatatgaaggaccgcatgggcgtgattaagaagcaggtgctgcccgcattggtgatgattgtggtgcagatcgtctatatgctgatcgcgcaataacctcgttgtccaaataccacaacaatccgtgaaataaggagctaatgatgagcaagattctggtgaccggattcgatccgttcggcggcgagccggttaaccccgcattcgaggcagtcaagctgttgccggatgaaatcgccggtgcgacagtggtgaaactggagattccgacggtgttcacgcgcagtgcgaccgtggttgaggaagccatggtgcgcgagcagcctgactatgtgctgtgcattggtcaggctggtggccgttcggctctgaccgtggagaaagtggccattaatttggccgaggcgcgtattcccgataatgatggcgagcagccgttcgatacgccgttgcgtgaggacggcgacaccgcgtatttcgccacgttgccggtcaaggccatggtcaggaacatcaatgaccacgggattcccgcattcatgtcgtatacggcaggcacgtatgtgtgcaacagcatcatgtataacgtgttgtatctgattgaccgcaaattccccggcgtcaagggcggcttcattcatgtgccgtatgcgaccgcgcagggcgtgggcaagccgaacggcacgccgaccatggaaatcgcgaccatggcgcgcggcatcgaagccgccatcgaggccgctgtgggcaccggaaccgacgccaccgacatcatgggcgcaacccactgacatacagacagcgatgcccccactgacaacttctgtcagcgggggcatcgctatgcgttgaacgttacagttcgcgcagctgggcggcgatctggatggattcgacgctggcctcggccttgttgcgcgtctcctgccattcggtagcgggcacggagtcgagcacaatgccggcaccggcctgcacgctcgcctcatggtcgcgcaggaacgcggtgcggatggcgatggccatgtccatgttgccagagagatcgaagtagccgacggtgccgccgtagatgccgcggtcggccggttccaactcgtcgatgatttcgactgcgcgcggctttggcgcgccggaaagcgtgccggccgggaacgcggacttgaacacatcgaatgcggtcagcgaggggtcgaccttgccggtgaccgtcgagcagatgtgcatgatgtggctgaaacgcttgatgtccatgagctgcacgacttccacagactgcggcacgcacaccttgctcaggtcgttgcgggacaggtcgacgagcatgatgtgctcgctgcgttccttcggatcggcaagcaattccttggcgaatttctcgtcttcctcaggggtggcgccgcgagggcgggatccggcaatcgggaaggtcatcgcgtggccgttgtccaccttgatgagggtttccgggctggagccgatcacgttgaagtcgcggccctgagcatcggtcaacgccatgaaatacatgtacgggctcgggttcagcgtgcgcaacacacggtacacgtcgaacgggtcggcaggcgaatcgatgtcgagacgctgggagatgaccacctggaacacgtcgccgtcgacgatgtgctgcttggcgcgttcgacggcctgctcgtagtggcttttctcggtgcggaagcgcagctcaggctgggcgaccgtttcgtccaagatgttgacgcgggactcgcccggagccggggtggcggcatcgtgctgcatctggtcgagtcgagcgacggcctcgttgtaggcgacgtcggcgcgggtggatttatcatccacgttcaccgcgttggcgatgagccacaccgaaccggatacgtggtcgaccacggcgatatcggtggccagggcgagcacggtctcaggctggccggtctcgtccggagcttcggcgcgcagggtcggttcccagtggcggatggcatcccagccgaccgtgccgaccagaccgctggtcaggttcggcaggccttccacatgcggggccttcagagtcttcaacgtggcgtgagcgacttcgaccacgtcaccggtgactggcacaccaaccgggaccttgcccagccagtcggcctgaccgttgttggagcgcagctgggccatcgagttgacgccgatgaagctgtaacggctccacgtgccgccgtattccgccgattcgaggatgaaggtgccggatcggccgccggcgagacgctcgtagaagccgaccggggtgagcgagtcggcgagcagacggcgcacgatcggaatcacacggtagccggcgtcggccagttcgtggaactgttcgcgactgggccaggtggcgccccacttcaggtgtttgacgctgcattcgctcatattcgctcctttacttacaactcgatgtcttgtttcgtagtacgcggtcgttcggcttcccccagtcagggaagcccgttctactgctcggccgggcgatggccttcgaccacggacagggggccgccttcgaggaagcagctgcgcttgccggtgtggcaggcggcaccgacttggtctacttcgacgagcagtgcgtctccgtcgcaatccagggacacgcccttgacgtattgcacatggccggaggtatcacccttgcgccagtattcctgacgggaccgggaccagaaggtcacgcggccggtggtcagcgtgcggcgtaatgcctcgtcgttcatgtagccgaccatcagcacctcgtgtgtgtcgtactgctggatgacggcagcgaccaggcccttggcgtcacgcttcaggcgtgcggcaatacggggatcgagttcagtggaattgtcgtatgtagtgtctgtcatacctatcttccttatgtggaccaccctcagtcagcttcgctgacagctcccggattatgtgcgacatgtgcatagcgcactgctacgaacaatccactggattgttcgtccagcgggagcaaggtgtattcgtttagcgaacggtgtagccgtgcttcttgagttccgccttgacatcggcgatggtcaggatgccgtaatggaatacggatgcggccagcaccgcgtcggcacctgcttcgatggcgggcgggaagtcctcgaccttgccggcaccgccggaggcgatgatcggaatcttgacttccttgcgcacggcgcgaatcatctcgagatcaaagccttccttggtaccgtcggcgtccatcgagttaagcagaatctcgccggcgccaagctgctcggcgcgcttgacccaccagatggcatcaatgccggtggatttgcggccgcccatcgtggtgacctcgaagccggattgcgtgtgttgctcgcccttttcgcggcgggcgtccacggagagcaccagcacctggttgccgaaacggtcggccacgcggctgataagcgacgggtcattgatggccgccgtgttgacaccgaccttgtctgcaccgcagcgcagcagcgagtcgacgtcctcgggcgtgcgtacgccgccgcccacggtcatcggaatgaacacctgttcggcggtgcgggagaccacgtcaatcatcgtgttgcggtgggagctggatgcggtcacatccaggaaggtgatctcgtcggcgccctgacgatagtattcggccgccagctccaccgggtcgcccgcatccttgaggttttcgaaatgcacacccttcaccacgcgaccggcgtcaacgtccaggcacgggatgactcgtaccgccaacgacatgcttcactcccctgttcggctttgcattacagtccttcagactacctaccgcccgttacatgcgccgcacccgtttctggaatatgagaatccgagctgacgcgcccgctgcgcgatctcaagaccgccgcgccctgccgttatatcgccgccgatatcgagaacgcgggcggccattacgtcgacgagcagctgcacgtggacgacgccaacggcttcaagctcatcacgtcccgcaagcccgctgatttggactacttcgtggacgcaatcaaggatgcgctgaagtaactaccgctccttagcggccaactgcccgcaggcaccgtcaatgtcctggccgcgggtgtcacgcagtgtggcggtgatgcccgcgcggtgcaggatctccaggaaccgctgttcgtctcccggcttggaggcggtccacttcgagccctcgatggggttgagcggaatcgggttgacgtgggcccagttgtcgccgtaatggttaagcctcttggccagcaactgcgcatgctcggcctggtcgttgatgccgcgcatcagcgcgtattcgatactgacgcggcgcttggaggccagccaataatcgtgcgcggcatccaacacctgcgtggtgttgaaacgcttgttcatcggcaccagctcgtcacgcagttcgtcgctgggggcatgcagggaaacggccagacgcacgggaatgccttcggcagtgagcttcttgatgccgggcaccacgcccaccgtggatacggtgatgttgcgcgcggaaatgccgaagccttcgggaggcatggcggaaatctgtcgtacggcggacagcacggagttgtagttgcccatcggctcgcccatgcccatgaacacgatgttgctcaggcggccctctcccccggccacttcgccgtcacgcatcattttggcggccacacgcacctgttcgattatttcaccggtggacatgttacgggtcaggccaagcttgccggtggcgcagaacgggcagcccatgccgcagccgacctgcgaggaaatgcacagcgtggtgcgggtcgggtatcgcataagcaccgattcgatgagggagccgtcgaacagcttccacaaggtcttgatggtggtgccttcgtccgccacttggcgggtcacctcggtgatgagctgcgggaagaacgcggcggcggcctcgctgcgcttggctgccggaaaatcagtgaattcagcggcattcacatcgaaatggccaaagtaatggttggcgagctgcttgactcggaacttcggcaatccgagttcggccgctttctcgatgcgctgctcgggcgtcatatccacaaagtgcagcggcggcttgccacggcgggcatggtccttggatagcacgtcacggaaggcacctgatgtgccgccgggagtaatgccggtttccggagtgtcaggatgctgtgtggtcatgatgggttcgcttcgctctcaataacagaaaatagtcaaacatgcaatagaaatatcagaatccaccatacggcgtgccgcatacgaatcagatggctcatgtcttagcccatggcgaacgcatattgaacgatgatttcccccatatatgacatgtggcaccgtgcgatatacacacgatgccacattgttcatgcacgaggcatgcgaatcacagtccggtgacccacagcaaggcgcaggtgaacggtgcactcatcaaaatggaatccacacgatccatcacaccgccgtgtcccttgagcagatggcccatgtctttgatgccgatatcgcgcttgagcatggaagcacacaaatcaccgaacgtgcccacggcgccgatgagaatacccgccacgatcggcacccaccaacgagtggcccatttcgaggcatcatacgtgcatgcgaatacggcgaatgcgccagccatggcgaagagcatcgagccgatcaggccctcaacggacttcttcggcgagatacgcgggctgagcttgtgcttgccgagccaggcaccggcaaacaaaccacccgtatcggagagggcgggcaggaacaccagcatgatggcgtgtgcaatcggatgcccattgaaagtcagcgagatgatgatgcagctggccagcaacggaatgtacaacacggtaagcacggacacagccacatggctgagccgggaatgatgctgttccccgccctcatgattgaacgaggattcgaggcgcgcgctggcatccgtgttggacagtttgccggcaaccgccagagataggcggttgccgacgctgatttttgcgctggccgcgatggcgaccagaataatcgacacgatgatactcagcgacatcgtgatgagatggtacggggaataataggtggcgatgagggtgaaggacgcgcacagccacagcatgaacaccgggatgtgcaggcctacggtggcgaagtccaccctgagctcccacagcgccagaatcatgaacacgactaccagcagcacgaagaggtcgacgctgagcagcaggcacgcgacaataaggatgaccagtgccgcgcctgtggcgatggcctgcggcatgttgcggccggtcttcttgttgatctggtcgagcgtctcctcggcctcttcatggagttgttcgttgcgttccataattctccggacctggtctgaatcagacctccatgatctccttctgcttggtctccagcagagtatcgatctcgtcggtaacggacttggtgaccttgtcaagatccttcagcaggcgatcgccttcgtcctcacccatctcgccgtccttgacggccttgtcgatggtttccttggtcttacggcgaatgttgcgcacggcgaccttgccgtcctcggccttgcccttggcgagcttgacatactccttacgacggtcctcggtgagttccggcatggtcaggcggatgacgttgccatcacggttcgggctgatgccgaggtcggagttgcgcagggccttttcgacggcaccggcctgggaagcgtcaaacggggtgacggacagggtgcgcggttcgggaacgccgatggaggcgacggccttaatcggggtgggggcaccatagtagtccacggtgatgccgttgagcagggccgggtttgcgcgaccggtgcggatgccggagaagttttccttggtgttttccacggtcctggccatctgttccttggcctggtcgataagagacatattcactccttgtgtgttggtgttcgtctgtgttgttcgtctatgaacgtttgattcgattgtaggcgtttgcggcttactcggccacgcgcgattcggcggtggagaccagcgtaccgatttcatcgccgacgagggcgcgggtcacgttgcccggctcttcgaggccgaagacgcggatgcgcttcttgttgtcgcgggccatggacagtgcggaggcgtccatgactgccagattgtccacgagggcgcgattgtagctcagggtttcaaaacgcttggcgttctcgtccctgcgcgggtcggcggtgtagacgccgtcgacgccgttcttacccataagcacttcgtcgcagtggatttcgagggaacgctggatggaaaccgtgtcggtggagaagtacggcatgccggcaccggcgccgaaaatcaccacgcgacccttttcaaggtgacggatggccttgagcggaatatacggctcggcgacctgtcccatggtgatggcggtctgcacgcgggtggcctgaccctcctgctccaggaagtcctgcagggcgaggcagttcatcaccgtgccgagcatacccatgtagtcgccgcgggaacgatcgataccggcctgctgcagttcggcaccgcggaagaagttgccgccgccgaccacgatggccacctgcacaccctgttgtacggccggaacgatttcctcggcaatgcgacgaatcacatgggtatcgatgccgaccttgccaccaccgaatgcttcgccggacaacttgagcagaactctgcgcggcttgtcgctatcagtcatatcatgcctttctcaaaaccgaaagtgcgaaattatccgtagacaagcgtatcggtttacgacgacaccccctagcaacgacacccttggaatagcgaaacgccatccgattattgaataaccggatggcgtttcgctgaaattacgctaagcgcgtggagtaagccttaggctcactcctcttcgcccttgccgacctcgacacgagcgaatgcggtggcgttgccaccgacttccttgaacaggtcgccgacggtcttggacgggtccttgacgaacggctgctcgagcagcacgacttccttgaagaaagcgttgagacggccttcgacgatcttcggaacgatcttctccggcttgccctcggccagggacttctcggtggccacgcgacgctcggactcgaccacatcggccggaacgtcctcgcgggtcagccacttagcgcccatggcggagatctgcagagcagcttcgtgagccacggcggcgccggccttgtcggtggcgatcatggcgacgatgctcggcggcatctcggcggacttcttgtgagcgtagacttcgacgtgctcgccggagatcttggcgaactggccgaccttgacgtgctcaccgaacagggcggcggcctcctcgacagccagcttgacggtggtgtcgccagccttggcctcgagcagctcgtcagcggagttggcgtcggcgtccacggcgtagccgagaacttcctcggtgaactcgacgaacttcggggtcttggccacgaagtcggtctcggagttcagctcgacggcgtagccggtctcgccattggcggtctcgacgaccttggaggcgatggtgccttcctgagccttgcggccttcacgcttgccggctgcggcgatacccttggctcggatgatttccttggcgcgggcgacgtcgccttcggcttcggtcagagccttcttgacgtcgagcatgccggcgccggtgtcttcacgaacctgcttgatcagtgcggcggtaattgctgccattgattattctccttgagaaattttgcttacccatgaacgatgggaagcgcttattcaggcacttcccatcgtagagcatcactcggccttgggggcctcggcggtttcgccctcggcggcagccggagcggcggcttcagcggaagcctcggcaggagcctcgttggtcaggagttccttctcccaagcggccatcggctgctcggcggcttcgccctcggccttgttggcgccggagcgctccagcagaccttcggcgacggcgtcagccatcaggctggtcagcagttcgatgccgcggatggcgtcatcgttggccgggatcgggtactcaacggtgtccggatcggcgttggtgtcgacgatggcgacaaccgggatacccagcttgtgagcttcctcaacagccaaggcctccttggtgatgtcgacgacgaacatcgcagacggggtgcggttcatgttgcggataccgcccagctgcctgttgagcttgtccttctcgcgctcgagcaggaggagctccttcttggtcaggccggagccgtgcacgtcggtgaagtccatttcctcaagttccttgaggcggttgacgcgcttggagacggtctggaagttggtcagcatgccgccgagccaacgctcggagacgtagggcatgttcacgcgggtggcctggttggcgatagcttcctgagcctgcttcttggtgccgacgaagagcacggtgccgttgtgggccacggtggtcttgatgaagtcgtacgccttgtcgatcatgtcgagcgacttgaacaggttgatgatgtggatgccgttgcgctgggtgaggatgaactgcttcatcttcgggttccaacgacgggtctggtggccgaagtgcaggccagccttcagcatatcgctcatagtgatctgagccatggtattactacctttcattgtcggttcttgcctggccatgcgcacctgcgtgcagctgctcccccggtttcacgagttgtgcagccgaccgacacaggccgtcgcgagcatgacgcgaatttgttgtgtgccggttgacaatattgggtggttccggacgccagcgactgcgtccgttgccgggtggcacacaagtttcaaggatagcacggagccagtactaagaaaaacaggctcccctctctgaggggagcctgtcgccgtaggcgactgaggggagttacgggcggtaccggcagaaccaccctcagtctcactacgttcggcggctcccgccagcgggagccgggtatggactacttcgcctgacgattgcgcatgtagcgcagggcttcgcggcgttcttccttttccaggcgatccaaatacacgtggccgtcgagatggtcgcattcgtgctgaagcatacggcccatcagcccggagccctcgagcacgacctcgttgccgtccaggtcgatgccacgcacgcgagcgtagtcggcccgacgggtcttgtaccacaagccgggcacggacagacaaccttcatcgccatactgctcgccggacttctcctcgagtacggggttcagaacgtagccgaccttgccgtcgatgttgtaggagaaggccctcaggctcacgccgatctggttggcggacaggcccgctcggcccggatcgtccacggtttccatcaggtcgtcaaccaggcggcgcacggccggggtgatttccttgatctcatcgcagggggtgcgcaggactgggtcgggcacgaccctgatctcacggatggccacttctcgttactcctcgttcttctcgtcagccggccggtccggcttgctgccggtgtcagcggcattgtcggcattgtcggcggaatcgccggtctcgccctcttcgggttcggccttcgacttcttgatcttctccgacacgctagcaatcgaatcagacacgctggttttcatctgttccgaggcctgtttgacctgttcggacgcctgcttgaccgattcggaggatttcttgacggtctccagcgtgctgtcgatgatcttggctgtggcgggcagcggtttgttggatggcttgggcgcatacagatcctcttcgatgacggtggcgtagcgctgcaataccttgggacgcaccactttcatgctcggggtgagcgtgccgtgctcctgactgaattcctcatccagcaccgcgaatttgcgcacggactcagcgcgggagacattggcgttggcctggtcgatgtactgctggataaaggcacgcaccgcgtcgttgtcgctggcctcggcgagtgtcatgtcggcattgaggccctgaccttccagccaggaatgcagcatttcggggtcgagctcaataagtgcggacacgaacggcttgccgtcgccgactactactgcatgagccacgatcgggcaggtgtcgatgacatcctccatcggggcggggctgatgttcttgccgccggcggtgatgatgatgtccttcttgcgtccggtaatgaaggtgaagccgcggtcgtcgatacgacccagatcgccggttttgatccagccgtcggcagtcatcgtctgtgcggtgagttcgggctgcttgtagtagccaaggaacacgttcgggccggtcagctcaatttcatcgtcttcgccaagacgcacgcccatgccaggcccaggcttgccgaccgaaccgacctcgttgtcgtcctcccaattgacgagcatcggagcggcggtttcggtcatgccataaccctggatgaaggtgatgtcatccatgccgttgaagaagtgggccaaatccacgttgagcggcgcaccaccgcaggccagccatttgaggttcggtccgagagcggaacgaatggatttgcccaccgtggccatgtagaacgaatggcgcatgcgctcgatgaacgaatggccgcggccggcctgctcatccttgctccacttgacgaagtgcttgaccgactgggcgaagatatgcccctggatgccggcaccagccttctgcgaggccgcgttatacaccttctcgaacacacgtggcacgcccagcaggtaggtgggcttgaagctgcggatatcggcgagcagtcgcttggcgtcgggaatgtatccgaccacgccgcagccaccgatgcacacgtactggatgtagcgggcgaagcagtgcgccagtggcaggaacagcagcagacggttgtcgtcgtacagcatgccacgcagaatctcgtagccgttaagcacgatgtgcgtgtaattgcggttggagagcatcgcgcccttgggcttgccggtggaaccggaggtgtagaccacggtaagcagatcatcggctttgatacgagcgatagccgcatccaacgtctcatcggatacgccatgcccgaagtcagcgacagcgtcaaggccatcggccttgaaattgaacacgtatttcatgcccggatgattgacacggatctgctcaagcgtctgtgcgcgctggaagtcgccggcaaaggcgatggcgggatcgacttcctcgacgatgcccgcggtctgacgggcggaatcggtctcatagacgggcacaaccacagcgccgattgccgcgcaagcgaaatcagccacaccccactcatagcaggtaggcgagtaaatcagcaccatggtgccggctttgacgccaagtcccaacaggcccttggccacctcgcgtacgcgggacagcatttcagtagctgtggcgccgcgccattggtgggtgttgtcatcctgccattccgcgatgatgtcatccggcgtgcgagctgctcgtttggccagcagcgagtagacggtgtcgtcatcggtggtgacatatctgggttcttctacatgttcacgcatggtcactactataggcgaaccagcctatgacacggcagaaccgtcttccgctgccagcgtaggaatcggtgtgcgggcggggccgtctggtcagcccagatcggcatagatgcacatccatcgagaaccgatgaacttcagtttgaggttgactcgcagattttcctggccgatggtcatgaataccgccatttccagcgtgtccttgccggtgatcatgccgtcgatcaatgtggggacagtgggcagatagcagaatttcgctttgagctccggatgagtgaccatgtgggtgccgagcaggtattgcatggtttgcagccgttccaggcatggttttgtcatggctctgttgagatgtgcgacgctgagtctgccacgtatcgcgtccgccgatgtgcaggcgatgcggcatgcagccatggccatggaatgacattccttcgcattcagcccgcctatgaatgtgggttggatatgataccgcaccgggcgatccgacagctccacaacgatgaatccgtcataactcggcaacggcccgtactgatatgtgccgtggaaaaatcccgaatactccatgatgaccccttcaagcccccttgcaactcaccatcatcggcgagcgtttgtactacaacatcacgaaaggcgcgccaagtcaaacgacttgagcgcgccttagggcaagctaagcctcctgcatggagggcaaacccccattttcaggggggggtaatcgggattatcgtgcggaatacgggttgaccaccatgccgcaacgctggaagttcttcacgtcgacgtagccggtggaggccatcgcgcgcttgagggcgccgatgaagttggtcttgccgtccgcctggtggctcggtccgaacagcacctgttcgagcgggccgaccgtgccgaccgtggtgcggtagccgcgcggcagcgtctggtggcgggcttcggaaccccagtgggtgcccttgccgggggcctcggtggcgcgggccagcggcgcgccgagcatgaccgcgtcggcgccgagggccagggccttgacgaagctgccggagtcgcccatgccgccgtcggcgatgacctgcacgtagcggccgccggattcgtccatgtagtcgcggcgggcctcggccacgtcggcgatggcggtggccatcggggcctgcacgccgatggtctggcgggtggcggagaccgcgccgccgccgaagccgacgagcacgccggccgcgccggtgcgcatcaggtgcagggcggcggtgtagttggatgcgccgccgacgatgacgggcacgtcaaggtcgtagatgaacttcttgaggttcagcggttcctggccagaggagacgtgctcggcggagaccacagtgccgcggatcacgaacaggtccacgcccgcgtccaccacggtggagtagaactgctgggtgcgctgcggggagagcgcgccggccacggtgacaccggcggcgcgaatctcgcgcagacgctgcgcgatgagctccggcttgaccggctcggcatagatctgctggatacgctcggtggcctgatcggccggcagcccggcgatttcgtccaacagcggggtcgggtcctcgtaacgggtccacagaccttccaaatcgagcacgccgagcgcgcccatcttgcccatggcgatggcggtggccgggctggtcaccgaatccatgggggcgccgatcaccggcacatcgaactcataggcgtcgatctgccaagaggtggagacgtcctcggggtcgcgggtgcgacgggaggggacgatcgccacatcgtcgagtgcgtagccgagacggccctttttgcccaaaccgatttcaatttcctgagacatggttgtaagcctattgcccgggtgggacgccaacaaggtcgtttcccacggaccggacgattgcttcaagtcgttacaaacatgcgctatgactaaatcatcttcacaccatctatcaggaggaagcatggccaaaatcaaggtcgaaggcactgtcgtcgaactcgacggcgacgagatgacccgcgtgatctggaaggacatcaaggatcgcctgatcctgccgtacctcgacgtgaacctcgactactacgatctgggcatcgagcaccgcgacgagaccgatgaccaggtgaccatcgacgccgcccacgccatccagaagcaccatgtcggcgtcaagtgcgccaccatcacccccgatgaggcccgagtcaaggaattcggtctcaagaagatgtggaagtcccccaacggcaccattcgcaacatcctgggcggcacgatcttccgcgagcctatcgtgatgagcaacgtgcctcgtctggtgcccggctggaccaagccgatcgtcgtggcccgtcacgcattcggcgaccagtacaaggccaccgatttcaaggttccgggcgccggccagctgaccgtcaccttcactccggacgatggctccgagccgattcagcacgtggtctacaactacggcgaagacggcggcgtggcccaggtgcagtacaacgtcaacgattcgatccgcggtttcgctcgtgcctgcttcaactacggcctgatgcgtcattacccggtgtacctgtccaccaagaacacgattttgaaggcctacgacggccaattcaaggacatcttcgctgaggtgttcgagaccgaatacaaggacaagtacgccgaggccggcctgacttacgagcaccgcctgatcgacgacatggtggccagctccctgaagtggcacggcggttacatctgggcctgcaagaactacgatggcgatgtgcagtccgactccgtggcccagggcttcggttcgctgggcctcatgacctccgtgctcatgaccccggacggccagaccgtcgaggccgaagcggcgcacggcaccgtgacccgtcactaccgccgctggaagaagggcgagaagacctccaccaacccgatcgcctccatcttcgcgtggaccggcggcctcaagcaccgcgccgatctggacggcacgcccgaagtccgtcacttcgccgagacgctggaaaaggtcatcgtcgacaccgttgaaggtggtcagatgaccaaggatctggccatgctcatcggcccggacgaaccgtggctcgacaccgacggcttcatgaacgcgctggacgagaacctggccaaggctctggccgagtaaatcatcgaacacatcgtgcggacctacatgggtcatgtcatgtcgccaactgtcatgattgtcgtgcttcatctggaatgttcctcagcacgacaatcatgacagttgttcgatacacgcgcgaaatacccctaattgttcccggatatgtggcgatttgtccactggtccgggactttttcgtatacggcctactagaatcgtgattcagtttgttttcacgcccgcttgaggaggtttcgccgcttatggtgttcgcacgccgctcaaccaccctgctcgccgccattgtcgcatcctgcgcgatggtgctgtcactgaccgcgtgcacctcagacaataagaccgttgtagatggtcaaaccacggtgacgtccaattctgccggcggcgtggccgtgttcacgccttcggacggcattacgctgaatcagcagacgccactgaacaaatgggcgaagctggtgcccgacctaaccaaggccctggtcgacgccggtttcaagaaaggcgatatcgatcatacgacgtccgactcgttggacaagcaaagccgcgccatccaagactttgtggtcgatcatctttcgaataacaccacggacgattccggcattgccatcgcgcccgacaacatgacattgctcgtggctccagtagtcgaggccgacgcttccactcgccaatacggcgattacgtcagccagaacctgagcaccaacgatgccacggatgagggagctacttctgacggtgattcttccgaagacagctcttccaaagatgactcgtccaacactgagagcgacggcactgcatcggacgagcaggcgcaggccgtggaccggctggtctcatcgctcaagctggccaaggaatccggcatgcatgtggtattgctcggcaacagcatcgaggggtataggccggacgccttcgtcaagttctcggacgcccagaccatcggcaagctacaggcggaaaagatggtgtccaaactcaagttggataaggccagtaaagacaaccccaaatacattgaggtgctgctgccatacaccgccgtggacgaaaaaggcaacgccaacgattccacgttcgcccaagaggcgttccgtggtatctggcaggtactgggctcctactatcagaagggcgttgtggaaagcccttcaggcaccttggacggcaaatccacggaaaacgattggcaagccgtggcctacgatgccgccaaggaaggctccactgcgaaagtgcttgacaagcgtctggcaaaaaccgacgggcagtccacactcacccgtattgacggtatcatcacgatgaacgactatatcgcctccgaggtcgtcaaggaattggacgatctgagatacaccggctctgccgccgatatcaatccgcagatcaccatctcgggcattgtcggcaatatcaccggcaagagggatctcagccgcgacgcagtgccggacccgatcaaatcccctgaaaacgacaacgcaaacgactcatccagttccgatgacgatgcggataaggacacctccgcttccgacaaggaccgtgactcgcaatggcctctggtgaccggatacggcgcgtacgtctcgaacatcccatccatcgtcaatggcaagcaatggatgaccggcatggaagacagacagaccatcgccacggatatcgctcaggcctgcgccaagctcaacaagaacgaagcgctgaattccatgccttcaatcaggaactccgaggtaggcggcgtgaagaagatcccgaccatcaacgaaccgttgctggctgtcagcgccagcaatctcaagtccgcgctgatcgcccccggatatatctccttggccgatgccggtctgtgattcatactcgtcacgccgctagccgcctgcgatgcctcttccgtacggccctgttccggccgacaaacattgctgaatcatgacggcttcagtacgatttttcgactccccgcatattgctgtgggtcaagatagtcggccgttcctcgcttgaggccccaatgcaggcaacggtcttcgcaatggtccgagttgccctcaacgatgcctacgggctgtctgcgggagatcgtatcccccaccgagagctcggtaacagccggttcgaatgtcgacgtgacacctccacgatgccgtacactcaccgcatctttgccagctactttgccagcaaaactcacggtccctgcctgtggtgacagaatcacggtaccttgctccgcagcaagatccacgccacgatgacctggtgcccacgggttgatcggccgctcgaactgttgttcgacctgtggatcgtcgaccggccagtcgaaccggggttcgcactgattgccattgcgccatgccaaatcagacatatcggtgaaatcctccaccgtgtatgccgcatctccggtcaccgcagtatccgcatgcgcaacatgctgaggcgtggatgccagtcccactcccaaggcaagcagcaggccgataacggtggccaacgcgattatggcatccatacgccgttgccgttcctgagcccgctgacgcgcctgctgacgccgcctgctggcacgtcgggcttcgtcgcgacgccaatcaaacaacagtggtgcattcatgagattcctccccatagtgtgagtgtgatgcgattccggcttctttgccggtgatacccaccttgaggggtccgaaacaggatgtccagccagaacgacctatgtggttccagcttccgaagttatccacaatgaaatttcgcgtgacagtatcgccgcatcgtcatcatgttgtatgagtgggtattcgatgagtctgattctgcggaattcagcgcgacatgccatacacgcatgtaatttgctttttcgtggcaagcatgtaagatgtgtgacttgtgcgcgagagaaatctcaaacacagcagacattcctgcgtagctcagttggcagagcatccgactgttaatcggacggtcactggttcaagcccagtcgcaggagctcacctgaagccatcggcgtgtcgccggtggcttttctgttactcattccctgaagctacttcattcacgtgagaaaataccggtcggcggtaccacgatgcgcgccgatcgccattcaaacgaggacagtcatggaccgtcacgggttcgcccgctacgagcccttcacgattcagaaaccctacattattctacggaatctgtcacttctgcagattcggcattccggccttataccagagcaccgcgataccaacacgttctttgacatcgagcttggcaagagacctactaaccgcctttttgactgcctccagttgcattccgagacgctgagcaatttcagcgttagtcattccttcgctgaccagtgctgagacttcgaattcgcgaggtcccaatgaatcgaatttacttctgatggccagaatgtcagcattgatgctgacgttgggaacccctcggcgaatcacttcctttgtaatccgtggtgtgagtatggcgtctccatcgtacaccgagtgaatggcccgacacaggtctttagtcttaacgtccttaagcaagaatcccgaagctccggcgctcaatcccccaaacgcatagctatcctgatcgtatgtggttaaaatcaggatacgtattgaaggatataactgtttgattcttgccgtggcatcgagcccatccataacaggcatgcgaacatccataagaatgacgtcagggaggctctgcccatgtaattgcagtgccgcaagaatatcaagggcatcctgtccattccccgcctgcaacgtcatgcgaagcgcaggatctttcatgaccatgagcgaaaaacccattctggtcggctgctgatcgtccacgatcattacgttaatcatcgtttccctcctgcacaggaatatatggacgtttttgctgtggaataatggctgaaacagtccacccctgccctgatgatgagccatagtgaaggtgcccgccgacccgcgtaacttcagtcactaggccagcaagcccgaaaccggtccccttagcgcggttatctttgttcagcgttggcttaccatcatcacgcactgttatatggagttccccattatccagatgatcccatgaaaccacaattcgcgttatatttttcccatggcgcattgtgtttgtgacagcctcacgactcactcggaagcataaatcagcttgggctagatcgtctggacgccttcctgtctcggtcagaatggcggcgattccaatatcacgagcatgttgaagaatcgggtttatatcattccagctgcacagttccaccgttcctgtttttgttttccgtaacgtcaccggagatgaaagtttccgtaccgcctcgcgtgtatcacctagactttgccgagctaagttattgatactctttatagcgctttccaccggctcctgtgtcaatccctccaagccttcagtaagtgcaatgatagcggtgagattatggcccacgctgtcatgcagttcggctgcgacgtccgcccgccgacgttcttcatcgcgttcctgttccaattccaggcttcgttgctgttgagcttccaccaaggccgctcccttccgccgctgactgatgttgcgcgaccaaagagctaaaatagcggtcatcgacgcaaggagggactcgggcagaagtatatcagtctgcaaggcggggaaggtcgcaatccagaggccgcaaacgattgacaatcccgacaaaaccattcccgcaatggcacgttcagcggtcgcggccaaggctgtagacgtgtagacggcaaacaagagaggcaacatcagatatggctccgcttgaatcaagcaagcgcatagatacaatccgcatatggcacacaaaatagcgaacggcattctgatacggaacgacagcgccacaacagataaggcacataggatggcgagtacggggattccccattgatgctccaacagtttcatggctgccgaatcgcccccgccatgggtgaatacgattctggtgagcatcatcacgtcgtagcataggcacagtatcggcgcgaccatgcgcgcgaccgggctggaccgccagaacgcggccacgtggccgatcaggccggtaaccgcgtggcgcttgtcgtttccggtttttgcggtcatgcgattctccttccctgggtgctgccccatccgtgttgaagcgtatcgcatgtggcctgtgctgtatggcgtgtatgcggttagatgaacttccaaagaagttttccgttgtcagtcggattcctactggttgatgaacatgaggaagatgagcatgccgccggcggcagtcaggcctgcggataggagtatcgcgattgtactgacgattctgtgtcctcccgcctgttcgggataggtgacgatcgcgatgacgagcgaagcgatgaggcatacgaagtcgatgatgacgaggatgttcctgacccagcccgtcgtgtagaggtggatgccgagcagctggggcacgagcgtgcacagaaggggaaggacggccaatgcgaggctggcgcagccgccccatgtccgcccgccgtccggcggtgccggcgtatatgccggttgctggtttgggtattgggatgtgtttgccatggtcattgctccttggatgtgaggttcacggtgccggtgaattggtcgccggtgacgtagatgtagaagctggtgcctgtgacgttgtaggtctggtcgattttgccgttcgtggcgggcacgggtcgtttcgtgtcgctgccgttggtcacgaggattctgccggtgccgaatgtgcctgtgatggtgccgttcaggtggatgctggccttcttgccggtgccgccgaatacggcctcctcgccggtgaacttgctgtagtcggccttgtagccgcccgtgtaggagtcgccgtcttgggtgcgtgtgccttggaggttcctgtctccggccacgccgatgccggtcgagcagccggtgaggatgatcgcggcgagggcggcgatcagcacggcgatgacgcggcgcggcaggcgtatggactgttcgctgttgtgtggcgcgttgtgttgttcgtcgtgtcgttcgttgtgttggctggtggtgtgcatgatgaagcctttccatggtgttaggtggcgggctcccgcaggtgaggggagcccgtggacggttgctcagacggcttgtttggcgagccggtggaagatcagggcgctgatggcggtccagatggcggcggcggtcgtggaggcgagcatggatgccgtgctggcgatgttcgcgaggtcgcgggcggcggaggcgctggtgatcagggcgagcggatacggcccggcgatggccggggcggccaggctcagcgcgcatccgccgatggtcaggaccatcatcacgctcatcgtgcccgcgaacgattcggccttcgcgctcacggcctgcgtgagcgtcatgatcgcccataccgacagggtcagcgggataccgcgcagcaggaacgggccgagctgcgcgaggtcgaatccggcggcgaagcgtccgacgaggatgaactctgcctcgaacacgaggacggtcagcgccgaagccgcgagcccgtgcagcatcttgccggcgatcgccgcgttcacggtgccggcggcgttcagccgctgccagttgcggcctcgatgctcgttggcttcgacctgcgcggcgaacgcggccacaagcaccggcatgaacaccatgctcggcaggaggatcgcctgaccccagatcgcggcccaggtcacgccctgcctggcgaactccgcctggtagccggtgtactggctccacccgttgaacatgccgattgcgtcgaacaagacggtcacgatccagtaccacaggttgccggccttgcgcgtctcccagcggaacgccgcccacacggacggcctgcggcgtcccgccgcatgcgcgcggggcatcgcggcatggctcgggccggcagctggattggcggccgggttgattgccggattggttgccgggttcactgcgtttgcgtgtgtcatcgtcttgactccttcaccttgaccacgaccatgctgaccagcgtccagccgaggaacgccatggccgcggaggccacggccatccacgggcgcgcggcgagcagcatcgtggcgttgccgcccgcatccacggatctgacgaacgggctcgcggccgaactcaggccggccgggaacagccagccaagcgcgggtctgttcatcgcacccaggccggagcccagcacgccggcgatgacgcccagacccaggccgatggcctgcttgtcgatcatcatcgagaacatcagctggaccgcgctcgtggccgtcgcggacaggaagccggtcagggccggcacccacaccagcgcggcgaacgagccggccaccgtgaagccaagggccttcgccgcgatcggcacccacagcaacgggatcaggaagcaaagccccacgccggtgccggcgacgatgagcttgcccacgaaccgggccgcgtccgactggccgaacgacagccatgtgaggttcatgcgctccgaggtctccagcacggcgatgcggctggtcaacagggccgccagaattggggccagcaggctcacgacctgatagacctcgccatcggccaacgcggccgacctcaacgccgggacggaactgccggcgcgtttcatgaacgccatgcccgcccacgccgaaaccagcagcatcatgcccagcagcatccaccagaacgacgagccccgcaccttcaacaactccagacgcgccagcgtgaacgggctgccggtcttcgcgcgggggcgcggcggacggcgacccgtcgccgcgaacactgccgcgccgctcatcgtgcgcctccgtccgccgccgcgaacgccgcccgacccgcagcctgccggatcggcaacggacgacgcggggatgcgtgcgcggatgcgcgtgcggcgtcggaatccatggcattttgcgcctgatgaggcgtgggctcgcggctctgcgggctttcgatcagttcgaggaacgcctgctccagcgtcttgcgctcggaggcgacgcgatagaccgcgacaccctggccgacgagctgcgtgatcagggtgccgatccgctggtccggcagttccggcaggcgcagcacgccgccatccctgcccggcagccaccggtagtcgatccggtccgagcccagcatcgccgccgcgagcttcgggtcggagacacgcaaatcgatgtgcccctcctcgcgcagactgtcgagcgaaccctgatacaacaggcggccggccgcgatgacgcccacgaccggcgccatcttctcgatctcggaaaggatatgcgagctgatgatcaccgtgatgccccgttcgcggctcagacccatgatcatctcgcgcacctcgaccacggcctccgcgtccagcccgttcgtcggctcgtccagcaacaggagctccggctgcgagatcaacgccatcgcgatgcccagccgctgcttcatccccagcgagtagtccctcgccttcttgccctcatggccggccagaccgacctgccgcaaaatcgcgggcgcggccgaacccggcagattcaggtaatcggccaccatacggcaattatccagaccgctcaaccccgggtagaagctcggcccctcgatcatcgaaccgacccggcccgcctgcaacctgtgccggccacccaccttctcccccaacatccacatatcgccgctcgtggccgaggccaacccaagcaacagcttcatcgtcgtggacttgcccgcaccattcggtcccagcaaaccatacacgccatgcgccggcacgttcagattcaacccgttcaccgcgagaaaatccccataccgcttcaccagcccgcgcgtcagcaccgcactcgacgccggatcagccggctgcgctgtatattgtattgtcattatcgtcctccaaaatccgtcaccataccgtggcctttacaataaaaactcgttacgcgcgatacctcaatgaatgagagcggatgtgtactctcgggaggacattccttctgagtttgcaccgacatgcgacggaggtagggattcgaggctgctgtcaaatttttcctacgtgcgctggtatagggctttcgtccatgtccgtggccgttatccacaggccgtcctgcgtaagcccgtagcgttcgcgcagcatgtcgaacgtgtgcaggccctcgcgcatcgctgcccggtattcgtcgtcgtccgccgcgctgttgaggttggcggcgatggcgaacgcttcggatacgaggcgttccatgtcgtgcgtggacagattctccgggtgtctttctcgtccgtcatcgaggaagggcgggcggttctccatcgcggcgcgccattcctggacggcgaggctgcggcttctggcatcgtccgcccagtcgtcgcgcagtcgtttcaatcgcatgtcgtcgccgtacccgttccgcgccttccattcggcccattgacgccattgcccgtactgccagctgacgcgcgtgccggtatcggagcgtgcgagcccgaccagttcggggcgcgatttctccatccgcctgcatgatctctgcgcgttgatccggtcgtggtacgggttgatccacccgtcgtcggcggcgaactgcaccatgatgtgcacgtggtcgttgccgttggcggacagtccgtggcggaccgcgaccggttgcccgacacgatgctgtatttcgagtcgtatgacggtcggaaccatatggccgtcagtgccgcgctcatggaggatgatgacgaggaggcgctgcgcggattcctcgccggggaatgcgggactcagggcgaggagctcgcggatcgggtcacagcggactggcagggtgggcgctatcgcagcgccgtgctcgcgttgcgtgacgcgggggtggatttcacgcttgatacccggctcgatatccgctcctggtcggacgagcccatggaacaggggcttgaagcatccggtctcgatggtgccaaggcgcgtgtggaacaggccatgagattgatcgagcaggccggggaatgcctgcgaagcgccgatgccatcgccttggacattgacccgcattacctcgcggccgctttcacgggcaagaccgtcagcctgtgcgaccagctcgaacaggcgacgaagcagaccgcagcagaaatcgaggaaatgcgtctccaggagccatccatgggatcatcggacggcaacgatgattccatgtcctttttctctgtataggctagaataatcgagtgttaaggaggcctgcaatgtcgaatctggactataaaccgcctgagccgacaaaggcgcaactggagtacgcgcgttacctcagccgtttccaagcgccgcgtggacgccggactcttttcgcccgcaccgaatcggatatcgcggctgctttccgggaagaggcggcgaaccgttcctggaacgccggtgatctcgcctcccgggccggcatcgacccccggtccgccgatgatttgctccagcggggcgaagctccgattgaagcggtgttccccgcagccgatgcgctgggaatagacatagccgcgttgccgttttccagtctcgggagcgcccggtgagggagctgcacgcctggatgggcgattctcctgttggtgtgtttctggaggattccgaggggaatgtttccctcgaatacgccaagggtgtggatatgcccataagcctttccctccctcttgacgggaaatgggcaaggaaagcccctggcaggttcctggagaactttctcccatgtacgacgttttgaccacgaccttctggccttgggtgtccgccgagctgcccatgcgcatcggcggcgtcaccggcgccagggatgtgacgccccgtcattgggagaagctggcattggaaaacgacctcgatcccgagcgggtcgtcggccaggccaggcacatggccggtctggtcctttccaacatcgaggaggcgtactcggatgtggagcctcgtatccgtgaccggatcctcatgctggtggatagtgcgaacacgaaaatcgatccgatctatgattccgtatccatgactgatgatccgatgggcatgttgtccggcctgatgccttccgccgacgagggcagacgcctctgatatcggtgccggtatgcgccgacatgcttctttgcgcatgtcggcgcataccttttttgtctatcctattcttgcggtgctgagtgagtacgtggcgacgccgtttgcgccgacgatttggttcgtgggcatggtcaatctcatgtcggtgcgtgtggtggattccacggcgttgcgcatctcgtcctgcacgagtccgccgggttgcagcgggcgagcccgcgtttcatgccccattggtagaagaccttgacgcagctgcgcactccgcgtctgccttcggtgcccatgccggcaagatagaatatgaggtcgtcttcggtcacgtccgtgatgctcttgttcacgattttggagaaacggacgatctggtaccatcgggttctcaaggtctcttccgtacggcctatggcttccatccagtcgatccacagttcgatggattccttccaatcctcgcgcggctcgacatgctcgcagcttttcctgttcgagttccagtacttcatggcagctccttcgcatagaaaaaggaagtgacgtcttcgtcacttcccagaaaatgctatttgcgattgcatggagcctagccaatgttctcgccgacggctgaagctcttcggaaaaccgggtgcatcgagaagaattgtcgagacacgccgatttgaaggacaagcaaagcaggtgtactctctactcctgttgcaagaagccctacggctgcaagccagaaccgtatatcggacggtcactggttcaagcccagtcgcaggagctcacctgaacgggtaactccggacgggatgaaaattgaatattcctgcgtagctcagttggcagagcatccgactgttaatcggacggtcactggttcaagcccagtcgcaggagctcacttgaacgggtaactccggacgggatgaaaattgaatattcctgcgtagctcagttggcagagcatccgactgttaatcggacggtcactggttcaagcccagtcgcaggagccatcgaaagcctcggttctccgaggcttttttattttcattgcattggtgaccagacacgacaccccatcatcaaccgggaaatccatggcgaagacctcaccactactcacatcaggcagacaggtcactgtcaattcaccgatgagaggcacggtattcccagtatcagtctgggaataccgtgcaaatcttacatcgagaccttggtcaggggcatggcggagtcgatcgggaagtcgggggcgctgggggccacgccggcttcgaccaggttcacgccgagcatggcgaccatggcaccgttgtcggtgcagagcttgatttgcgggatacggacgtcgacgccgtagttctcgccgaattcgagcagtttggcacgcagctgcgagttggcggagaagccgccgcccacgatcagcgtgttggaatcgtactgacggcagccgcgcatggccttacgggctagcacggtggccacggagtcggccagggatgcgcacacgtcgtccaccggaatctcatggccggcggcctgctcgctttccacccaacgggccacggcggtcttgacaccggagaaactgaaatcatacgggtgcgcggcaccggccttgccttgggtcagacccatcggcaccttgatggcgtgcgggtcgccgttttgtccgtggcggtcgatgtgcgggccgcccggatacgggaagccgagcagacgggcgactttgtcgaagcactcccccgccgcgtcatccagcgtggtgcccaccacatcgatcttgcgcggcatgtcctccacatgcagcagcgaggtgtggccgccggagacaatcagagccagcgtgtccttggggaacgggccgaactgcagctgagtgacggcgatgtgcccgatcacatggttgatgccgtaaatcggcttgttcgcagcccaggccagcgccttggcgccggacacgcccacggccaggcaaccggccagtccaggaccggcggacacggcgatggcgtccacatccgccaacgtcatgttcgcgtcggcgagcgccttggacacgcatggcacgaaggcctcagcgtgcgcacgggaggcgatttcggggatcacgccgccgtatcgcgcgtgttcctccatggatgaggccacgacgttggagagcagttcgcggccgcgtacgatggcagccgcggtttcgtcgcaggtggattcaatgcccagtacaaccggttcgctcatcgtgcttctccgttcttctccgtttgcttgccagtgatgtcttcagtgtccgccgatgccgtctgcggggcggcaaagcccacgaccctaggtttcaggtccaagctcatggtgtatgcgtcgatgccttcaggctggtagtagcgtttgcgcaatcccatgcgttcgaatccgaaccggtgatacagggccagcgcagggtcgttatccacacgcacttcgagcagcatgcgcgcggcgccctgacgcttcgcctcgtcgaccagtgcctgaagcaacgcagcggcgatgccttgccgctggtatgccttgcccacgccgatggtcatgagctcggcgtcctcgccgtcgtaccagaagccggcgtagccgcgaacaacagtctgttccgtctcgccaaacacgtcgagcagatatgtgcgggtgggtgcatccagttcctcgcgcaccatgttctcgttccacgcgccacgaccgaacagttcgccttccaactgtgcgatggagtgaaccgcaagatcacgacttacggcagtgatgtcaacaatcatcgaatcaacccgtctcacgccttatcggcgccggcatggccgagcacgtgcttcagcgggttcggcacttcggcgtccggccggcgcaggtacaacggttcgaccggcgtatcgggattacggttggcaaccagttccgcatcagtggcaaagatagcgagaccttgctccccttggtccaatacggattcatcggtgatgtcgccaagctgctcgattgcacccagcgcatccgcatatttgcgggccccatgacccacaacatccacgaccacatccacattgctgtcttctggcataagtccgtcgcggtacgtatgaacggcatcattcacgcgctgcgcgatggatgcagggtaatcgatatccatgtcaatcagagccgtcgccacggtttcgccatcgggatcgccaacgagcgggtccgagtacaacgcaaaatagagttgcttgcggcgtgcgtcgtttacggcaagagtgagcacatggcatttatgagtatcgccgagagtgccggctttgccacggcgaatgagattccattgcacctgagactcaagaacattatggccgataagcgtcgctcccgttgcgaaagccagtgccttggccgtaacgataccggcacgcagaccagtaaagggggctggaccggtacccacaatgactgttgcaatgtcagatgctgggaacccggcctcctcgaccgcgcgcgcgatattgacctgcagtttctccacatgggtgcgcgaatcggtctctacaatgggatcgcgccccacaatgccgaccgtcgagccgaatgaggtgtcaatcaccaacgtgcaacccatgaatcctcctagtcgtaaagcctctagagagtgtacatcgaggagtctataggcgcatggcttactgcagatcgaacgcggcccatcgcttgccgactgggacgaatgcgacggtacgagtgccgttgctggtgagttcgccgtctgatccagcggatgcggcatcggaggaatcgagaggtcgatcgatatggatttcaagtcgttctggcgccaaggcggtggccatttgttcgccccactccataagcaccaccgtgttctcgccggggtcttcaagttcttcgtccaatcccagcgattccagctcgtccaacaaacgcccgatggcgtcctgccccggcgcataggctgagccgcccagacggtaggcatccacatgcaccagatgagacggagtgccgtcggcgaaatgcccgtcgagttcgcgggcaatggtgaatgtaggagacacgatgggttcggtaatgcccagccccgccccgaagccctgggcgaatgtggttttaccggcaccaagagggcctgagagcagcaatacatcgccgccgtgtaccattccggccacacgacggccgagctcctgcatggcctcgctggtgggagccgcaatagtgtgttcgctcataaatacccctttatcgacttttaccgacctttatgactgatgtcttcaatgcagcgttccagcgcatataccgggtcgccaccgtttgttttgctttgctcatccgcccaggcgagcatacggatgcaatgcgcgagtcctgccgaagtccagccgccaagttggcgcatcgcattcttcagcacccaaggattggttttcgcttcggcctgggaaatcgtgccggcccgtaccgccgaggctttggcaatggtacgaagcttcatggccaacgcgccgatcagcgcgatgggatcggtcccttgttccacagctgcacgcatcatgacgatggcttctgcggttttgccttccacggccttgtctgccacggcaaaaccggtgacctgcggattggcggtcaaatactggttgacacggtcgaggcccatcggattatcgtcaaagtcgaaacacagttgctcgcacatggcggcgagttcgccggttttgccgccgagtacggataccagctgctgtgcggccatcggttcgactctacgaccgcgtttctcgaattctccgagcacgaaattgagctgtgcatccggtttcttcaaatccggcacgtcctctttgcgagcgccggctttcaccagttggtcgatgattttgcgccctttgacgccgccctcgtgctggcagatcaccacgctggagccgttcggatccttggcggcctgcttggtgtacgccaccagagcttcggcgagcttgtcgtcggcattctgcaggttgacgagtttgaccacggcaacgtcggaaagcaacgatgggctgacggcttcatcgaaggcatactggtcggccgatgcggcgtcgagttcgatgaggtcggcgtcgggccgcgccttcaacgcctgcgcgcacagtgccttggtgcgcgcgtcgttcaaatacgagtcgcctccgggcaccacggttaccggtgcattcgctgctgttttcgtcatgcccccatctcgccacacaggttggacaatgacctgccggcatcacgattttgccggtgccgtcaagatagtggtattcggctgggattgcgatggttgctgcaccgaataccgcattggctattcggcttgccgccgcgtaaagaggcgtctcgtctcctcacaccagagactgaggcggacgcgccaagcggaaccgaagcgcacgccagacattccggcctcataacgacggacatgctggaggcaacggctgacgaacaccagtagcatgccgataccgatttccgccgccacaatcagcacggcgcccgtaacgccgtctttccatgggatgacggccatcgtgctgccgcccagccacaacgccacccgttccatcaccagcgtaccccatgacgatatccacacgaatacgccggccagccatggcgtgcaccatgcgcacgtcagtgccatcaatcccgccatcgtggtcaatcccacgaacggtgacaccagcaggttcgccggcacggacagcaacggcaattccggttccatcaacacctgaatcggcagggtgaacaattgcgcggccacggtcatcgccatcatttcggcgatgctgtgcggcatcgctcgctcaaagacaccggccagccgccccgcaaacagcacgatacccagtacggcggccgaagacaaggcgaatccgtagctggccgacatatccgggttcaccgccaatacaccgattatcgtccagcacagggcgctcaacgcttgcgtacgccgtcccatcgcatacgccaacgcacctatcaatcccatgatgaacgcgcgggtgaccgaatcactggggaacatcgccaatgccagcagcgcatatacaccagagaccagcaacgccgtcagccgccgatcaagcagcatccacatgcataaccgacgcaccagtcctgccaccagtacgaagtggccgccggatacggccatgaggtgcatgatgccggaccggcggaactgattttccaacgtttgcgcatacgtgctgttgaccggcatcggaccggcatcgccgccgatataatcctggccaagcacacccatcgtcaatcccggcaccaacacacgcccctgatcggacaattgtccggtcacggtgaaaaacgcctcctgcatatgtgcgatcgcggcgagatgccacggcggagcccgcacctgcgctaccggctgttttccttccaagagcagccatagcggtatgcgtccatatcgcgcttgctgcaatacgcccgtcaacagatagaccgcgcctcgacgcaactgcccacaatacgattcatcggcgtatacgcgcacggcgaccgtggaacgtacgtccgcgccatccacagtgatgccgctcagccgtatgtccgtctgacaatcgtatgtgcgttggtccgaagcgatcacgggcgtcgtcaccgtggccatgacttcgtggtatgaactggattggcgagcttgtgcggaggcaggatcatgccaggcaatggtgtccgacgcgattgccgccatactgccgatgcacgccaccgcgacgcatacggtcaatgttcccgtccacctgatccgcaggcggaaagacaccacgatcatcgccgccacagcggcacatgacgccactgttataggcaatattcgtgtgacaggccattccatgccgattatggtggcgtcaatgccagctccggcatcggcctttgcctgaccggtgccgagtccatcagacatcctccatgcgaataatgcgtgcgctcccagactcgccgcccacatcactatggcgatcggcagcatcctccaatcgcggctcccctgctcgcgcagtatccgatccccgctcatccgaccgtcacctgccctcgcatggtctccagcgtcttggagccgatgcctttgacatccagcagctgatcgactgatgcatacccgccaatcgccgtgcgatgatcgatgatccgctgagcggtaaccggcccaatacctttgatggattgcaattcctcagcggtggccgtgttgaggttgatgagaccatgcgtggaagcgccggcatcgctgccgtccgtctgcatgtgcggagattgcgtggtatccgattcggggttcgctgtggcatcggaatgctccgactgctgcggatccgtgcgtttctcgtccgtggtgttctgcgatggcatcgtctgatctccagcggagccgcccgtggtctgcatggcggtcggttgagacagcatggccatattcatcgactgctggaccagcaatgccaagctgatgccaagggcgacgatcagcagcaatatcacggccaaggcatgcccaatggtgaacgacaatcgcggctgatcccgggtgagtctggctgattctccgacggcatcggcggaacgtacgccgatcagatccgataacgcacgtttgtcacgggtcgcctgccgcaggccgctctgcgccctttggggcgggcggccggccggacgaatccgtgcatggccgggaggcggtggaggcgtcgtgggccgttccactcgcggttggggcatggcttcgctctgcctgctgaatgcgcgcaaacggttggcggcatggtctgcgcgatggttatgagaaacgcccatgcatccacgctgatggattcatgggcgtttgtccagctgaaacggggtatgtggttctagcttatgaagttatccacaattgaggtggggcggttgacgctcccctcagtctcgctacgcgagcggctcccctcaaagaggggagcctaacccgcaacaagtcactccgcagggacgatggagacgatcttgggggccttgacgatcaccttgcgcggctctttgccgccaagacggtcggcgacggcggccagcgcctgcttctcgaggtcggccgggtcgatgtcgaccggcacttcgagcttggcgcgcaccttgcccttgatctgcaccacggcggtcacggtgtcgtggcccacgtagcgttcgtcggccaccggccacggctcggcggacagggactcggggtggcccagcttgctccacatctcctcgcagatgtgcggggcgatcggggcgagcatcaggaccaacggctccactgcggcacgcggcacggccttcagaccggtcagatggttgttgagcacgatgagcttggcgatggcggtgttcggacgcatgccctccatctccgcggtcacttcggcgatcgtgttgttgagcagtttcagtgtcttctcatcgggcgcgtcctcggtcacgtgggcctcgccggtggtctcgtccaccacgttgcgccacaggcgctgcaggaagcgcatgccgccgaccacgttgcgggtgttccacgggcgagactcgtccagcggtcccatgctcatctcatacaggcggaaggtgtcggcaccgtagttctcgtacatgtagtccggggtcacgatgttcttgagggacttgcccatcttgccgaactcgcgattggcatgttcgccgttccaggtgaacgtcggctcgccggaggcgtcggccgggccttccacgacctcgtcggccggcacgtactggccgcggtcgtcggtgtaggcgtaggcctggatcatgccctggttgaacagcttgtggaacggttcggccgaagccacgtagccgaggtcgaagagcaccttgtgccagaaacgggagtagagcaggtggagcacggcgtgttcgacgccgccgatgtacaggtccacaccgccttcatcacccgagtacttgttgtggttcgggcccatccagtagtcgaactcgtccttctccaccatgtgcttggtgtcggtcgggtcgatgtaacgcatgtagtaccagcaggagccggcccagttcggcatggtgttggtgtcgcggtagtaggtcttcttgccgtcgcccaagtcgagctcgaccttgacccagtcctcgttgcggctcaacggtgcctcgggattggactcggcgtccatcggatcgaaggtgcgcggctcgtagtcgggcacgtcgggcaggttgattggcaatgcggaatccggcagcaggtgcggggtgccgtcctcgccatagacgatcgggaagggctcgccccagtagcgctggcgggagaacagccagtcgcgcagacggtagctcacggtgcccttgcccacgccggcggattcgagccaggcgttgaccttggcgatggcgtcgtccacgcgcagaccgttaaggctcagcgcgtcgcccttggcttcggtggcctcgacggaggagttgatcacgatgccgtcatgggaaacgaacggcgccttgccctcgtagttggccaagtcgtcgccggaatccggcagaggcttgacggtgtagatgaccggcagaccgaacttcacggcaaagtcgtaatcgcgctggtcgccaccaggcacggccataatggcaccggtgccgtagtccatcagcacgtagtcggcagtgaacagcgggagcttcgcgccggtgatcgggttggtggcgtacaggccggtgaacagacctgtcttctcaccgccctcgtccacgcggtccttggcggtcttggcttcggcggcgagcctgtaggccttcaccgcctcgaccgggttggcatagccgcccttccagtcttcgggtacatcggccggccattcggcgggcacgttctccagcaggtgatgttccggggaaacaacggcgaacgtggtgccgaacagcgtgtcgggacgggtggtgtagatttccatgtccttgtcaccgtcggcagtggccacggtgaagtgcacggaggcaccatgggattcaccgatccagttgcgctgcatgagcttgaccttctcaggccaatcgatgccgtcgaggtcggcgatgaggcggtggccgtacttggtgatgcgcatggaccactggcgtagctcacgctggaagaccgggaagttgccacgctcggacttaccttcggcggtgacctcctcgttggccagcacggtgcccagacccgggcaccagttgaccggggacttggagatgtaggccaggcggaagtcgttcaagatatcctgctgctcggcgtcagtgaggtcggaccactgcttgccatcggactcgtggcccggaatggccttttcgccggactcgaatttggcgacgagctcggcgatggggcgcgcggagcccttggagccggacgggttggtggcgtcctcgtcgtaccaggaatcgtagatgcgcgagaagatccattgggtccagcgcacgtagccggggtcgatggtggcgaacgtgcggcggttgtcgaagctcagacccatgcggtgcagctggcggctcatgttggcgatgttcgcctcggtggtcacgcgaggatgctggccggtctggactgcgtactgttccgcgggcaggccgaaggcgtcatagcccatggcgtgcaggacgttctcgcccttcatgcggtggtagcggctcgtcacatcggaggccagataacccagcgggtggcccacatgcagacccttgccggaggggtaggggaacatgtccatggcgaagtaggcggcgcggccttcggcgttacggcccttgccgtccttcaaatcgccgttgacgttggcggcccagaaggtgccttgctcatcccagatcttctgccacttgttttcgatgtcctgcgccagtgcggcgttgtagcggaagttgggctcttcggtttgcgtgctcttctcgttgtcactcataaatcagcaaggtagcctcgcaactggacacgtcgtcaatcgttattcagcatccgagacgatggctttggggtcaccgttcagcgaaaccatgagctttgtttggcttgtgaacgtatccttggcggccgtccagctgccatcctcaaccatgtcttccaatgcttccgcgattttctgcgccaattggctggtgccttgactcacggcgatgccataactgacctcgcccttgtccgcaatcacgtccatatactggggcccgttggccgcttgaagaccggaaagcaccgccatatcggaggctatggcatccgccgaccctacttgcacggccgtgacgcactgcgcataactgctacgctcctgaatccgagcctgcgggtggttgccgcggaagatgccgactgtctcgtcacctttcactgcgcacaccgtgccgtcgcctacgtcgcccaccgaacctgcgtcattggtgaatcggccacgctcatccgacctgaccagcaaaccgacgctggtcgtgaggtatggtccggcaaaatcaacgatcgcgctggacccatcggtgataggccaagaggcgacgaccatgtcgacctgtccattgtccagcatggagcgccggttttcggggcgaacctgcttgaagacgatctgcttgttcgcatagccgagtttggcggccacgtatttggcgatggtgatgtcgaagccctggtatgtgccgtcatgccatgctcccaccgatggttcgtcggctgcgaccccaatggcgatggtgggtccctccggcgctccggagacggtggtgacttgaatttggccgcaaccggccagaccagataatggcaatatcacgccaaaggccgcggcgaatcctgccatcagccgggagcgaaatccgcgccgcatcgggcggcgggcgcggagcatgctacggctgacgaacgatgaccagtggtgcataaccgtcaaacgccttacttgaacatgcgcgaacgtgtgaggaaccaggcgaccacaccggaaagcaccatggagatcacgatgatgagcaggaagccccaaggcttgtcggtgaacggcatgcccatcatgccgccgtcgaagttcatgccgtacatcgagaaaatcagcgtcgggatggacagggtgatggagatgatggtgaagatgcgcatcacgttgttcaggttgttggacacgatcgaggcgaaggcgtcggtcatgttcgcaagaacgccgctgtagatgttggccatctcgatggcctgcttgttttcggtgatgacgtcgtcgagcagatcctcatcgtccggatactgcttgatgcgctgcagggtggtgagtttctccatcacgatctcgttcgatttcagcgatgtggtgaagtacaccaaggtcttgctcagttccatgagcatcacgatctcgcggttctgcatggagtggcgcagcttcagttcaagcttgtcgctttcgcggtcgatgatgcgcaggtaacgcaggtacatcgtggcgttgcggtacaggatctgcaggatgaagcgcgaacgcatgaaggtgttgaagcctcggatcgtgccttccatgaatgggtggagcacgggcgtgtcctgcatgcagacggtgatgatgaggttttcggtgacgatgatcgacagcgggatggtctcgtaccagtcgcgtccgccacgctcctccacggtggggatgtcgacgatgatcatcgtgtaatcgtcttcgacgtccacacgtgaacgttcctcgtcatccaaaggggcgcgcaggtcggccaggtcgatgccggtctgtgatgcgacggtggcgagctccacatcagtgggttcgctcaaacataaccaggagccgttttccggtttctcgatctgctccacttggccattgattgagctgaagattctcagcatgtcgcctcacccgccttccgcgctttcctactgttctatcgctgtacggttccaaaccgagattagtctagacccaccgttcgaatttgcgagcggggtttcgcatagcgaccgtcaccagacgattggctgccaactcggcatgtgcggtcctcgcagatcggtcggcccgttctcccagtcggcgctgtcggcgatggcgggagccttgttgtattcctccaactcccacaggggctgttcggcggggatgccgttgacgctgtggcgcactttgagccggcaccaacaggcgttgcgcatgccgccgagtgcgttcatgccgtccgggtcgagttcgagcaggttggagatggtggcggtaatccatgagccatgggtgacgagcatcagcgtggtgggcgtgctgtctgaataggcggagtcgatgaccagtgcgcgcacggcatcggcacctcgctggcccacggcggcacggctttccacaccatgcttggtttcgcccccggtgtgctgtttccaagaggcgtagtcgtcggctgccacggctttgatttcggcgcgggtcatgccttcccactcgccgaagctgcgttcacgcagtcgttggtcacaggtgaccggcaatcccaaaatatcggcgaaggcgtgtgcggtctgttgggcacggaacaggtcggaggtcatcaccaccatgcgccggccggcggcgggggcctcctcgaactgtcgcgtatcagtgcgttcggcggcgtcaggaccgggctgggcgatggcttcgggatgctcggcaagccggttcaccttggcccagtagtaccgtgaagcgagcgcgaatccggtctggtcgacctgccattggcctacgatgtcgagcggcacatcgatctggccttgcaagcgatgttcgagattgtattgcgtacggccatggcgcagcatcatcacttcatcgatcatcggttttcgccacctcgttctcttgcggttttttcatactcatctcagcacaacccctagaatggcggcatggagatttctgagtcgacttgggcgttcatcgccaaacaccgccgtgaagatgtgcgtgatgtggccttgcacgccaaacatgatggcgacgtggatgtgccgttcgcgctggagcagattgccggctggcagcgcgcttcgctcaagctacctgactgggcgtcccatgatgggctgattttcccgccgcaagtcccaatggaacaatgttccagccagttcacggctcaatacaaagcccggttagcacagcgattgttggacggggaagcagtcgacgacgccgacgattccccgacatccctagtcgatctgaccggcggtttcggcgtcgacttttcttacatgtcccgagtgtttgaccatgccatatatgtggaacaacaatccattttatgtggtatcgctcgccataatttcccgatactcggccttggccacgccgaaatcatcaatgatgattcaacagcagtgcttgatacgcttggccgagtctccatgatcttcctcgatccggcccgccgtgacgatcatggctcgcgtacctacgcgattgccgattgcacgccggatgtgctgaccctgaaggatacgctgctggccaaggcaccgacggtcatggtcaagctctcccccatgctcgactggcataagaccattacggatttcgccggcgcggtgcacgaggtgcatatcgtctccaccggtaatgaatgcaaggaattgttgctggtgttggggcgcagccgttgcgcctcaccgctcgtggtatgcgtcaatgacgggcaggtgctgtcgtacaaggccggcgataacagcgacaatcaaacccctatcagcgattctgccttggttgcacgcaatacctgtaataccgaggatttcccggctgaggaaagcgcgaacggcttcgattcctcgcattggaagtacctttacgaacccaacgcctcaatcatgaaggccgggtgctttgatgttctcgaacaacgcttcgtcgtgcatcacatcagcccgaatagccacctgttcgtggcggccgaacctattgccgatttcccaggcagatcattcgtcatcgaatccatcgtcaccatgaacaagaaagaactgaagcagctattggccggtctcacgcacgccaacatcgccgtacgcaatttccccctatccgtggcccagctgcgcaaaaaactcaaactcaaggacggcggcaacacctacctcttcgccaccaccgacctcaaaggccatcacctagtactgcgcactgaaaagcgaaaaagtggctccctctgacgaggaagccaccaatacgtcagctaatcagtccttggcgatggtcttgccggcggtcggaccggaggcaaggttctggatctcggtgacttcgagaaccggaatcacggccggcttcttggtgcccttttcctcggcgatcttgacctgctcgttgtagatgtcgtcgtcaacgtgcagcaccacgttgccgcggaagcggtagccctgcttcttctcgaggttggcgaaggcgatgaccagcggagagccgttcttgaggttctcgtagtgctggccggcggtgcgctcgtggtaggcgatgtgcgtgtcgtccagcacgaacagggacatcttcgggccgaggtccagttcgccgtccttggagacggtggtgatccaaccgaggttgttcttgatgaattccttgatttccggagtaatgactgccatgtcgaatcctttcatgattgctatggacaacgtatttttactctttccagagtaccggtttcgagcgcgactagcccggatgttcgctgtgagtaacctcaccttcgcacagctttcatccggttcttacctgcttggcgatgccgcgccccggccgcgcaccagccacacacctgtcacacacccgacgcccatcgaccggtcgattttggccggtagttcccgtaatctgtgagccgagagagccacaagttttcctaactgtcctgaggtgcaccatgggtttggtcgaacgtttcagcaagctgcgcagccgctggtcccgcagctttcccccgaatctcgcccgactcatgttgctgggctgcgccgcattatggggtggcagttatctgctcgccaaattcgccatggaggcgattccgccccaatggctgatgggtctgcgcatgataggtgcctgcctgtgcatgctggccttgttccataagcacatcgtgccgtatctgacgccgaagatcattgtgccggcgctcgtggtgggtctgacctactggggcacgatggtcacccagaccgtcgggttgcagaccatcgaacccgggcgcagcgcgtttctgacggcggcctattgcgtcctcaccccgttcgccacatggatcgtttcgaagattcggccgaaggccatcaacctggtcgccggcgtgatctgtctggccggcgtcggcttcgtctcgttgaagccgggcggttcgttgtcgctgggcgccggcgactggctgaccatcgccaccgcggtcatcttctcgttcaacctgactttcctgggcatctataccaaacggttcgaccctatcgccgtcacttttgtgcagttcggcgttgccggcgtattgttcatcatcggcgcgttgttcaccgaacccatgccgaacgccagctggctggcaccctcagtagtggccagcgtgctctatctgttcctcggcgccacgatgagtgcccagatcatgcagaacatcggtctggctcacgtgcctgcctcgcaggcgtcaatcatcatgtgtacggaaagtctgttcgccgtcacgttctccgcgctgttctggggcgagaggatcatgtggagctcactggtgggtttcgctttgattttcgccgccgtactgatgtcggtgatcagaccgaccgggcagtcgctgcatcgtaattgacgatgtcccgcggcctgcggcgacgcgaaacgcacgtgtgtgcgctgcagggcgtgtcggacctgcacgaaggccgattttgaaggtctcgtgtaggcctcgccccgcttccatcgagtctcaggcaacctgtcagcccgacaccctacggtcgtgcattgtgaagaagttttttgaaggaatctccctctcatccatcgtggcgggcacccttgccgccgtcacctcgttcctgctcgcatcgaagatcggcatcggcggttcggtgatcggagcggcggccagttacgtcgtctccgccgtggccaccaagatctaccagaacgtgctcaccgcctccggcgaaaaactccaatcggcctcgtcctccggcaacgggatcacgaaggacgccgagaacggcgatgccgatggcggcaccccccgaacggccggcagccggaccgacgttcgggacgagcccgatacggcgacgggcgtgaccgccgatgatgcttcctccacacgcagaccgcgtgaaatcgtgttcagccgggcgaacggcaggacgtactcggtcgatgagctgcgcaagtcccgcttccgcgcttcgaagcacaccgccatgatcgtcaccttggtgtccggcctgctcgccgtggcggtgacggccggcgtcgtgatgctggccacgcagggacgcggcacggacaatctcgtatcccccaccacgaccacgcccgcgcgcaacgacaccggcacgcgaacgggcacccccgatcagaacaacgctctgccccagacgggcaccggcgatgattcgaaggaaaccagcaaggattcgaaaaccgacgccccctccaccgacttcgacgccaacggcacctcaggttcgaccggcgccggcgcctcggattcgaaaaccgacggcaccgccaacggttcgaacggcaccggcacctcaaagaatccgaccaccgaggacccgaccagccaaggcgtcggcggcagccagaccggttcgaacggcaccggcaccggctcgacgcaaaaagatccgtcggaatcgacttcaaccagcaccggcaccagcggcaccagcggatcgccggccaccggcccagacgcgggcctgtctcgttaagtgtgtaactggcgttttcattgttgtgttccctcgcttggccagcggtcggcgaaggtgatggcaaaggcgttgagcgcgggcttccggcgcgcgctccatcgtatccgtcccttgccggtggggtccagcgagcggacggtcaggtacatgcacttgagcgcggcctgctcgtcggggaagtggccgcgggcgcggatggagcgcttgaatctcgcgttgagcgattcgatggcgttggtcgtgcagatcacgcgccggatctccacgtcatagtccaggaacggtatgaaccgttcccacgcgtccatccacagcctgcggatcgcgggatatctcgcctcccacttgtccagcatcgcgtcgcgggccgccgccgcggtgtagatgggtttgacatcgcgtttgatggcgtcccagtccttcttcgacgcgtggcggaacgtgttgcgcagcagatgcaccacgcaggtctgcacgatggccagaggccataccgcgcccaccgcgtcgggcaggcctttgagcccgtcgcagatcaggaagaacacatcgtccacgccccggttcttcagctcggtgagcaccgacagccaatagcgcgcgccctccgcggcgggcgacgcccagatgcccagcacgtcgcggtcgccctccagatccacgccaacggccacgtagaacgcgcggttggcgacctgcccgtcgcgcaccttgacgacggtcgcgtcgatgaacacggccgcgtacacacgatccaggggacgcgagcaccattcgtccttctcggccacgacccgctcggtgatgcgactgacggtctccctggacacgtccgccccgtagatctcctggaagtgggcgctgatctcgccggtggtcaggcccctggcatacagggacagcaccacctcgcccaccccgggcagccgccgctgccgtttcctgacgacgaccggctcgaacgagccatcgcggtctcgcggcacctcgatcccgaccggacctaccgaatcggtgaccacggtcttggcggtggtgccgttgcgcgtgttcgcggccctgccgtccttggatttcttgtgcttggcgcggcccaggtgctcggtcatctcctcgtccagggccgtctccagcacgcttttggtgaactgtttgagcagtccgtcgggccctgtcaggtccagtcctttttccttggccatgcgcacgaatgtgagcgctgcctcccgctcggcgttgcgtttttccgcgtccggcttcttcgtcggtgtcatgtttcccattgtcccagcacacatcgtccaccagcctttccgaccggccacacgaccggccagttaaggccagttacacacttcgagagacagtcccacgtataccggttctttgtttatgtaagggaatgattgatggttcggtttgcctgtttgtataatgcgcttatttatcttggtaccggatgtttttcggtctactatatggtggcctatcatgatgtgggcctgtcggtgctgctgatctccatcgtcaatgtggtgttcgacgtcagcgaatcggccagcgagctgcccacgtccgtgctgttcgaccggtggtcccgggaacggacgctgatcatcggcgtgttgtgccgcgtcgcgggattcatattgatgctgttctggtccgcgaacttcgccgtgctgtgcctggccaacgtgctggccggcatcggggccgcggtcgaaagcggcgcggcgtcctcgctgtacatcgaatacgcccgcaagcacgatccctcgctgggtatgaagaccttggtgtcaagactgtcggcgatgatcggtgcgtgcacgatatgcagcggtgcggtcggtgccgtgctgttcctgcttgactcccagctgatctggctgggcgcgacggtgttctacgtattggcgatcatcccgcttctcggtctgatgagggccggatcgcgcaccaaggccgcagcgacggatgggagcgggacgacggaacggcaggccgaggcgtccgtcgaatccgatggatccgccgagccgggcgagtccgggacctcgctgacggtgttggatcatgtcaggcagaccgtggcggccgcggccgtgctgctgcggaagccggagatatggaatatggtggtgttcaatctgggtacgttgtcggtgctgacgttctggcagctgctgctgatgggccaccagaccggggtctggtggcagttcgccggcctagtgttcactaatatcgcgcagatcgtcggcagtcgtctgggtatgctgcggctgcatccacgttccggcgacattgcgatcctcgtgctcatcgtgtcggcggtggtgcttgcggccacgccgatgccggcggtgaggatcctggcgttcttcgtgttctcctgcgcgcagatgtacgtggcgaacacgatctccagcagcttgcacgagagcattgacgattcgatccgcgcgaccgcgttctccgtgggatcgctcgtattgatggccttcaccgcggtcgtcaccccgctgtgcggctacatcgccgacacgttctcgatttcctggggtacactgacgacgatccccctgctggtggccctcctcatcgccggacttgcgcgaaagcctgaatccgacaaacgggtaaaagtcgatatttcgttggattgagacgtcaagggcttgcgggcacgatgcccgcaagcccttgacgtctatatgtcattcattcatggttggaatgcgctcctcctacgcgtgcggttgaatggttagtccatcgctatcgtcggagggtgtcagggccgaagatgaaaccgtctgttccgggtgcgtgatccaggtggaatggattggcaacggtgtacgacttgtcgccgggtttcacgtcgtccgtgtcgaattcgttggaatccttgtcgagcagtgggccgtccagcgaggcgggacagtacacggtgacgtgccagttgccgtcgtccatggggatgagcacggtgtagtgccttggagaccgtctgctgcggcatcccttatggatgattccttgataaaggagtttcgggggggcgggtaacaaaaacccggaaccgaagttccgggtttttgtctggctcctgcggctgggcttgaaccagcgaccgtccgattaacagtcggatgctctgccaatagacaacgggcaattcgactgccatgtcaggtatggtaatctcgaaccagccagaagatcgataagccaaattacctgcgactgaagtgaggacggaatcatgcgtagcgagttctctggtctgttgtattgcgcgggtgcattaatcgcagtgacctcttgggctcttttcatgttctcgaaagaagtccatcggaaaggccgaacagtatccatcctgagattgcccgtcatttggatactgttcctcgtgagttcggcgccggctctcgcatcatatccggtttttgaaatatactcaggatctatggatccagatgtcctcgatttctacagtcagccgttcatacggctactgccggcggcgacctgcatagtgaatctgtgcgtatcggcatgctgctccatggctcttgtcagtaagcgcagaaaaaccgaacatcgaaaaatctgaaccacagcattcgagatgagatgccatggaaaaaccgctgtttccgctggccttggtgccgctggccgtcggattggtcctgatatacgtcgtgattggatccaaaaaccggaaagagaacgcaaaaggactcttttgcgtgtcttctcggcgctcatggtcgttgccggcgcgttggccatcgcgagacaactcgtatgacgcttcacgctgcggctcggcttcccggctatcggccgcagccagtccacggctctccgcgccattcccgcaatcgcaccatcgccggtctcaagcccatgagacacttggagccatggctaccattatcatgcgcacctcgcatgataatcctagccaactgtttttggctttgttccaaggttttcgatttttgggaaacctgccggttacgctcgttttccacgaggcacctacaggcacccaagaataatctcaactgattcccacccaccggtcggccaccatcagccggaacgctcgtatctcgcggcgttggcgatctcgttcgcctgaagcgtcgggcatcgcgttgacgatccgctcgaccttttcgcgcaccatggcgtcgagcttgctctcgaacatggcctggtcgaactgtatgatttccttggacatggctccatgcctctttccaatcgcggtttttcattgtctggcgactgaaaatcgtacccggcacggcccatgtccttttccatcaaggccggaatccaaaaatgcgcaagaattcggtcgttatccccttagagactaaaggaattctattagttcagcaaattcgtatatcaatttattttttagcatgtcggacaatacagtaaatcaaccactctatggctaagataccaaggtagaaaagcgcccatacggaaaaactaatcagctttactcctagtgtctgtacagttccatgcccgtccactgttcttataaaaaggaatacactaatgcataagaacaatatgaattgaatgatttggaaaattctccaacctttgttttccacaatcaccctcctgtaaccccaatctctatatgctgattccaccattataagccgcccttggtgaaatgtcaggcgccccgttgtctaattgaaagtgcaacacccgttagattggagattgtccggataaccagtccgaagggatgttccacctatgggagaagtatattcgcacctgtcggaagaggaacgccaggtcatccggatcgagatcggcaacggcaccagcatccgcaggatcggtctgatgctcggccgcaacgcctcgacggtcggcagggagatcgaacgcgacacgtggttcccgtccaacgagaacgagtcctgccggccgtaccggccgaaacggctgaagacgggcccatggacgggcggatgctacatcgccggccccgccgcggcgcaaggccgaccgcaggcgcgccgaaccgcgcaagcgctaccgcctgtcatgcgaacgcctgtgggcgcgggtggccgaatggctgggtcgcggctggtcgccgctgcccgtcagcggcaggctgcgcgtcctgttccccgacgactccgccatgcgcgtgtgcccggagaccgtctaccgttggatctgcgccgaccgccatcgccgtgaacgctgggcgcgctgccttccacgcggccacaggaggcgtcgcaggcgtggcggcaggaggacgtcgcgtttcccgattcccggacgggttcccatctccgagcgtccgccggaggccggagaccgcagcggtttcggccattgggaggccgacggcgtgatcggcgccggatgcaacctgcacaccgaggtcgagaggaagaccaggttcctcatggccgggatcgtgcccggcaagaccgccggggaaagcgtcggggcgcagctggcgatgttctcgccgctgccggccggcgcgcgcgtcagcgtcacgcacgacaacggcaccgagttcgcccgccacacgcgcctgcgcgacgagccgggcatggacacgtgcttcgccgacccgtactccagccggcggcggggaagcaacgagaacaggaacggcatgatccgccggtatccgcccaaacgcagcgagatccggatggacatggccggggaactgcgggagattgtcgacgaggccgacaaccgtcccatgcgcgtgctggactaccggacgcccgccgaggcattcgccgacgaactgctagaattgcaggaccaacaggggtgttgcacctctaaatagacatcgggcgcttactgtggcgagaactggatctacagggccaacgtgacacaaattatcgaagaacacggcatctcagtcacggtccaacggcagaatgccggaaccgctcgccgcatcgttacccaatgcattggtctcaatcttggtggtcggctaccccatgcccctaatcacaacccacattcctgcaatcaggcatcaccacccggtctcaagcccatgagacacttaagaccatgactaccatcatcatgcgcacctctgatgataatcgcatgtggtcgtttttggctttgttccaaggttttcaatttttgggaaacctgccggttacgctcgttttccacgaggcacctacaggcacccaagaataatccgggaacgttccaccaccctgccggcgctcagcgtcttcgccgaccggcacggaaaagcgcaataccccctgtggtttcatgatgttccgcatgggtggtgcccagaagcattcacccggcagcatgtctccatggcggacaatagacagaacgatacgcagcccgtgcaaccgtcccagccgccaatggcatccaaatccatcccgaatcccacaggcccattgcagacagcccagatcagctggctcatggtccaaagccgcctgcgacgccaccgtcccaatagcaggaacggtcagctgcgcagtatgatttccgccctgtcggccagttcccgttcgcgcacacccatggcagacaggatcgcttggctccgcgatggcatggtggaggtcacccgtgcgaccaatgcggagaagcgaccgaacaattccaagtaatcgtccttgtcaagcaaataaccaagatcaccgatggcctgatacacgttctcgttagcgcgcccatcgtaccgggcacaatagcagcgctcgtcatgcgcgcacaggttgcggtagaacaccagtctgttgaagatgctgtccagccgcttgatggtgatgcgccgtggcctgtcgtgcgtgtccgcatacaaaccggtgaaactttcggcgaccgccaatcggacggccggggactggacttggaagaaccataccgtctggccgaaggaaagatcgttggccagcacccacaacgggacctggccgttgtggtcttccatgcaatggcggatatacgccttgccgccatagtcgcccctgttgcgcgggttgccgtccaactcaagtatccgcttgaagaccttgtcgatcaatgccatggcgctcggacggcacctggaatcataatagtcgggattgagatacgggttgacctcgtcggggtgcagcccggtgaactcatgcgcgcacactgccttgagcgcggcctccgcccgtgtgatggaggaaaacaacagttcacgcaactcacggtcgaacaggaacagggcgtacagatcatcgaaacgcgcgcccgttccgtaccggtcatcaccagcggtcaggcatgcctttcggtcgaggaacaaatccttatagccattgacgatcggataatagccctcgcgcctgagcacatgacccgcaccggcatcgacggccatgccacgggagcgcagaatgcgcagctgttcgttcacactcctgtagggcttgcgcaacgacatggatccgacctcccccaatccagcgatgaaagcactgaggccaccccgcgtccacggaatggcctcagcgaaccgaacgaagtccagcttatttcgctgttacagaatagcgccaatcccccgcgaatgcaacccagccagacggcggacgatataatgaaacctccatatcatcattccagaggcacacgccagtccatcaagaccaccaccagaaaaacccaaacgcccacaaaggagaagacgcgcgcctccacgaggcctgtatgaccctcgctctttcaagcgtctgcacgaaccgggcgaagtcgtagatgccgtatgtcgtacatcgatgatgtcgggtccccaagcagggtgctcgtggctcttcaccaggaggctggaacactttctcgtcgattccgcaggagcgacgcaagccttccgctccttgaactgggcctggcctctccggcaagccctactacaataggactcactcctccgcagttcgagaatcgagtcaatatgtgccgaatttgccacattcttgcaggtctcctagtgtgtgccggactcctacgcacagtaagcggctttatttttgactacctgcatccagaatacgtgtctagctttccttcatatctttattttttacgagcggttcccttccttgtcgctgctggtgctatcgaaactattttattcctgacaaaaaggagaaataaataaagaaactcaaacaaattgtcactgctctagtatctgtaatattggctggaactgtgacagtaaatgcgtcggcagcagaatctatcgaaactccctataggagtcctaccctatccagctttccgtctaatgcttctctggaagatcttgagaaagcctcagataacgaagatctgagaattatctcatctccttctcggggtgctaattacaaaacgtgcgctgcagaggctgtagctttactgcggatttattctactacaggatccggctcgtcatctagtttcacgaatctcggtcattcttggcttatgatcacaaacctgtctggttctacggcagacattgctgggattaacgttgctgatggtaaatctataacagcaagcacttgggatgaatccgtagatgtcagtagagaatataagggtctgtggctcaatctttattcgaagcttaattccaatggtattaatcttcagaatgtttccattcaattacccttaaggcaaattgatttagatacagtgaattctaatattaaaaataacgatagatggggctatcttaacaactgttctactttcgcttcaaaaatttggaattcaattgctagtggcagcagtaaagttggcgaggcagaatcatacacgttgttaaagtacaatacttcttcaccgcattacggttccgtatattatggctatcctcccataaagagtaataacaataattagataaccaaatctgtctggtaaagccggactagttttatctataatgtgagccgcaagtgttggcctagcgcttgcggctcattaaagatgtctttcgccaaataaatccgcgtgtcgggactggtgacgtttcgccggactcgtcattgatctcaccgccaccaatcatgccacaaggggtaggggataaggggctgcggacattttcttggagataatcacgcagccattccctggctttgacggtattgtaccgggctcatccaaccaagcgactgtttgatgcgctcgtggttgtaccagcgtatgtactcatcgaccaaggcgagcacctcgttgcgggtgtgttcctcccacttctcggggtagaccgcctcggtcttcatcctgccgaagaatccctccgcggccgcgttgtccggcgaacagcccttcgcgctcatggagcgcgtcagcccgaagcgttccatgagcgcgagccatccgggccaccggcagtggcatccacggtcggaatgcaccaggggacgcgcgttccccggcagcgtcgaggccgctttctccggcatccggttgtccggctccgcgttggggctgaagccggcggtgtatgcgacgatcttgccatcgaagcagtcgatcatcggcgagaggtacaccttcccgtccctggccttgatcccgggtgatgtccgtcagccacttctcgttcggacgctcggccgtgaagtcccggtcgacgagattggcgggagccggcgtcgtctcgccctcgtaggaactatacctgcgtcgcttgggcacatgcgccacgagcccttcctccgccatgatcctgcggaccgacttctccgatacgccggtcttgagcaccgccttgatcctgcggtacccgtacctgcccttggaatcggcgaacgccccggccacctccgccccgagtccggcgtacttgtcaactccgagccgggcgtggtggcagtaggtggccgctcggcgcgatgccgggcaagcatgccatcgagccgggcgaatacgccggcctcaaccggtcgatcaacagggtcttctccctgttcgacaggcgccgcaggtcggcgccggggtctttttctgcga

SEQ ID NO: 332 - DNA, 67805 bp, Unknown
  R42_10m  MAG No. k141_9721
cgtcagagactggcgcggtggcggacagcgctgcattgcgagcagcagcatcccaaggcagtcgcttgcctgccgcctcaaaatcctcgcgtgggcttctcatagacaccaatataggccatacgcctcattttcttggcttccctccataagaggcacgatgcatataggtttgatgccacatactggctcccctcagggaggggagctatgggtggaactaccgcacgaccttcgcgtattcgtcggcgctcagcagctccggctcatcgtcgtcaagctcgaccttcagcagccagccttcgccgtacggatcgccgttgaccacggacgggtcgtccgccacgtcacggttcacatacttgaccgtacccgccacggggctgatcaacggctggactgccttggaggattcaagctccacgatctcgtcgccggcctccacacgggcgccaggctcaggcaaatccacgaacacaagttcgccaagctggtcggcggcgtattcggttatgccgatgattgcggggtcgaccgaacggtccacccaagcatgctcctcggagtattcgaggtggtcgggaatgtcgaggttcagcggctgttcgttttcgttgtcatcactcatagtcataagcctaacctatcttcgcggtccgtcacagctcgcgaccgagccattcctcaatcatgtagcgggcgatggtggcgcggcccggcgccgccatacggccggcgatgagctcggccgtgtattcgtcgcgtgtgacccatcgcgcggtcatggtctcctcgccgtccacatgcacgtcggtggtgatcgcatgtgccttgaacgccatcatcagcgaagccgggaacggccacggctgcgagcccaggtaccgtacctcgccgagcttgatgccggtctcttccatggcctcgcggcggcaggcgtgttcaaggttctcccccgcctccacaaatccggcggacaccgaatacagcctcgaatccttccatgccgcgttgtgttgcagcagcagacgatcgtgcccgtccacgatggcggtgatgaccgccggctccacgcgcgggaacagcacacggttgccgtccgcctcgttggtgcatcgctgcgcccatccggcgagcgccggccggaccgccgcgccacaggtggggcagaaccgctggcggctgtgccagatgcttaaggtgatggcactggtggcttgcccagcctcgcgcgcgttggcgtgaggggcgaatccgcgcaggtccacccagtcgaaccgggtcacggcctgttgcagcagcgtgggcttcggggccaagggctgtacgggcgcgccgaccgaatcatcgaaggcatcgtccgcaccttgtccggccgaatccggtacaccgagcggcccggcgattttggctgcggctacgccgccattgcccttggcgtttcccggctgccgtattccggcggcagcacctccgctgatgccgttcttgcccagcgcaccgtccacggtgccggaatcctgggtgccgagcacgccgccggcagcaccggaaacaccagcaatcccgccaacaccgggaacaccggcttccggcacgcgcgtgatatccacggcgaccacggattcgccgcgcgccccggcataggagccgaggaacatggcgaccgcttcggggtagcgtgccagttcggcggacacataggcgcccggcaacgtggcgagccgcattttcacgttctcatagtccacgagctcgccttggccgcgcggtacggcgacaagtccgccgcgcgtaagcacgactttggtggtcggctcggccaacagctcgtcgatcagaccgggttcaccgcgccggtccacctgatagtcgatgtcaccttgcgcgagcggcaggaacggcagcgcatgggtcagcgccaggggcgaaaaatgaatgtcagtgcccatcgaggtctcctatgcgttcttctgcgcgttctgcacgcgcctgacgagcgagagcagtgctcgcgccacggtatccggatgttcgacggcactgaaatggccgcagtccggaatgtcgatgaattcggcgccggcgattcgctcggcgagcggacgcatcacactcggattgctggaggggtccagttcgccagacaccaccaggctcggtgcgctgatcgtttccggcaccgcccccagttcgggccggccataggtcatgcgctgacgccaagccagaccagccgggttctgttcgttgatccagccggtcatggtcgcgatgaattcaggagtcttcttgacggtggaatcgccatcggccggttgcgcgaagtgcatgaccggttcgaccgagttcgtctgttcggcggcgtccgccatcttcagtcggttctctccgcccacgccgtcggacgcggccatcgtgtcacacaaggccagtccggccaccgtttcggggtacaggcgctggatgtccatcgccacgtagccgcccatcgacagtccgacccagatcgcctgctcgtagccggcggccttgatcaggtccacgtaggctccggccaggcgatccagcgcctcgctgtaggcgccgttcgccatgcgggggccagaatcggcatcgctcggcaccggggatgcgccggagccggccatatccggcgcccaaatcgggaagtccggcacatcgttcaggtcggcggagtcggcgagcgccttcgcgcacacgtcccacatgcggtggtccaccgggtaggcgttcatcagcaccaccggcacgccttcgccatcgcgatagatatgattggccaattcgattgccatgaattactccttcacattcacgtcccaccagcgggaagcaaaacaactgtcagattccggcccaggccaacgcctgccgcacgatgcgcccgtggccgttgaccatctgcgccacgaacgtgttcattacgtcgctcttgggatccacccattccacatccagcgtctcgtcctgtggcttgcagtcgccggcgataggcaccatgtagcacagtgcgatggcgtgctggcgcggatcgtagtattcgctcagtcccggcgtggggaagaattcggccacggtgaatggctggagtccgaccggcagcagcggcagggcgatgtcgcccaggtccttggccacattgcgggcgatggcctcgcgcagcgtctcgtggtacagcacacggccggtgatcagcgtgcgttcgatcgacccgtcatcggatacgcgcagcagcgagcccacctgggagatgcggcccatctcatcggtgcgcacgggcacgatctccacgtatgcgatgggcatctgatgacgcgcccggttgatgtcggccggtcccagccagcccggcgggttgccgtggccggaaccgcccccgtggatgaagtcctcgggcgtgatgttgtcgaattcgccgcggccacggccggcatcataatcgccctcgtcgggcacttcatcattcatgactggcatgcatcccattattgcgcgtcacagcgcgccgcgcgtcaccttacagcgaaatcttgggaaacgtttggccggcggcggaaaatacgacacaaatgttgggtggtgctgggaagctggtagccagcagggagccgacggccacgaaccgcacggctccaagtgccaagacgtattgcatgaataaggcaatcgcccggcggccacgcacgagggccgtacggcgacgccaaggaaaacacagaagaagggaacatcatggcaaccaccgctatcacctctgccgatttcgagaagaccatcaccgacaacgagatcgtgttcgttgacttctgggccacctggtgcggcccgtgccgcgcgttcggcccgatcttcgaggcggcctccaacgatccggagaacgcggacatcgccttcgtcaaggtggatatcgacgccaaccaggatctggcccaggccgccggcatccaggcggtgcccacgctgatgatcgccaagcagggcgaggtcatcttccagcaggccggcgcgctgcaggccgccgatctcgacgatctgatcgcccaggccaaggcactcgacctcgccgccgccaaggccgcccagtccggtgccgaccagcaggcctgagcctgattttccttcatccactgcgccgcctatcatagtgggcagtgtgaaatccgatcaaggagcgcaatgacgagacatgccaagccgacccgtatgctcaggccgttgaacaagcgccagtggatgaagatcgcggctgtggtggccgcggcaggtctgctcggcgcggcgggattggtgtcgcgcagtttctaccatgctgatgatgtgaagccgatttccaccatcacttcgttctcggctaccgattcggccgcatcccgttctgccactcgtggcgcaatcaacagcgccgacaagaacaccacgttcgttacggtgaagattaatggcgattcgcgcgtagtacttggcgaaaaagccaacatgaccaccgtcaaggacgtgctggagacgggtgatatcacgcttgacccggatgatgccgtatcgccctcgctgaaatccaaggtcaccgaggccaccgtggtcaccattaatcgcgcggatgccgatgtggagaccaacgataccgagatcgccttcaatgaagtgcgcaaggagaccagcagcctgcccaagggtcaggaaaaggtcgagaccgagggccagaagggcattatggagaccacctcgctggtcaagcgagccggcgacaaggtcgtctcttccaacgtattcgcctcatgggtcaagaaggccccggtggataaggtgatcctggtgggcactggttccaccgagtcgccgtcgacgtcgtcatcatcgtcggccgatctcggcaccactgttccggctggagaagttcagtcctgggcgcatcagtatctgttagacaacgggtatagcgaagcggacttcaccgctgcgaactacatcatcaatcacgagtccggttggagccccaccgccaccaaccccacgtctggtgcttatggcttgggtcaggccttccccggtagcaagatggcttccgccggcgcggactggcagaccaactacaagacccagttcaagtggttcatcagctactgcgagcagcgctacggcggcatcgtcgcagcgtacaactactggatcgcccataacaattactgattgcgattattctcggtctacgcaaagaacctccgccggttggcctaaccaccacacaaggggttacccccctaactttataattgcgtatgcaattcaatatcgctcgcataattcacggagacggccatgacctttaatcggtatatttgctttcgtgccatccttgaatccataggtgccattgcctgcatgctgatggctcttattggcaataacctgctcggagtaatcgtggcagcgatcgcggcgctgttgtggatcggcggcgaagtatggggcatgactgtattccgacggcagaacccgcgacgcgacgagctttccgatatgcatcaaagcgcggccatgcaattcgcgctggtcagtttggtgggcattctggtaattgtcggtttcatctacaccacactgaatttgattgaccgctcgatagttcacattattccgccaatgctactgcccgcattggccatgtgcgccttggccatttccgatattcgatatctatggttggaacacgataccggcaccgggggcgacgatgaagactagtctgaaacttcaccgactccaacgcggtatgaagcaatccgacctcgccgatctggtcaacgtgcgacgtgagaccataggaaggctggaacaggggcaatactgcccatcattgcgtctggccatggatttggcgcgggtgttcggcaccaccgtagaggacctgttcagttttgacgacgagtacgaatcagaatccgagtagcccgtcggcgtgtcgcagaaaaaaatttccctgttgtttaccatgcacgtatcgccaatcaccgcaatcgttggaatagcaacgttttcagaacgtcaggagaccccgccgcaacggtaatgcggcgacaatatgttcgaacgttgtcacatgatgtgaccacgttgtcacaccccccttatccgttaacataattaccccttatataccggcaaaggggggtgtatggttgggggctgtaattgaaaaaagaccgattttctattgataagaaccgattttttattggtagtaaccggttctattgtggaggttcgaagttatgaagaagaagattatggccgtgctggccgttatcgccgcagttctgggctttggtttcgcaacgaataccgccatggctgatgattacggtgcaacggttacttacagcggcaccaccgctaccgtgacgttccctgcaggcacattccaaccgaatgaatccgtcaccgtgtactacgatgatgccatcgtcgccgacgtccagcagatcgctgaagtatccaagacgttcactgccaaggcagatggttccttgactttgctgtacacgttcaaggccagccaggctggcaagaccatcgcggtcaaggctgttggcgctgtatccggtaccaagaccgccaccattcaggttccggcaaccggaaccggtgaccagtccggtaccacgactgctaccaccgccaacaccggtgcggccatcgcaccgtacggtgtggccgttgtgctgcttgccgccgcgggcatcgccctgttcgccgtccgcaagagcaccactcgtcgctgacgtgactgacataataaacggtagacgctgaagcatagttcgcgaataccactgaaccgggagtcgatgattcccggttttttcatgttattgctacggtacataacgcacgcatattcgcgaagaatgctcactggaatatatgagggaatgctcacaacacttgagaagggacgttgttatgcaaatcatgtatgtatgcaccggcaatcaatgccgttccgtgatggccgaatactacacccgagccaagcttgccgaccgaggaattggcttgcagagcggcaatatcaccgtgcgcagcgcgggtactctgcactatcccccgcatcccgctgatccgatggttatcgatttgctgaagaacgacggcatcgacgcgaattcccattcttccacccctctcaccaccgatatcagccggcaagccgacctgattctgtgttttgagcgtgagcaaatttccgatttgcttgagcagaatccactggctattcgcaaagtatttctgttcaatgacttcgtgaacgcttgcaaacatatgcatgctgagggtccgattgccggcgataccgccgcagacaggctcatcgaaatcatggattgcgtacctatgctgcggccgtttttgcctacggcactcgaaaccgaagaccctcatcgtcaatcacgcgaggtgtttgaacgcgtgtatgcggagatcaagcacggcgtcgatattatgctcggcgctgtggcctgaatgcaatatcggcgaatagagcaagcaaaaaggccgtcagttattgcgatgttgaaattgcatattgctatattcaatacggctgatattgcgggttcttgtttccgcttttcttggtattggttaaatcagtgctattcgaggagcgcaatacgtaggtcaaatgttcttcaattatgcaatcatgcatgcatatgatttgtataatgcgaaattagctggttacaattagtgacgtaaataaaaacacgtgaccaatgcaataaggagagcaattatggcttcattgcttcagggattcgaagaggttcagctggtcaagccggtgggcaagaccgttctgaccgtcaccgattccgccattcgtttcaacaaagccaccgctgaagtgctcggattcccggcgtacgtcaaggtgctgattaacgacaagaccaagcaaatcgccgtgaccccgaccaccgccaaggccgacaacgccattaagttcagcaagcccgaaggcaagcaggccgcttcggtaagcgtcaaggaagccacgctcattgaagcagtgaaggcatacttcactctgcccgaggctccggaaggtgaaatcgcctaccagtccgtcaacggtaccgcctaccccgaaagcaagaccgtgattttcgatgtggccaatgccaccgctggcaccatgaagcgccgcggtcgcaagaaggccgcctgattcttctgccttgaaatggtgccctgattgaagacgaggggccggaacccgtaaaagattccggctgttccgctgacaagtcagcggcctcgtctgagacttaatccaagcagtaccagtacagcgatgatgatggccgtcgaccatccctgcccaacttggttggccagagcgatcaacaggcccgtcatcaggccttcccggtattgccggtcagatctcggacggttgtcatggtcgttgccttccatgagaacctcctctttagttgtaaccagtcactatgcctgctggcacaatgacaccgtgccaaggtgccacgctagtagttccttggtttggtctgtccagtgtacggggaaggttcgatggatgctggtatgctgtgttgtagcagaaaggtcgcgctagcttcggggcaatcttctcggcggcgccacagactttcgccccgttggacccaactgccgaggtttcctcaacctcagttgttaccaaaaaggtctctggctggtgaacagccagggaccttttactttttcaaattccgggttaagggccagtttccttacctcgatttgcaaggaaagcccgacgccataaggcaccaccactaagaatcgtgccgcaaccgcgctttgcgacccactcaagcaaataccaggcaaataaaattttggcggaattccaacgtttcgcacatgtggagtgcagaatacgcagtaacgaagcaaataaaaaagtattgcttcaatgtttgttgggcgggttcggcagtgtttttccgcagtgtccgatggcctcacatgcttagccggcgagcgccctgttgttgatgataagcaggcgcgagtggctgaaacattcaagaaactccatcgaggcgatatggacatcgttgcctacgaggatgagcacaagtttgatggggacggggacgagccggcgtagcatcagttcgcttgaactcacatattcatgtatatctgtgtatataagtgtatatttttacctagaacttatggaaggccaaaggaaccgtgcagcgcgggtcctcgcgaacccatttcgccagcgcgccctcggacgggtagccgagcttggcgacgaccttcctggtggtcatgccctccgtgaaatacaggtcaacggccctgcgccgatcctccatcgaaaacatgcggactccaatccggacgccaaaacgtccaactttccgtccgcccattaccatgtttggtaggcctcgatggtcggggcctaccaaacatggtaatgggctgctgcatactgcaatgcagcagcccccttttactattgatgaacaatgtcgtcatatacatcggaaaatgcgtaatctgctatcgcactcagcattaatctcaaaatactatggcgtttccgcattcgtccgagtcaatcagtggttaggaacaatcacgactttgccttcggccacatccttgagatgcttgccataggggctcttgccgtaacgttcggccgattcgaggagctcctccttggaaatccacccattttcgtaggcgatttcctccacgatggcgatgggcaggccctgggcgcgctgtacagtgcgcacgaactcgcccgcctcgtacagggaatccatcgtgcccgtatccagccacgcgtacccgcggcccagcgtacgcacgttcagggagccgtcctccaaatacatcttgttcaggtccgtgatctccagttcgccacgagccgacggcctgacccgcttggcgaactcgaccacacgctcgtcatagaaatacaggcccgtcaccgcgtaatgcgacttcggctccttcggcttctcctcgatggacacggccttcttatgctcgtcgaactcgaccacaccatagcgttccggatcgtcgacatagtagccgaacacactcgcgccctcgccgccttcggccttggcgacggccttgcgcaatgtggcacccagaccgttgccgtagaagatgttgtcgcccagcacgagcgcgcacggctcgccgtcgatgaactcctctcccaagaggaatgcctgcgccagaccatccgggctgggctgcaccttataggaaaagtgcacgccgtaatgcgaaccgtcgccgaggagcttttcgaagttcggcaggtccttcggcgtggagatgatcaggatgtcacggatacccgcaagcatgagcacgctgagcggatagtagatcatcggcttgtcatacaccggcagcaactgcttcgacgtgacggtggtcaacgggtagaggcgtgtgccggaaccaccagccaagataatacccttcatggtgttttccttcacttcctgtttcaccgcttgttgagttcgcgggtgacgtattctttgagggtttcctcccagtcggcgggcatgtatccggccgcctcgatcttcgctaggtcgagcgcgctgtgcacggggcgcgggctgaccgggctggtcgcgttagcgaaatactcggccgtcgagatgggcttgaccttgtcgccgttaccgttcgtcaaatcgaacacctcacgggcgatctccgcccacgacttgaccgcaccggacccggtcaagttgtaggtgccgtagggggcgtggctgtcaagcaggtggaagatcgcctcggccatgtccttggtgaaggtcaggcgaccgtactggtcgtccaccacggtgacctgattcagcttgtcggccgggtcggcgaccttgttggacagcatcatcatggtcttcacgaagttacgcccctcgccgatcacccagctggaacgcaggatgtaatgctcgggtgcgttggccacggcgatatcgcccgcagccttggtctggccgtacacgccaagcggggcgaacgcctccgtctccgtgtgttccttggcggtgccgtcgaacacataatccgaactcacgtgcacgagggtgatgtggtggtccttggccaccttggccagcagagccggaccctgggcattcgccttccacgcgatcggacggccttcggcggtctcggccttgtcaacggccgtgtaggcaccagcgttgatgatcgtgccgtacaggctccaatcgtatgcctcgtatgccttcgggtcagagaagtcgaactcgtcgatatccgtgtactcgaacccctccagaccatgcgcctccgcgtacgcgcgaatcgcgtgccccaactggccgttgcagcccgtcaccagcgtacgcttcggcgccatcggcttcgcatccctgagcatcggatgatgcagatccgcctcgctacgctccgactccgacagcggaatcggccaatcgatgtccagttccgggtccgcgaggttcacgaacgtgtacgtcttcttctgctccaggctccagtgcgcgttgaccaagtacgtgtacacggtcccgtcctcaagcgcctggaagctgttgcccacgccacgcggcacatagatcgccttgctcgggtcaagacgcgtcgtaaacacctggccgaagctctcgccaggcctcaaatccacccacgcgccgaaaatctcaccggccgcgatcgaaatgtacttgtcccacggctccgcgtgaatacccctggtcacgcccttgaccgcattgaaactgatattgttctgcaccggaccgaaatcaggcaaccccaacgcggtcatcttcgcccgctgccagttctccttgaaccaaccgcggttgtcgccgtgcaccggaaggtcaaacaccaacaggcccgggatgttcgtctccgtgaccttcagttccttctcgaattcaaatgccatacattccccttaatccctggctcccctctccgaggggagctgtcgccttaaggcgactgaggggagccaccaaacggtagaactcccctctatctactcactgtccctgctgcttgtacttggcttcggtagcggccttcgcgggctcccaccaggcacggttgtccgtgtaccacttgatggtctgctccaggcccttctggaaatccgtgtgcgtcggcttccaaccaagctcggtctgcagcttggtggagtcgatcgcgtagcggcggtcgtggccgggacggtccttcacccagtcgaatgcgtcagaatcctggcccatcacggtcaggatgtcgcgcagcaccgtgatgttgttgcgttcgccgttcgcgccgatcaggtaggtctcgcccagacggcccttggtcaggatggtccacacgccggtggagtggtcgtccgtgtggatccagtcacgcacgttctccccgttgccgtacagcttcggcttcagcccctcgaggatgttcgtgatctggcgcgggataaacttctccacgtgctggtacgggccgtagttgttcgagcagttggagatggtggcgcggatgccgaacgtgcggtgccaggcgcgtaccagcaggtccgagctggccttcgtcgagctgtacgggctggacggatggtacggggtctgctccgtgaacttggccggatcatccagggccaggtcgccgtacacctcgtccgtgctcacgtggtggtagcgcacgtcgtacttgcgggccgcctccaacaggcggaacgtgccctccacgttcgtcttcaaaaacggctccgggttcgcgatcgagttgtcgttgtgggattccgccgcgtagtgcacgatcgcgtcatgccccggcaccagacgatccaacagctccgcgtcgcagatgttcccatgcacgaactccacacggtcgcccaggatcggacggatgttctccaagttgcccgcatacgtcaacgcatccaacaccgtcacatgaacatcgggatgattgttatacacgtaatgaacgaaattcgaaccgatgaaaccacagccaccggtcacaatgatgttatgaggagtaaacacttcatcagccatgctctcatattctacaagagggtgggtaccccgtggaaacgccccgttggatgggcctattcggcgatgccgttatgacgcaagccgacaagacacctttcggcttccagtcacctgcaagcttcaagttcctggtccggtttgaactggcgttggacgtgcataaagcaaaaacaggccacattgcgatcatctattacatatgcctcaagcttgttgactgcttttagccagaaagacgactcatgagtttaaggatgatttgtctgtctttgttcaaatcgaattttctagcaaaaatcatcccacagttaacgagttcatcataatcctttatggtgaaagtgtaagggctgcccctcatccaatcgatatggcgcaggcatgattcagatgaatcgtcttctttgaacctgtatatacgtttcttgtaatcgggattgttgaatgcaagggtctgtataaagaattcatcagggctgcgagtattattaaatatcttctttatgcaatcctgatggtcaaggacgtatcttgcgaaatcgtcagggatactgaaccaattcgctccttttttgattacaatatcagtcgaaatacggttcagatgtattaatcgctggattaaaatcgatattttttcaaatactttgtagatagaaaaagtatgatctctgtttgctacacaaagttgtttttgaaataaatggtagtaccgtacaaaaggtatagttagttcaacatttttatgtgtagtgaaatgaatgaatatatcgtttcgatttcttaacatggtatggatttccttctggttcttcaaagggaaatccataccagatatcagatgatagtaattatacttaccaatccgagtagcgaggcgcaatagatttaactcacattgcacttgactgtattccgcccaatatacattgattcgatcacagaaataaagttgggaagaaacaggtctaacaatctcatccggattaattttagatttagcgtcgaggtgaagaaagatatcactgaattctgaatctaaagatctaattaggaagttaagctgctcaagattgttgtgtgccatgagcaggtacgcctgcttatcggatttatcagtcatttactatgccttcaatatattcaaaagcttcttcgcggagctttgcaagcgcttgatctggttgggtgtaatcgggaattagtgacaggtctgtctgcagaagtgaagaaattgttttgtaacgatctgtgagcttaagctgagtgaggaacgatacagcacgatcgtccttggacaaatcattatgcccggaatcgatgtaccaaaagttcttatggaaaatcgttgagaaagctgttccatggaaggaagtggtgaagactatctttgcgtatttcatgtagttcaagaaggcttccgggccatatttctttaccagacgaatcttgttcttccagcagcagcgaagagcccattctttgggttcaaagaagtataccggcataccggttttcttggatacttggtggaggaaggatgctatctcctgtgagatgctgaagcagtaatagaagatgtagtcgccttggatgattggggcactaccgagctgtactgttttttcccattctccttgagaaagtaacatggtggggtccacacaaagcgagatctctctgccggtggctgtggaaacccatttctttgcgttctgctcgcgaaccgaaatcttattaaacttattgacaagattaaggtagtgatccttaagagagctgtccgcaaatggattgttagcgccgaagctcacggcatatgcgtatcgtctgttgaaatcagaaacaaagttcaaataatatgcatcatcagcatccatgcatcgaatgttccatacctgatcactgccagtgatgaatttctgatacttggaattcgtggcggttaattctttattggaagtgtaggtatcctgtgacagacggaaatatttatgttcaaacgcttcatatgcggcagcctgctgcttgattcgcttataaacggtagcccaaagtgcattcttgataaatgacttaaagccagtaactttccaaaaggtgctgtacatttctttttgtccttgatttgaaaaatcaagaatttcattatcgacaccatatttgtcaattaaaactttttgaagagctaatgcttgcaacatggatccacagttgtaagaattatggaatgtaatagtagcggttttatcattacgagacattatttctccttttcgttgatacttaaatcaaacagatcgatgcttcggtaggcgtgaatttgcgttaatatgaaaagtctttttgaacatagagatgaatatgtcgtctttgattgcaattagatagatcagagacccaatcccgtagatgaatgcaccaagaataatttgaataatcagagtgataatcgttgggccaagaatctgaccgacaatccagacaatgacacccattaatgcccctattgggaagaatatgattcctgatttcaggtattgaagagttggaaagtctttcctggtgaataagtattgaacgcaaaatacagatagctcggctagaatggtgccaatcatcgtgcctaccgcctgcaaatgaggaattaagagcaagtttactgaaatattaatagccgcgccaaacaatgttgagatgacatatggcatatcttttttgtttggaatcaaatattgggttcgtatgatgttagcccagatcataaaaatgaggctaaagcttaagccaaatataataggtgagcttcctttgaattcgtctccaaaataaacgggagcaagaatattactgattcctgcaagaccaaaagccgcaccgcagacaagcatagtgaagtagcggaacgagatggcgttgtatttctttatttgattagagtccccggcagcgatgagattggaaatcctcggcagcataaccgtgccaaaagcggtaatgaggctgacggggatatttacgattcgttcagcattgtcgaatagaccaacttgagtcatgtcggacatggcgccaagcatgattttgtctaacactttgtagatgctataggcaattgcaggtatgaataatattattactggcttgacgttctttttcacttcagaccattctggtttgcagaatgaaacgaacttatgaacattcatccaaagatagatttgacttagagaagctcccagagccataatcagcgtatacaaccataagtcattgcgatcttttacgaagataaaaattgagcatgcggtcgcaactttgataatcgtgttcctgatgactgttattttgaactgttcaagaccaaagaatagccaattaatatcaagtaaatacgaaataacaaaaagaatattaatataggcaactatcttattgccattaaataagacaaaagcaaagatggtatatgaaaaaacggcaattcctgtactgataaactgaatcgcgtagatattccaaaatgtttgcgcagtctgaaccttgtccgttcggtacaatgcgatgcttcggctaccgtggttggtgataccaagcatgcctacaagaccaaaataatatgaaatggaatatacatacgaatacgtacctaggccagcagctccgagaaccctagaaacgtaaggagccgtaataagcggaagtaatatgaccaatatctgataggccatattataaacaaggttctttttcaaactagtcatgattatcctattaattttgaccttcatacctatgtctagttgaataatcacatatgttgatatatgcaaacatgaggaatagacagaagttagtcgtatatatttcaacaatggaagcaaataaatatactactattccccaccaaattaaggtattcttcttattcaaaaaactatcgtaagattttttaacagaaatcagaatgcaaacgaatatacataatgccggaattccacccataagcaaataatcaaggtaaagatcatgagcgaaaatatctttcaccaaatagctaagttttaaatgcacattacctgatagcgaatctgtgattccagttccaagtattgggtgtgacaagatgctttcaattgcagcgtcccaaatatatgttctatcagaaagcgtcaaagatttatgcaaaatatcgacaataagaaaactgaagatattctgaattctgaaaatgacaatggccaagaaagatgcaagtaacacgactagtgataagttggaactaattttccgatgtttcaattcaagcaaacacagaataataaatgctgctaaaacaataaggccagttccactaccacctattattaattcaaacgcacatataaagcacatagataacgatgttctcgttataattttattataacttctatatgctgtctccatattaaagaacaaacaagtcataattggcgcaaccatctgattctttgcgccaaacaaataataatatgatattgtattcgaacttattgtttgatataaaccttgtggaaaaaataacatgatgaaaagatttataaggacaagtgtatttagaccataggttatgcctttacatatgtttaaagtaccggtcgagctatctgcccatacagagaacagcaagaacggatacaatagatataaagacaactgaaaaactgacacgatattcgtattattcacaacagcggaagtgaaaaatataaatataagcaaaatggttagatatattttcgtatttctagttataaaactaaaagcatgggtattaattagaatcagaataattattattccaaagaaaaaatacctcgagtattgaacactaagtccaagtattggatatttgtacccaatcgcgctttggaagaaggggataatggcgagcgctataaataatatctgaagattcttgcttaatttcatatcatccccagttaaaactttttccttgtatctttttcacagccctaaagatgttcatagataaatatgcaacacctatatgtctgcttctaagaatttccagaaaaacggtatattttttaccgagatttatatctgaatgaattaaatcatctaaataaccattttctaatacttcaatcaagtcatcatgtaaatcattggattccaataatgaggtatatataatgcgtaatttttctttatatattgcattcattggataatttcttcgtttgaataaattctccaatttatccagttgagacaatctgcgtttaagattattatttttatttgcagagacttgtaaaccattattagataattcgtagatatataaagatgaagatagtgctttacaatctttttcactcttctcgcagtaatctacgacgaatagataatcttctcccatatcaacggttgtatccatttttatattattatcgttgataatactgcgacggaatattttattccataaaggattgaacgcttttgcttcttggaggttttcgatgaattcatataagcgattattgggatatgatttgtcgtcaagcttttgctcgaaagcgtaatctccgttattggatcggaccttgtatccgcatgccactagatctgtgtcatcctgcatattggatactaactgtgaaatcattgtagggctcatctcatcatctgcgtccatgaagcaaatgaattcacctttggcttgtgatagcccgtagttgcgtgctgcgcttgggccactattgtttatatgccagatcttgagcctattgtctttatcagctaaggcattgcaaatgttcaaagtcgaatcagaggaaccatcatcgattacaattatctctaaatctgaatactcctggcaacgcgctgattgtatcgctcttgcaatcgtcttttcagcattatacgcaggaagaattattgtaactaaagacattagtctccctcatacggataggttatataaccttcgatcgcattgtctttatggattatttttcctggatttcctagtacaatgctgttatctggtacgtcaaaattgatataagagcctggagctatgagtacattgtttccaacatgtacggatcctacgattatcgaattcgttccaatccaaacataatcacctattactggaaatcctttatgcttccctctattttgagcaccaattaatacaccatttaataaagttacattgctaccgattttagccttagggttaactacaattccacctaaatgctcaatacgtagcccttttcctatctgtacctttgctggtatatcggttccatatttaattttatagtgctcgaaaagaagcctatatacaataaaaaaaggtaggaatctatttctccaatattcgcattttcgtttgatgcgcaaaaaacgatattgcggtattacatatggaaaacgatgatcagaccatcgatgcttatccgctttcacaaatccatccattttaacgccttgccgtgctggagactatttctctatacacatttaaaagttgctgatagttgttttcaggtgtgtatttgtcctcataatcccgacgggcattcatacccatctttttgcatagctctggctctttccataggccgcgaatggctgtaacccaaccatgcatatcacccaacggaactttgacaccgttgactccatcgttgactgcttccgcggaaaagccaaggtcggtcgcgataagcggcagtccgagactttcagattcaatttcgaccatcgagcagccctcgtaccaaatcgagggaaacaccacgaactctccggctttcgcaatagccatgcactgctcatgcggcgtatatccgaggaaatagacattcggcttcttatccgcccaagccttgaaatcgtcctccaacgggcctccgcccatcaccaccagcggaatgtcgtcaatctcattccatatgcgttgaagtacacgaatgcctttctcagcaccaatgcgaccataaaaaactgcataccgctcaggtaaccctgatacacgttcagcggccatattcgcctgagcatcaggaacaaaattatattttttaactatcttcgatgaatcgaatccgatacccttcaacaagtcgatctgattctcattgaggcaaatatatctatcgatttgcttatagaagcttcgacgagcgcgatggtatttgaagatgcctgccacgagaagactctgaagacgagatcctttgaaacatgcatgacgagtcatacgcagataatggccgtcaccacattcattgcaaatcttcccatcgcgcagcgaggttgccacagggcatacaaaacgtgtgtcatgcaatgtcgccactaccggcacacccatacgttttgctgcatacagaattgacggggacaacagcgggaaaaatgtatgcacatgcactaggtcaggatggtgctcgcgaatcagagagaccaccgctcggtagttcttaaacgaccacagcattccgaacgtggcggccaacttacccgctgcgtccgccttgtcgaactcatcattcgacaccgtataacggattacttcatgaccatgttcctcgagcatactggtttcactcttgaatacttgatcatcgccgcttgcggaacctgaacgatggaagttgtgaatggcgaggattttcatcgtttcacccttccttctgctctctgccgaggaagaggtttttgtattggtcggcgatgtgctgccagctgtacgcgtcggcgatgcgttgtttggccttgtcgcccaacgcgtggatctcgtccggatccatggcgtcggcccggtcgatcaggcgggccaggtcgccgggctccttggaccagtacagggcggcgtcccgagcgacctcgcggttgaagcccacgcccagcagcaggttcagatccgtggacgccaacgcctccaacaggctcgggttcgtgccgcccacctcgtgcccgtggaagtacgcgtacgcgtcctcgcggatcttcatcagaagctccctgtcgtacacggtgcccacgaacttgatgcgcggatcccggtcgaaatgcgtcttctccttcaactcctcgaggaacctgtcgctcacgttcgtcaccagcgcgaagtccctcttcgagttgctcgccatgaactcgcggatcatggtctcgtagttgttctccggcacgaaccggccaaccaccaggtagtacgacttcggctccaaacccttcgacctgaaccagtccaggagcttcgggtcgacgtccgccagacggctccgccgcccctccgctccgtaggcgatgaacgttgtctgcggacggtacctcgcgtactcctcgcggatgtacttctccatgtttaccgaatcgcacaccatcaggtcagcgtgcttcgtcatcatccgctcggacaccttccagtacctgcgcaccggcgcgctccacttcgcgcgcatccactcgtgcccgtccgggttcacgtacagtttgccgcccagacggtggaccgcgcgcgcgaaatgcgccgtgaacgggccgatgcggcacgccagcacgtacacgattggatgcgggatacggttgcggcgaatatacgccacacaatccgccaacgccgccacgtcataccagattgcctgcgccggtccgatctgcggcacccgtacccggaaacaacgcgcgttatggtacgagaactcacccgactccgacagcgacttgcacgctacgtggtatctcaaccccggctcaccctcgtggtactcagtcagacgatcaacgaaggtctcataaccgccgtaactgcccggaatccccttcgaccccacaacgaacacatgctgaacagccgacaccccactcacgccacaacccccacaaaactgacatgacggcccttatcggacatcatgttgctaccgttcttgctgatctcatactgcgatttcatgtgctcagtccttcgtcttttcagactttttgtgctggatttggcgcttcctgccgttgtcgtcagactcgtcgccgtaatagtaatagccacccttctggggcttctccgtctcgccgtaattcatggccaagcccacgggatcgatgctcagtgtgctcagttcgcgcccggtctgcttcagcagtttcttctccgtaacgcccaagccggcaaccaacaacagttccggaccatccttagcgaatacggcggcatcattggccacctgcatgggggcggtatcgataatcacatagtcataggctccggaaacctgctcaaccagtgccttcatagcgcgggaattcagcagaatgctggggttcatggtttgttttccagcaggaagcacgtggaagttcggcttccagtagcgttgaatcgcatcatgcgacgatacacggttggtaatcagatgggtcaagcccactgcgccctcaatgccgagagccttgctcaccgaggggttgcgcacatcggcgtcgatcagcagtaccttgctgccgttttcggcgaatgcggtcgccagattcgtgctcagcatggtcttgccttcggacgggccggtggaagtcaccacaatcacattggataacggctcatcgggcagcacgaacatcacattggtgcgcaggcgtcgaatctcttctgcctcgcgggaggccgggcgggagataatcaccggcgacgtaccggcataagcctcattgcggctcagcgagcccagcacgggggcgtcgataacagcggtaacatcagaatcgcggcgaacacgggtgtccagcaaatccttgataagggcaaccacgatgccgagaatgacaccgaccgcaagacctgccgccagattgagcttgacgttgggtgagctgggggaagccggagcgtacgcctgctgcaccacagtcaggttgacgggagagatgatcttatcgccctcatcgctgtaaatcgtggaagtaacctgttttctcaggttttcggcaaccgaattggcaatactggacgcctgcttcgggtctggattattaaccgaaatatccaccagcatggtgtcctccgggttggaagcggtaacgctcgcagccaatccctttaccgtggtgtcaagccccagatcatcaataaccggctgcaatacagactcggtttttaccaactgcggatacgtttgaatctggctattgatgtaattggcgccagagctcagctcgcctgcattgctggatgcgcccgctgcagccgctgaactgcgataagtggccaagagttcggaagtcgcggtgtattgcggagtgcgggtaaaggtgtacgcgcagattgccaccatcacaataaccagtgtgaccactgcggtaatcacatgctttcttaccgcattgaataaatcgagaatggtgactccattaccatcttgcacctgttcagcttcatccacagccatactccgttcttccttattcatgattccaccttaatgtataggggttgcccctttaatcaaccaagggggtctgtctcaaaatcatttcattctcatcggccgcaggactggccagcacatgcaccgtggtctcgaaactttcccccggccgcaatgtcacggttttcacacccaccgtcagtccatcgtgcacagcgaactgatcgaaatcctgggtccaatccacaatgcgcccttcatcgggggcgtagacgtacagtaccgtttcgatctcccctgtacgggggttgccgttatggtcatagccgcgcaacagatccggagcggcattcaccttggcggcatcggccgtattcgtcagtttgatgtgaatggtgtattgcttggcgccactgggataggttttgtcatatgtactggtcacttcacgcttcaggtaccagtccatcttgcccatggtggcgtcgttgaagtacacgcccgtaaccgaatgagccgggttcgactgcaattcgccggcgatggtcgtacccgagatacgctgctgctcgccctcatgagcactccatacatacagatggccgtcggatacggacttctggaacgtttgcaccagctgctgattcttgccgtccacattcttgagcacatgagtgaagatctcactggccgccatcgtgaagaagtcggtttgctccgcctgcgtatcggtatcaatataaatctggttcagaattcgctgctcggcattgtcgccgctcatcaccgtgccgtcggagagcgtcacggggccggcaaccttcaataaccgctgcaggaacaccgggtccacgctgatgacgccatccacaccgtcatgaccggctcgatgccagatctgacgcgcgatatcagcaacgcgcgggaaatcgggagtgaaattgatgtccggatagtctgtggccatcttggtggagaagagattgcgttcttccgccgtcagtacgctcgcggcttcatcctggctgaacagaccattccgaggcggatcgccgaacgtactcatgctgattttgcctgcatcgatggtgagcgtggcccacgcagtcggaatgcctcccgtggcacgcagctcagcattgttctgtgccagcactaggtaggttcgcgggccactgctactgccctcgccgctatccaagtcgaacatcttgggcagcacatccgccagccgactggccgcatccgtcaggctggcaagctccttgaacttgctacgcccctgctgcaccgcctcggtaatctgcggaatatgcgtatcgccaatcttgcccatgtctacgctggcatccgccactactccattggcggcggcaagatcctgagccacactggccatatcccccagctgaatcgtgccgtctttgataccgatgctgttgaaatccaaggcctgtgccgccttggcaagcttcggcaatgcgttgttcgacacgtcttccaaaatgtgcaccatgtctcgcgcggccttcacgtcagaaccgtaatagggcaccaatgtggccagtttccataccggctgcttggtctgcgcatacgtagcgtcgatatgctgggagaatgcttcaatgctggcttgcgctttgtcggtgtcgccggcttgaacttgtgattggatgcggcttgcggcctgaatcgctgcttccacttcatttttcgctttgagcgcggaaaggccgagccacgccgcgagcgcggcaatagtcaacagcagtgcgccgattacaatcagcaccatccgaatgcgctttttgcgcttgatccgcctgatatgttcatggctcatacgccggcggtgcttacgccgttccgccgctcgggcgtcttcagcaagtacctcggggtcaacatacggctgtatcacttggcgatcatccgcgttttccgaccgctcggagggtgccggcggctgaggtatttctggtgtgttcgaatcagtcatagatatatcgacttatctttctggaatcacgttcaagggcggggcggcaagggcgcggcaagactgaagcagcgaaacggaaaggaatcaatacgctcccttgtgactcagcacggcaccgaccgtgcggaagagaagcacaatgtctcccataatcgaccagttctgcacgtaagccacatcaagggcctcactctcttcggcagacaaatcggagcgaccggacacttgccacggaccggtgatgccgggcttgaccagcatgcgggtggcgtacagacggttgtaacgggcgtattcctcaggcagcggcgggcgcggccccactacggacatatcgcccatccacacgttgaggaactgcggcaactcgtcaatggagaagcggcgaatgaaatgccccaccttggtgatgcgtgggtcgttcttcatcttgaagatgaagcggtcggtctggccggtttcttttgcgagctccttcttgagcgcgtcggcgttcaccaccatcgaacggaacttgtacatctggaacggcttgccgcgcaggcccatacgggtctgcttgtagaacaccggtccgccatccgtgactttgatggcgatcgccaccgggatggtgataatcaacgaacagatgatcgctagcgaagaaatcaccaagtcaaacaggcgcttagccatacggcgggctggcgtgtactgcgcaagacattgcgtgataatcgtggtgccctgtatggatcgaacctgaatctcatggttagaagtgtcagcggcggaagccagcacggcaatctccagaccgaacgattccatgcgcacggagaagatatcgtaattatccgaatagcgatgcagctcgtcagccaccataacggtctgcgcgttcatgtcaataatctgttcagcaagattatgatcgctgtactcgagtacgggtagctggcagccctcgttcttttgcatctcctcacggagtgtctcatggtcggtgctctgttcaatcaatccggtatcgggattgagatgaatcgggcatactgccaccgggcggtagttgagttgccgacgctgaccgaggaattttagcgtgcgaccaatgccgtgcggggaaccgatgatcaccgtgccgtaagcgtaggcgcccttgcgacgactacgcgtaatgaatgcacggctggcaatgcgttccaccatggtgagcaaccatccggcaatcaccaccaagcagagcgaggtaagggtcagacccagatcgaagaagtagttgaacgcgcactgcaccacccagcacacgaccatgcctttgaccagcagcacattgagctggtaaccgtcacccataacatggcgatgataaatgccggcgacatagagcgaccacacccagaagcaggccacaatcataaagtaaacggtggagtcaatcgtgaaattgaatctgctcgaatagaacggcgttgcctcatgacgcagattgagcaccgtggctccggtgatgatgtacatggcggcgtcgataagcatgagggcgagattgacgaagaatcgccagtacagcacgtggctgagctgcttttggcggatatcactgagctgagcggtggttcggtcaccgctattggcctgtctgctgcgtgtagacggctgaccgttactgctcagagatgacatctcaaacaccaattcttccttttcaaccgtataccgcaggtctcgcggctctcactcctctggattcccctgtgtacgggtgtatacggggttaccccttcaacatggtacagacatcacacccctaaccgctagggggggggtgttggaaaaccacatagcgaacgtgatcggatagtaactacgttcattttgacgtctcgaataacgggactaatttgctctgcaaccgggcggccagtcatctcggcattgcatctcgacggactacccctgggtgtagcgtgttggggttgctttgagagactgcctgatgcgttgttgcggtcgatcagcgagagtggagtatgcacgtgagtggaatgaacggagctcggggaatcaagaatcgtcgcggcgaactgcagcgggtgctgagccgcgaggaatcatatgtagacggcaaactcagccgggcggcgttcatctccatcgcgatattgacctttattaccttcgtgggcaacttcacgcagttgcagctgagttccgcgctgccgattatcgtttccgaattccacatctccgtaaccaccgggcagtggctcacctccgtgttccagctggtcatgggcgtcatggtgccgctgaccgcgttcctgacccgtcgtttctccacccgccagattgtaatctgctcgatggcggtgttcacggtcggctccctgctggcatggttggggccaaacttcgtatgggtgctggtcgggcgcgtgctcgaagctgccggcacgggcgtgatgtggccggtgctgcagatcaccgtgttctcgatctacccgctgtcccgacgcggctttgccatgggcacggtgggcatggccatgagcgtggctccggcaatcggccccaccttgggcggctggcagaccgacgccaatggctggcgttccatcttcctgaccatgaccgtgattggcgtggtctcgctggtggcggccatgttcggactgcataatttcggctcgcatgacccgtctgcccgcgcggactttttctcggtgagcctgtcggtgattggctttggtgggctgatgttcggcttcaccaattcggagacctatggatttgcggcaccggtcacgtgggggccgatggttgtgggactggtcggcatcgtgtggtttgtgatgcgcaacctgcgtcacggtcggcggtatcgcgaagccaaggcggcgcagtcgggagcggagccggccgcactcccccagcctccgctgctggaccttgaggtgttgaagaatcggtcctttaccgtcggcaccatcacggcgtctttggcgttctttgcgttcagctcgattctggtcatcatgccgctgtacatccagaccgaccgtggttactcggccaccatgagcggcctgatcatgctgccgggcgccataggccagtgtgtttcccaattctttggcggtcgtgcgatggatcgtttcggcgcgcggcccgtggcgttgtgcggctcgattgtgctgaccgtcggtacgatcggcatgtctttggtgtctatggatacatggatttggtgggtgtcgatctgccagttcacgcgccagatcggcatgggattcctgcttatgccgattaccacatggtcgctgaactgcctgaacgggccggatgaggtgtctgccggatcgtcggtcacgaacaccgcgcgtcagattgcgggcgctgtgggcgcacccgtgttggtgattctgatggaaacgtttgccgctttgcataagcagggcggcgcctccgccgtcgccgcttcgatttttggcattcaatgggcgctgcgcatctccgcaatgatctgtctggcaatggtgttgatggtgttcttcggcgtcaagggcgacggtgccggtcgtacgcgagacattatttccttgcgcgcgttgcgcgaacggcgtgcgcggcgtatggctgcgaactgacggcagattcaaccattcttaacataataagaagccccggtttccaacaccggggcttcttattatgttgtgctatcgcaggatttcagctggagtctattacgccctgcccattagcgtcaggacaatcagcagcacgttgagcgccacaatcagcgccacgacgatcataaagatcacgtgcttgacggttccatcagcccacttgcccatgagttccttgttatgcgtgtaccgcatcagcggaatcacggcgaacgggatgccgatggaaagcaccacctggccgatgaccagcgcctgagtcgggtccttggcgaaccacagcacaatcagtgccggcaccagcgtgaccacgcggcaggcccacatcggggcgttgacgtgcagcagaccgtgcatgatttccgagccggcgtacgtgccgaccgatgtggagctcagcgacgaagccagcaggccgatggaaaagatcgtgccgatcaccgggccgagcacctgcgtgatcgcccgctgtgcgccgtcgatggagtccgtgccagacatgccatgcagcgagttggcggcgagcaccaacatcgccagattcacggtgccggccagcaacagcgcccaggccacatcgattttcgagcctctcagctgcgttttgatcgacggcttttcgccgcctgcgtaatggtcgttcaccagcgtggagtgcaggtagatggcgtgcggcatcacggtggcgcccagaatcgaggcggccatcaacaccgagtcggcaccttggaagcgtggaatcatgcctttgaccacttcgccggggttcggcggggctacgaacagacccgcgatgaagccgaatgtgataatcagcagcatcacgatgatgatgcgctcgaatgtggtctgtgtcttgccgccttggaaccacagcatcaccgtggagattacgccaatcgccaaaccgccgatgaacagtggaaatccgaacagcaggttcagggcgatggcgccgccgatcacctcggccagatcggtggcgatggcgatgacctcggcctgcatgaagaacatgaaacggccggcatcgctcatacgctcgcccagcagttccggcagggatttgttggtcacgatgccgagtttggcggactgatactggatgagcacgctcatggcgttggcgagcaccagcacccacaccaacaggtagccgtatcgtgcgccggaggtgatgttggccgccacattaccaggatcgacgtaggccacggccgccacgaacgcggggccaaggatgctggccagcgcatggtcatgcggcttcttattgttgttcgtccctgctccggccccggttccgactccggcaagctggcgttccttcccgatttccggtgtttcctgttcgatgtctgccacagcgttcgtcatagcggttgccgcagtggcatctgcttcggtgtgtgttactgccatatcgtttgtacctgttcccttcataccgcgcacagttatagcgcaggcatgtttcccgagtcaacagacggacaatctgcggacgattgatggatgaccggcggactggcagctggcatttcccgccatctcgctcatgaaatgtgaaaaaccgccgaaaactcgctcatgaaatgtgccagacggtagaaaactcgctcatgaaagtgtaaaatcattgatatagcagtaattcggaaaggggctcctcatgtatctcaaacgcaaagccgatgcctatctcaatgcatggaaatccgacccgaatcgctccccgctaatcatcaagggccctcgtcaagtaggcaagacagagactatcgattactttgccgcacacaactaccgttcggtagtggaaatcaacttcgttgaggaaccgaaatatcgtgcaatcactgcggacggttatggcgcgaataccatcgtccgcaatatttccctgatcgacccagccaaaaagttcattccgggcgatacgctcatctttttcgacgaaatccaggcccatcctgatatcgccactgcactgaagttctttaaaatcgacggcaaatatgatgtgatttgcagcggttcaatgttgggcatcagctataagcaaatcgaaagcaatagcgtgggatataagaccgactacgaaatgcgatcgttggacttcgaagaatttctgtgggctcgcggatacgatgaggccgtcatcgaaagcatgttcacccacctgtgtgatgctacgccattctctgaagtggaaatgaacgtcttctccacggcatttatggattactgcgtgcttggcggcatgcctgcggttgtcgcctcccatatacgcactggcacgttcgagggaacactgcaattgcagcgccagcttattttggactaccaggaggatatccgcaaatacacgcaaggacccgatcaggcacgaattctcaacgtgttcaaccatattcccgtgcaactcgccaaggaaaacaagaagttccaaatcagcaaggttgccagcggagcgcgtttcaaagactatcgaggatgcgtggaatggcttgaaacctcgggaatggtgaatatctgccgatgtatgtcctatcctgaactgccgttgaaaggcaattatgacgaaaacaagttcaagatatatttcggcgataccggtctgttcgtagcgatgcttgacgacgaggccagtgatgatctgcgggccaatcgtaatcttggtgtctataagggtgctatgtacgagagcatcgtctctgaagcgctacgaaaatccggctatgacctgtactactacaaaaaagaggattccacactggaacaggatttcttcgtccgcacgcgcgaatggctggtgccggtggaggtgaaatcgaaaaaaggcaccgccaaatccatgcggacgctaatcgcttcggattcttatccggaaattcagttcggcgtgaaactatccgccggcaatatcggtagcagcaaacacgtgttcaccgcaccatacttcaccacatttttgctccgacggctcctgcgcgcttatgacgaggggcaggcacctatgctcaacaatcctgagcggtagcccctattcgtctgcgggcacggcctggcccgggcaggtatggaggacggcgagcatggcatccttttcttgggaggtgacggtgagctggtacttgtctttgacgccaatctggcgggccacgtagtcgcaacggtagtcggcgttggtgggtagccagtaggcggcggaagccgaacccttctcctgattggccggaccgtcgacggccagcaggttataggggtcattgccgaattcatggcgtttggcagtggaccagtcgtgcgcaccggattgccaagcgttttcaagggccaccacatggtcgatctgcactttggcgctggtggcgcggccacgtacgaaatggatggtctgggcggtgtacggatcggccagtgtgccggactcgaccacacaggaaccggcgtatttgtaggtgatgtccgtgagatcgcgggcgagcacgtcgtcgcgtacgtcgcagccattgccgtcgacgtcggtggtgcggaaaccgaaggaatcgcggtcgtagccggaggagctttggttgtcgtctacggcgagcgcgttcaaagtgtcggcggctgaaccggtggcagtgtagccaccggtgattttggccacgtcggagctgacctgcggcagtaacaggccgatggtcacgccgattgctacggcgagaacgatgagaatcagcacgcgctccagcggtccagaggcgttgaaacgacggcgaaagtgggcgttacgacgtgccatcaatcacgcataggtgaaggtgagggggtcgtggccggcgcgggtggggccgtcgagggcgtcgatggcagcgtgttcatcggcggtcagggcgaagccgaacaggtcgagattctccctctgacggtcggcatgcacggacttggggatgatgatcgtgccgttttcgatgtgccagcgcagaatcacctgggccgggctgacctcatgggcggcggcgatcttctcgatggtgccgtcgccggcgttgaggtcggcgccacgcgccatcggcgagtaggcctccacggcgatgccgtgcttcttgcagaacgccaccacttcgcgctgctgccacgtggggtgcagctcaatctgattgacggccggccatgcgccggtctccccgtgcagacgcttcagatcggcgggcatgaagttgcatacgccgagcgtgcgtaccatgccttcgtcgcgcagcttgacgaacgccttccaggtgtcggtgctgcgccagtcgaacggcgtgggccaatggatcatgtacatgtccacgtaatcgagctggaggagtttcagggagttgtcgaatgccttgagcgcggagtcgtagccctgctcggagtcgcgcagcttggtggtgacccacagggtctcgcgcttggcaccggtgttgtatccggaagcggcgagcgcacgacccacgccggcctcgttgttgtatccggcggcgccatcgatgtggcggtatccggcttccagcgcagattcgacgacaggggccacgccctcgtcatcgatacgtagcacgccaaggccgacctgcggaatggaatggccgtctttcaaggcgatgtccggcacgttggcgggattgatgtgtccgttggtcatggcttgtgatgctccttcatgtactgcaactacacgccactgtacacggttatgcaggcgatgtgcgggtgctgcaaccaaacggcatgattgcgcccggccttccgtgtgggagagccgggcgcaatcatgacaacatcacgctctactcctgcgaccggccctcgccctattgttcccgggcgcgaatttgccccggtacaggcgtcaatcgattgacgtttgcaccggggcagaaatcgttgtcccggtacgcaatttcgggccattttcgagaaccaggacaagacaatccccaaagtccacataccccgacaaacagaatcggcggaatacagccaatcccgaaatcaacatactgtcccggttctcacgtagaacgattgacgtgcaaaccggggcaacgggaattgtcccggtacgcgaaaaacacccgttttcgcaaaccaggacagtgatttctgtcctggtacccacatcaaacgattgatgcacgaaccgggacagaatcgcatcgctgcgccgagacagacgcatctgacagccgacaaccgataaacgacagccgacagatggcatctggcagccggttgccggctgccggcaaccgcatcataatgccgcatcagtctctatcaggagcgcttacgacgcaaagcaagcgagaccccgccggccacgccgagaacgacaaccgcaagacccacggcagtcaccgcgctaccggtattgctcagcacaccagtgatcttgtcgccattcgcaccgttggtcttatcgccctcgcccgtatcgggattgatagtagccccgccattacccgcaccgtccgagccgttgccggaaccaccttcggcccgagcggtaaccgcaaccgtataagtttcggtgacattcggattcgacttgagcgttacggtaaccttcgccgcatcagcgggagcggagaaatcgtaatcgagcgtgaactggtcggcggaaagcgtcacgttgcccatgcctgcggaatagttgcccacgaccttgagatcatggtcggcatcgatggcatcgcccacctgataggtggttttgcttggcgtgacggtcaggctggagacctccttttgggcgaggccggcaatggtctgcgtggcggagaaactgtaggcatcggatgcccaaaacttcagcgcgcgcttgccgtcggcggcgttgccactgtcttcggtgatggacgcaccggtgccggcaatggtccagttcttatcattctcagcgttctcgaagctgccgtccgttacgtaatccttggcgggagtggcggtgacggtgatggtgacggtcacgtcgtggccagcgttggtggtgccggtgatggtgtatgtgcctgcgccacgaatccagtcaagcgcagcggattgccaggtcacggtttcggtctcgtccaccccatcctgatagtgtacggccacctcactcggcaattgcgctttgatcgcgtcgatggaatccgagtcagtcgcggtaatctccactggatctatcttggtgaacacatgatcggtgacggcaccggtgtgaatgtacttgaacgtctgcagagaggcgagcgccttgccgccggtgcccacgggcgcccatgcgggctcccagtagaacacacccaggccgtcgttttcgccatcgccatcattgtcgccgatattgttcacggcctcggcgaccgcgcgaatctcatcggcctggccttgcgggctgatgtcgtatttcttgaggttatcggcggttactttactgggcactgtgttggaatcgtcgtcgccatcatccaaggtgtatgcccacgacgtttccgccatggaacaccggcaacaacgtgctcgcgtggcatggcgtgtactggcgacagtcaccacggcgaccccgccatggaacgtggcacaaccatgcgggggacgctctatgtgcattcagtcatgctgccgatgctctttaacttgcatatccacgggggcggcacgaggcaattcggccgcctttacccgtacatccatggggcggcgaaaatcccatggggcggtaacttgcccatggggcggtcggtaaaattttaccttccgcagaatagagccattttcaactaccgccccatgagggattcaccgccccatgaggaaatcaccgccccatgggacatctatataacaacgacttcgtgcagcagcaccagcattacagcaatgtcgttcagcgtgtggaggcgcgggcgatgacctgggattcggtggtgagcagttcggacttggtgatgctgccgtcgatgcgtccgaggatgcgatccactgccgtgggagccgtccagtcaaggcgggaatccatggtggtcagcggaatctgcaggtagggggcttcctcgttgttatcgaagccgatgacctgcacctgcacgggcacctcataaccagcggtgcgcagagcggtcaatgcgccgatggccaactgatcgttcaaggcaatcacaccgtcgaatggcacgccggaatcaatgagccgctgggtcacacgggcaccggctccgatggtccaatcctgatcggtgttgccaatcagctgcggatccaaggagagcccacgcctacgggtctcttcgatgatgccgcgcagacgcagctgcgcgttgccttctacggcattcagcaatgcatcttcgtcgtaaacgtcacgggcaccgatcactgcaagtctggtggaaccgcggtcatacaggtagcctgcggccatggcggctgcggatacatcatctggggtcacgtgatccacaatgccccacgtggtacgcgcgccaacgatgaccagcggaaaatcaaccttcagatcatcgggcgaaatgttttccacctcgctcatggaaaggatcatgccatcggacaccgtggagttgaacttcttcagcagatcgcgcgcgcctttcgcggagccttccgcatacgtggtgacgtatacggaatagtcgcgctgacgggcggcctcgatggtgcggttggcgagctcggccagatatggcggaatcagcgaaggcacggcgagggtgatgaagccggtgtgatcgcggttgaggttgcgggcggccacgttgactcggtagtcgaggtccttaatgaccgactcgaccttggcacgggtctcatctgtcatacgcccggagccattgatcacgttcgacgcggttttgagcgatacaccggcggcctgagcgacatcgcgtagcgtcactcgacgcttggctgttttctcgtcgctcatgccgcactcctctatccggacaacattgccattctagcgcggtttagcaggacgttttagcgataagaatggcgttgcggttcagcgtatatccaacggcgtcagtctcgcaacggtgggcgatgatgggatcaccttccacaccgttgatggcgacgggctggtttgagcggttgaggtagaaatcgaagcgggtggagccgtctgcggatcggcggatggtgtgcaggatgcggggatctgtggtgggataggttggagtttgaccactctcagtcggctgcgccgacaactcccgccagcgggagccaagtgctttgagcaactgggcaatgtcgtgacggttgaggtcgcagcccacgtagatggcggtaccgttgccataggggcggctggtgatggcgggggtgcgctccagctcccagtcggcggcggactcacctgcgtaagaggcaagcactgtggtgtccgcggctacggaagtcacgtcgttctgccacaggcgggtcgtcagaccattggacaggctgatttcgctgggctcgccttcggcttcttcaccgaggatgttgaattcttcggagcggatgccgagcatgtcgcgtaggagcccgttgccggcgccggggtagccgccgaggccgatgtggaagtgctcgtcgatcaggccggcggcatagccgacgatgacggttccgccggccttcgcgaagtcggcgatacggagaacgtcttcgtcggacaggctgagcacggtgggcagcacgatggttttgtagccggtccagtcgtaggcgagcggcaccacgtccgcgcgcagcccggcatccaggaagccgcggtaccagtcgcgcacgtcgtgccagtggttgagtttcatgctgggcagggtttcggagcgtgtggcccattcggattccgcgctgaacaggatcgccgtgccggcacgctcgagctcagtgccctgcagcccggcgtcggagagggtcttcagcgccttaccgagctcgcatacgccgcggaagaccttggaatcggcgcccgcgtggggcagcatggcggagtggaacgcctcggcgcccgacttggattgccgccattggaaaaagcagatggcgtcggcgcccatggccacgtgggccagggagtcgcgcatgagttcgccggcccgtttgcgtgtgttcagcggcttccactgcacggctgaggtggagtgctccatcacgtaccacggcttgcccagcgcgagggagtccatgagcgcgtccgagcaggcgagttcgtccaggtgggattcgccctcatggaagtagtgatcgttggacacgaagtccacctcatccgcccatttggcgtagttcatgacgcactggtcggtggagaccatgaagttcgtggtgaacggcttgtcggggcagatctgctcgatggcgtcgcgttcggctttgtagaagtcgagcagcatgtcgttgccgaaccgctcgtaatccaactgctgcgacgggttgaccatggcgtcgccgcccatgtgacgtggcagcagcacctcgtcgaaactgttcacgtgctgcgaccagaaggccgtgccccacgcctcgttcaacgcgtcgatggtaccgtacttggcctcgcaccacgtgcggaacgcagccaaggcgttgtcggagtagtcgtagcggttgttccagccgtattcgttgcccatgtgccaggcggtcacatacgggttgtccttgtagtgttcggcaagtttgcggcacaggcgcagcgcgtattccttgaacaccgggcttgtgggctgccacgactggcgtgagcccgcgttgacggtatgaccataccggtctaccggcagcacctctggatgggattcgtacagccacagcggcgcggcggctgtggcggaggccaagtccacggcgatgcctgctctgccgagcctgtcgatcacatggtcgagccactcgaacgtgaacgcgccctcgaccggctcgatcttgtcccagctgaaaattgccagcgatacgacgttcacgccggcctcacccatgagacggatatcctcgtccagcgtctcctcgggccactggtccgggttgtagtcgccgccgaacgcgatgccgcggccggattccgtcagcagggacggccacctaaatgctctatgagtagtcatattaatcaaatcctttattgtatcggctcatggccggtgctgtgtttgccggttttgggctttggctcccctcagtctcactgcgttcgacagcgtcatcggcgctttgatcaaggcgtgaatgctgcgttgcgttactgcattgccatgttgccatgttaccgcgttattgcatcgctacgttgccacgttgccacatcacattgcattgccgcattgctgcgttgccgcatcacatatcgcaacacaaacgcagcaacgcaatgacgaccggagatggcatcgccgccacccgcgaggaaccgcagtgcaacgcggtaacgtaacgcaatgcgatgtgattcccgcgtagttacaggcagttacagattgagtaccgcatcagcaatgcgcatggcggattcgcggtgggagaccagcaccacagccgcgccgcgctccttgtctgcatgctgctcacccacggccatagcgtgaatggaacgtagaataatagcctcgttcaaagcatccaaacggctggtcggctcgtcgaaaagcaccagatcagcattgcgcaggaacacacgagccaaaccgatacgctggcgttcaccttcggatagacggtcgcccaactcgcctacctgagtatcaaggccatcgggcagggaatcaatgagatcaagcacggaggccttggcgagagcctgacgcaaacgagcatcgagaccgtcagctgctgccacctgaacggcatcgccctctgccgattgcgccgccaaccgctgctgtcgggaatcaacggtcttggcacccacttccccattgcctgcaacatttgcagcttcaacctcggactcaggcaaagcaatcagcagattgtctcggatagagccatcaaacaggtgggtttcctggctcatcatggcctgaatacatcggcgagcatgcacatcgacctcgggcaacggcgtgccggacaacgtcacctgaccgcgctgcggatcccagtagcgcagcagcagcttgagcatggtggacttgcctcggccggacggcccctggatacccagcacgccatgctgcggcacgtcaagcgagaagtcggacaggacttcatgctcccccgcatatgcaaaggtgacgtcatcaagacgcatgcccatatactcctgcggcacaacagtgccgttctcggtcacagcgggcacctcgtccatcagtccgaacagtcggctagcggacgcgaaggtctgagtcaggttagcgggcaaggcggcgagcgccaaagtcggtccgaacgagccggcgaacagcacgaaggcggcaatcagagccggaatgctctgcgggttcgcgccggcacaggcaatagccacggcgaccgaagccgctgtgagcacagccaccaagagcccgctgattccggtgaaacggccgttgaccttgctgagtttggcgtgatccttccacaacgcatgggtacggtcctcgatggcctgcgcacgttcctcgccgcggccaaatcggatgatttcgtccaggccgcgcatgtcatcgagtatcacatcgtcgagttctccggcagcgccacggatggcagggccaaggttacgtacgccggtggcaaagaatcgcggcacaaggatgccgataaccaggtgggcggcaatcaacgccagcgccatccatgggcttagggtggcagccacaatcgtgtagatgatggtggaggttaccgcgatggccaccggactgatggtgtgggcaaagaagatctcaagcagttccacatcggtggtcagcatggcgataaggttgcccttacctttgcccgcgagcttggccggcgccagtctgcgcaacgcggcgaacgccttggaacggaagagtgcgagcagatggaatgccacattgtggttcagatattgttcaatgtatcgggtgatgccacgcagaagagcacagataatcatcatgatgacggcgggcgcaacacccatgccccacaccggattaccggtaagtgcaaatgccgcgataatgccgaacacgggcaggaaagtggccgaaagatggccgatggtgccggcggtggaggccgctgccatcagtcctgccagaggtcgggcttccttaagcagtcgcctgatcacttggaatgtgctcattttggaagacgaatcgctatttgcaacaccagccggagtctcagccgaggcctgctcactcccgccaacggaagccgtcggcaaagctgactgcaggcggtcaaccgtcatacccgcctctgcgcttacgcgcgctgcgccaccctcagtccgactgtcgtcggacagctcctgcttgcgggaaccaacctgcagcacacgccgagcatggccttctccgaagttctcaatatctgcctgcgtggtaaacagcttggcgtagacgccgtccgccgtcatcagctcggtatgggtgcccctctcaaccgacttgccgtgttcgagcaccaccacttgatcagcgtattcggcgttggccatgcgatgggtgatcataataaccgtcttgccgcgggattgcgccaattcgcgaattgtatccaggatcagctcttcggattccatgtcaacgctgctggtcgcctcatcgaacacaaataccggcgaatcatgcaggagtgcgcgggcgatggcgatgcgctggcgttggccgccggacaggttggcggcatcggactcaatcggcatgcccagtccgttcggctgtgcgtgcacgaagtcggcaatgcgcgcctgctcgagcgcggaccacagacgggagtccacggaatccggcgaatcaggaatctcgtcatcgggcaaggccatcagaagattctcgcgcaatgcgcccgcaaacagatggctgctggcaccaatcacagtgacggctccggccagtgtttcgcctgacaaatcggatacctcgacgccgttcagtgtgagcgaacctcggtaaccggccagtgtaccggcgagcagcgaggcggccgtggacttgccggaaccggagatgccaacaatggcggtgaactgaccgggctgtgcggcgaaggtgatgttggtgagcgcaggagcgacggcggaattggggctggtttcaccttgcttatcggtctttgcggatgcggacttggagtcgccgtgcccggcatcatcataggaatagccgacgtggtcgaagcggaccgtcagaccgtcgtcagcggaatcggaatcgttggccggcagggtcgccgtgccatgctcgggctccggggtgtccagcagagcgaagatgcgcttggtggaggtcatgccgttcatcgccacgtggaagaacgagccaagctgacgcatgggaataaagaattcggcggacagcagcacaatcagcagcagtccggcgagggtgagcgggaagcccgcaccgaacggcatcaggtattgcaggccgtaggccaggtaggcgaatgcgccgggcaggtgggcggcgagcatgatcggcgaccagccggcggtgctggctcctgcggcggctgcggtggtatgcgcatactgctgcggtggtatgcgcgtattgccataacgccacaccaatgccggccgccgcaccgccgtaggccacgatatccatggcggtcagcgagcgcagctggatctgcagcacgcgcatggtcatgaccctgcgctccacattccgcgcaatcccattcaccttaagcgaacgccctcgcacatgccagacttttaaagtgagagaggccacagaattttcgattgcggagtgcgcatgctagacgcgccaaccagaagaaatatgcttcgatatcaggggctgaagcatcaactacacccaatacgtgcatttatccgtttcgaggaagctaatttttgcgtttgccggaggtctacttccgtttcaaggggctgatttcgcatttgccggaagtctatctccgcttcgaggggctcctcatccatgtaatcggaagtataaacagctacacgtcaacgtcattccgccgttttagggccgcgtctacttgggcatcagcccctcgaagtggaagtagacttccggataaggcaaaatcagcccctcgaagccgagaaagcacgtttctacggtgtcagaagccgacggaacgcaaaagggtcgtctgcacgcagacgacccatatgatcaattcgccaatagacgcagcaaacgcggcctagtgctgcttttgcgcggcgaccagtgcttcggcggcgaccgtacttatcggacaggaagccggaggagccggcgccgatcacgccgccgatcatgatggagctgatgaccagaccctgcagggccgggctcagcgcgtacttgtcctgcaggaagtcgatggctcccgaaatggacacggtcataaccgtagagcaaaccggttagacacggtgttgtatacaatccacaaaaccagacagacaacttctccattgcccacaacgcgcgcaaccttacgccagcgtaacctaacttgtcagaatggctcgattttgtcaacagccatcatgcaacgcacgtaaggacacggcccgcttatgcttgaccactacaccacgcctggcgaatccatcgaaatccgcgacaaccagaccatctactccctacttaccgatcgccttgcccgcaccggcgcggacacggtaatcgccgccaagaaaatcggccccggccgctggcagaacgtcaccaccggcgaattccacgagcgcgtggtctcggccgccaagggcctgatcgcgctcggcatcgccaagggcgacgcggtgaccatcttttcctccacccgtctagaatggggcattctcgatttcgcactggccgcggtgggcgcggtaagcgtgccgatctatgacaccgactccgccccgcaggcccagcgcatcatgaacgattcggtggtcaagctggcctttgccgacaatcgcgagcgcttcgaccggctcgactcggtcaaggaccactgccctgccttgaagcagattctcatgatcgagggcaacgcactgggcgcgctcgaaggtctgggcgtggctgtttcggacgaggaactgaacgagcgcgtggccaccgtgcgcacggacgatctggccaccatcgtctacacctcgggctccaccggcaacccgaagggtgccgaactgacccataagaacttcgtgtccatcaccatcgccgcctcgcaggcgttgcatgaggtggttctcgacgaccatccgcgcctgctgctcttcctgccgctggcccactgcttcgcacgatttatccagtacgcctccatcgcctccgatgacggcgtggtcggttatctgccggacaccaagtccctgctgccggacctgcgttcgtttgaaccgacctacctgctgggcgtgccgcgcgtgttcgagaaggtgtacaacgccgcctcgcacaaggccggtgccggctggaagggccgcctgtttgtcaaggccgccgaggctgcgcgcgtctggagccgcaaggagcaggccggcgagcagcacacgtttgccgaaatcgccgagcgcgccaagtatgaaacgctcgtctaccgcacggtgcgcggtgctctgggcccgaagatcaagtatgtggcctgcggcggcgcaccactttcgcttgatctggcgcatttctacaacggcatcggtctgccgatgattcagggttatggcatgaccgaaaccgccgccccgttcgccgccacgcgcgtgaccgacaatgtgatcggcaccgtaggccagcccgcgcccggctcctcgattcgcatttccgacgaaggcgaactgcaggtcaagggcccgaacgtgttccgcggctaccacaatctgccggagaagacggccgaggcgttcaccgccgacggctggctcaggaccggcgacttggccgagatcgatgacgccggccgcatcatcatcaccggtcgaatcaaggacattattattaccgccggcggcaagaacgtctcccccattccgctggaggaggagatcgtcaagtgcccgatcgtggagcactgcgtggtggtgggcgaccagcgcccgttcatcggcgcgctggtgacacttgacccggagtcgctggccatttggctgcccgcgcacggcctgtccacggagacgccggtcgaccggctcgccacgaacgccgcggtgcgcgaggagatccagcagtacgtggacaaggcgaatgcgacggtctcgcgtgccgaatccgtgcgcaagttcgccgtgctgggcacgcagttcacgcaggagaacaagtgcctgacgccgtcgctgaaggtagtgcgcccggccgtcaaccgcgtgttcgccgatgtgatcgacaacgagatctacaacggcaagcggtgaaacgcgcggttcgtaatccgacacaaaaaagggccttttgaaccgcacctccgatcatcgaatctggattactccagtccaacaatcggggtgcggttcaacctcgccgggcacttcatcattcatcactggcatgattccattatcacgcacattatggcgcagagcgaatacggcaccccggcaacgcgagtgggtcgccggggtgccggagcgcgggggtgccagaatgccgaagggccgggataccggagtgcccggtcgccggggtgccgaaatgccgaagcggtgtatgggtgccgcccggcccaggtgggtcacgcccgggtcagtttcttgctcctgagacgcagcacgacatcggcggagtcggcgacacgcttggaatgcgtcaccacgattacgcatttgccgagctgatgggcggcatgctgcagcagatgaatcacctcgtcggtcatctccgggtcgaggctgcccgtcggctcgtccgcgaggatcgcgcggcccggggcgaccagcgcgcggccgaccgccacccgttgacgctggccgcccgacaggtgcatgatgttgcgcttggattcctcacggctcaaacccagttcctcgaggatcttcatatcggccttggtgctgaccagccgcaggttctcttcgggggtgaggtagtcgatcaggttatggtcctggaacaccagggacacgtgctctcgacggtgcttcgcatagcccgatgtggcgatgtcctccccttcgaagcggaccactccccgggagggggcgtccaggccggccagcagcgacagcagcgtgctcttgccggcgccggacgggccggtgatcgcatacatcttcccggattcgaaatccgcgctgacatccgaaagaacaaggatcttcgccgctccgtaagcgtaatcgacatggtccagttgcagacagttagacatgattggtgactcctaacgcatagaggaaagaatggatttcggggatttggacagcacggcggcgcatgacacggcaagggccacggcgatgaccgcgcatccgagcagcaggatgagcaccgtctgctcaggcggcaaggcctccacgtgcaacgattccaatggcgcgacgcccgaatcgcgcaacagtcgggaagacacgtatcccgacagcatggcgccggtgcccagcgaacacagggcggcgaccgccgccatgagtccggtttcgatggcgagttgtgcgactatccgcatcttgtcgatgccgagggccagaagcgtgcctatctcatggatgcgtgagcgaatccagaagaccagcgccatcgccagcaccagtacgtccgcgaggcagacggacagcagcaccatgcgcaccagatcacgcaccgtctgcacggattgcaggacgccggagagccgggccgaatcgtcggtgacgtcgtacttgccgccggccatggtcttggcctgactgaccgccgcggacaggtcctgcggattatccgacaggcatcggatcatgccgatctggtcgtttccggtcagagcggaggtcactcgcctgcccgaatagatgaggttctcggaagtgtccgagggcagggggctttgggcctgcacgttgccggagaagatcccggccacacgcaccgtggcgttgcgcccctcctgccggagacggaatgtcgagccgaccgataggccgttctgcagcgcgaagtcgcggtggaccagcacatcgtcgccgtcgcccgagatgtggcggccctgctccaagcggtacaggccactctggaattcctcggacaatgaggaatcggtggtgcccagcacgctgacctgcatggccagatcggagtccaatcgggggccctgccgaggcatgaccgggcgcgcgccatccacctgcgccaaggtcttcgtcgcataggcagtcttcgtcacaccggggatacgcgagaaccggctcgcctcctcggcgctgatgggattctcgccggcgctgacggtaaaccctatgcccatgcccgcgccgatgccgtcggacatggtacgcagggccgtcgagactccgacctgcgccaccaggctcgtgaagaccatcagcatcagcagaccgatgatgccgctgcgtaccggcttgcgtacgatcgccaacgtggcacgcttccacacattcatgctcatcatcgattctccgacaggtctcgcggcgatttgcgcagcatcggcatgcacgccaccgcgacgcacaccagcatcaccgccaataatccgagcgccacgtacagcatggcggtcccgtcgaccgacaccgtgagcgaatccagggtgcgcaccgacatgctggattcaaggtcgccgccgacctgccccatgctgctcagctccttcgccgcggaggcgttcacggaatggagcgccgtggtgccgagccattgggccattccctgcgcgcacagccagccgagggcaagggacggcagaccgatcagcaccatctcggtgaggtattgggcgaccagggagggcttgccgacgccaagggacaccagtatgcccatctcctgacggcggtcgttcatccacagcagcagcatgagactgagcacgagcacggccgagacggtaacgccgatcagggcgccgcgcatcatggagcgcacgccgcgggcggcatgcagcatgctcgacgaatactggtcgttgcgcgtaatctgatagttgttccaatccaccgggagtttcttcgcggcatccatggtcttctccacgtcaacgcccttggacagcacgaaggtggcgtcctggtatatttccttgccgtccttgtactggtacagatcgcgtgtggtatccagatcggtgtagatggtgttggcggtgagttccgctcggctggatacctttctggcgctgtcgcccttgaatatgcccacgatggtggtcttgacggtcgccgtcgaatgtgattcgttgtcggcgtcgtaggcgttggccttgagcgtgagcgtgtctccgactttgagcccgttggctttggcgagatcctcatggatcatcgacgtgtacttgtcggaggccttcagatgccgtccttcggccatgccgagcgtgcgcgacgtgaacacgttgagtttcgacgaatcattcgtgcctatgacgttggcggcgttgccgaattgctgctccttggtcgcatcgtaatcatcgccgccggggaccttcgccacattcgcccccacgagatcagcggtggcgttctgacggaccatatacgaatcgaccccgggcagttgggcgatcctgcgcacgtcggcgggacgcaccatgccacctccgcgaggcgtgagcatgctgccctgcaggttgctggccagcacgaacccgccgaccgcttccttctcgattcgtccggcggcctgttgagctgcccgagaaaccgcgatcgtggatagcatgctcgccgttatgatggtcaatactataaggagcactatggttcgtactcgttttctgagcacatagcgcaccgaccgtgcaacgaacgtcatcaatacctcctgtgggccttgggcttttcgcccaaaatgcgaaacatgccgcgtttcgccggttagttagccgcgacaatacatgatgcacctcaagatacgggaagagatacgccttgggcgaaaaacggaacagcggcaaatgtcgtttattctggattttggtccatctcgggccgcgtcgatgcgtcggcccgagaggaatcagcgctcgcgcctcaccttcgaggcggcgaacacgaggagcggcagagcggcgaacgcatagttctcgcattggatgtacaggtatgcgaccaggacgagccagcagatgacggtcttgtgccagacgccggattcgcccgaacccgcgccggcaacgccatcaccactattgcccccggcaacatcagcaacgtcggcaacgtcggtgacacaaacaccgtgcgccagcccgtcggacgatgcgccatccgcaccgccacggcataccgtcctcccgcgcgtcatgcagaccatcgaggctccgaccagcatggccagcccgatcagcccgtattcggcgatgacgctggtatacgcgcacatcgtccacaccgtgtccgcgttcacgccggccgcgaatcccgtgaccgcgccgccgttcataccaagaccgtccagcagccgtccggctttggccgcgccggcccacaccgcattgatgatgttgcccgcgccataaccggtgagcagcgtccacggatgggtgagcaatccgcatatcggatcgaggctttggtagatccgcgcgaagaacgagccgtctccctcggccccgttctccgcgatggcggagagtctggaatccgccagcacacccagcaggcccagtgcgcatgcgccgagaatctgcagcatgccccggacgcggcgtgcgccgtcatgccaatcggtgcgcgccacaagggcgatcagcaacgccacgacggaatcgatgacgattctggtgccggcttgcatgagcaccgcgccgacggcatacgtgacgatgaggtcacgcagccgtttggcgtagatgcggtcgcgcccgcgcatgagccacatgagcggaagcagtatgccgaacaggtgcatgccgatatagctgggctcggcgaacaggaactgcggacggccgccgccccacaccgagttgtcgctgatgtattgccggtacatgaggtgcgagaaatagtcggtcaacggtttggcgcgcagacggatggacagccattgcacgacgcccactccgaaggaaacccagtatgatgcgatgagaatccgcaatggcgtacgccacggaatgcgtttgatgtcgaacgcaagggcgatcgcacccaaagtggcgagcacgcccagcaatccggtgatgctcatgaacgcggcgttgaggtggatgccgaacttcagccatcccgggatggacaggattatacagaccaccggtaggaggaacattggcaggtaccggttggctgcgatgcgcagttgccgccaattgcataggcagtacacggcgaacagcgccggactgattggcgaccagaacggcgcgtacaggccaagcgtggtgccgtccaccggaagaaaagcgacggccagcaacagccaaatgacgttgcgttcctgcgatgtcagaaatcgcaggaacgaccggtattgcggtcggccatgatggttgcccgcgtcgatggtgtcgttgcgtacgcatgcctggttcatgtgattctccctccccgtcaaccttactcgttcatcacgatgcgcggacgggggcatgctttccccaccgaacgtgcaatggcccgaacattgacaaggccgcaccgaatgcccccatcattggcacattgtgcaatctcgtcgcgactggctgacgaaataatgttggccgaccggttacattggttcggtacagtggcggcattattggccactggatcaagcgatttgcggcagaacgacgaaagcgacacttgggcgaaaagaggcaggcatgaccacgaatcgaccgctcattgcggtgactccgctgatggattacgggcgcgatagtctgtggatgctgcccggatacatggaggcgataatgcgggccggcggtacgcccgtcatgttgccgctgaccgatgacgccgacattcttgcgcaatgcgccgaacggtttgacgcgtttctgtttacgggcgggccggatgtgggaccgatggttggtgcagcggcctccgccaccggccgtagcgaggtgctctctcctgagcgcgaccgaatggaatcgattctgctgccagctgtaatggcttgggacaagccgattctgggcatctgccgtggcattcagttcatcaacgcagcgctgcgcggcacgttgtggcaggatctgccaagccagcatccgagcgatatcgaacaccatatgaatccgccgtacgatgcgttcgggcacagcgtttccttggtgtccggcactcccctggcttcattgttcgcggggcagactgagattgcagtaaacagctaccatcatcaggcggttcgtgatgtggcccccggtctcgaagtcatggccgtcgcgcccgatggcgtgatcgaggccctgtaccggccggcaagccacttcctgtgggccgtgcagtggcatcccgagtttctctacaaggtagatccacgctcgcaggcgatttttgatgcgtttgtggagagttgctaacaacggattttttgcgtgaccacgcaagcataatcgagattgccacctcatgacaacggttccgcaccaggcagcggcgcgtctgtgttatctggaaacatggctgcatcttgctggaaaacatcacctgaagtattctaaggtcattggatgttatttttttatcacataaaatatcatttttttatacagcatgtgataaaattatcaacatgattccatcgaacgttcgatacgtaactcgaccgttggcacaagtcctccgtcagtgtccaaacaaagtagcggtgctggaaggagcacgagcagtcggcaaaaccatgcttgttcagacagaattgccagacggctatcattatgagacgcttgctgacaagaggacattcgagtacgcctcatctcatttggatgagtgggttgattcgctacccacgccgtgcattatcgacgaagctcaacgtattcctgacttgcctctatccgtcaagggagtaatcgacaagcaaactggttctactccttttttcattcttactggttcagcatcaatcacccgagatgggctagacggacaggacccccttacccgccgttccctgcgttataccttatatcccctaacacgcagagaaatcaataaaaatactgataccagcatcattgacttgttgtggaacggtaccccaaatgcgaactatcattcagagaccaatagggacacactagctaggtatatgactgtgggaggtttcccctcgtatgcaatgccctccatacctattgcagagagcgatttacgtttttccgtaaaaacggatatcgataatgttttgggcgataccatacttcccggagagcgattggataaagcaatagctgatgccatactcaaagagttacttgcagtccctggcgggattttgaatgtaaaaagaatatccgacactattcattcgaatccctccaccattgagcgatacatcagtattttcatgcgccgattcctaatctccgccttaccgaacctacgctcagcacctggtaagcaactgtttacccgcgcaaaaatacatccagtagacacgtcattcagcgttgaaacaatacgacaatccggcagagattttcataatgatcgcgttctgtttggcgagctttttgaatcattcgccgtcaatcaaatcattccggaaatacaatggtccgatatacaccccgacgctttctactggcgggaaactggcaataagcccaaagaggttgatctcgtgctgctacacgataatcaacttgtcgctttggaaatgaagtccaacaataccgtggaccgcaaagatttttctggtattgcagcattgcgcgacagcgacaagcgcttccaccgaggctacgtcttatacacaggagacaaggtgcagcagttcactaacaacatatgggctctgccaatttcatcattgtgggacagtgacggattccagacagctacttcggatgctgaacattactcattatcggttccatcagttttacctattcggccgtccgacaccgatgtggcagctcatgccaatgcccctactgatgccaacctgtttttaagctactgccatgcagacaacgaccacctcaagggggcaatacttcaattcgtgaatgatattatcgacgaatacaattacgagaccagcaatacactcgggttattcgtcgacaagacctctataaactggggtgaagattggcgtcaggcacttgatcgaggcattggtaatgcaaatatcattcttccaataattactcccagatatgtgcgcagtgaggcctgtcgtaaagaactgctggatttcaatactcgggtcacggaacatggaccgaatcgtatacttccattgatgttgcaaagcatagatggcatgactggaattagcgatcgtgatcctgtttgggacatcgcgcataatcgacagtatctaccagtgggcgatttgcgtttaatgtctgctgaagatcgtcaaaagagaatccttgaaatcgtgaaagaacttcgcgcagtaatagaggatattactgcccgatcacaatctgatggcacatcagagtcagttgtgagcaagtttaagggagacaacacaccggatttattgagtgcctggaatgagatagaaaaacttacaccacaagttaatgtgggcgcgcaagaatttgccgtatcatttcaaaatatctcaaagacattaagtacccatcccgctcctgcgaacggcaatgcgtctgtctattcctcatgggcgatacaactatcagaacaactacaacctgacattgattcgctcaacaaggcatcggataatctgtcagaactatggaataacgcctatgccgtcatgtctcaatacgtgggcttcattcagagccttccacaaggcgctctacgcaacagccagattgacagcatgggaacaacattcgatggattgcgcacttcgctatccatgcctccggaagtgacacagatgctgccccttattcgtatgcttggtaattttgcgcgtccccttcgcccatttgctgatgccgtcaaccaatcattcaatgtaatcgaaaatatgggcaccatgacggctgcattacaaaatcagcttgatcgcatacctcgataaatcggaattcaattcagtgcgcatcggattaatgcgaatcatctaaaccacctaaaaggggctgctccggttttccggaacagccccttttagcggtagcagtcagcagactgatttagtcatcggtgctggcttgccagcgctgattggcgcgtgcggagaccgccgtccgaaggcgaggggcgtacgaaggtacgtcgaacctgaggaaaggcggtatacgctccgccaatcagtgctggttgttgagacggtggtacatctcggacagctccagttccttctcgaactggcgagcggtggtgttctcgtcgatgacggcgagctcaacaccggcgatgcgggcgaagtcttcccaagcctcacgaccgacggaggtggtcatgcaggtgtggtgagaaccaccggcggtgatccagcactcaacggcggtcttcaggctcggcttcggctcccagacggcgcgggcgcacggaagctccttgagggagccctgcggctcaacgacgtcgacgacgtccatgagcaggcggaagcgttcgcgaacgtcggacatggagaccacgacggcgtccttggtgggcttgccggagaagaccaggcggaccgggtcggccttgccgccgatgcccagcgggtggatctccagcttcggcttggcgatggtgccgatggacggggaaacctcgagcatgtgggagcccatgtcgagctcgtcgccctcggtgaagttgtaggagtagtcctccatgagggaggcgccaccctcaaggccgtagcccatgacggcgccgatgcgcacgaggacggcggtcttccagtcgccttcagcggaaaagccccagccgtactcggacgggaagcgctgtgggccaacgcccggcagctgtggcagagcgccgaggtcctcgaaattgtcgacgccggcggtgcagccgttggcgcgcatcatgttgaccatcgcggcctcttccttggcggcgatgaacagggagtcgtacttggcgtccagcagagccgggtcgacgtcgtacttggccttgtagtcctcgatgatctccttgacctggtcgtccttgacggcgtcgtacgcagcgacgagctcgttgacggcccaagtgttgatggaggcgccgaacacgcgctcggcctcggtcttgtcgccctcggtgacggcgacgttacgcatgttgtcgccccagcgcatgaccttcatgttgttggaggcatcccagccggcgcaggcgcgggcccaggtgccgaccttctcgactacctcaggatcggtgtagtggccgacgacaaccttgcgcttgatgccgaggcgggagacgatgtaaccgaactcacggtcgccgtgggcggcctggttcaggttcatgaagtccatgtcgatggtctcccacgggatttccttgtggtgctgggtggccagctgcagcagcggcttggtcagcacttcgaggcctcgaatccacatcttggccggggagaaggtgtgacaccaggtgatgacgccgatgacgttcgggttggcggaagcctcgaccatgaactccttgacaccgtcggaggacttcagggtgggcttgaggacgatcttggccggaatcttgccggtgttgttcaggtagtcgaccatttcagcggagtgaatggcgacctggcgcagggcttcctcgccgtacaggtcctgcgaaccaacgccgaaccagatttccttgccctcgaaggggttttccataaccatagggttacttcctttacttctttgtttatgggggtttgtttaagtttcattcgccgaccgaggctcccctcagagaggggagccaagacaccaccgtgctggcggagtcagcgctgatttgatgtgtgtgcccgcaaggcgcggaaggcgaaggcgtacgaaggtacgtcgagccttccgcaacgcggcggacactccatcaaatcagtgctggccgtagacgttctggtagcggtcgttgagcttatcgatgtcggcctggtcgatctcgatgatgtcaccgagctgacgggcggcccacatggtgtgagcgacttcctcggtcatggcagcggccttgacggcgccttcagcatccttgccgatggtgaaggggccatggttctgcatgaggacggccggggacttcgggtacttcttgagggtctcgacgacacccttgccgatcgcctccgagccgatcagacggaacgggccgaccggcaccgggccgccgaactcgtcgcccatcatcgtcaggccgcacgggatgttctgaccagtggcagcccaagcggtggcgtaggtggaatgggtgtgcacgacaccgtagacgtcgggcatgttgcggtagatgtaggcgtgggaagcggtgtccgaggacggggcttcggcaccgtcgaccacgttgccgtcaaggtcgcacacgaccatggaggacggggtcaggtactcgtagcgcaggccggagggcttgatgacgaacaggtcggcggtgtgcagacgctgggaaacgttgcccgcggtccacacgaccaggttccacttgatcagctgctggtgcaggttggagacgacctcacgaacctgcttgacctcggcgcgaacctcggggccgtaatcagccaaagttgccattattggttttcctttccactgtgatggatggacgttttttcaaaatctcaaggacctctctcaatagagggaggtcagaaaggcttacttatcttcgaggttgatggtttcgatggcagcgtgctcgatgggcaggcccttggtgaagcgggcgaagaagtcctcgaaaccaaccacatcggaagccaccggcttctcagtggtggactgggcgtccttgaacacgaaaccatcaaggaagtcagcgaggttgctgtgatcctcgttggtgttccacaggtagttggcgagcacggccataccccaggcaccaccttcggcggcggtggacatgaccttgatcggggtgttgaaggcagcggcgagaatcttctgagccaccttcggagtggtgaagatgccgccgtggcccacgagagagtcgacctgcacgtgctcctgcttggtcatcacgtccatgccgatcttgaccggggagaacgcggagaacagctgggcgcgcatgaagttgccgagggtcatgttggcttcggggctgcgggcgaacagcgggcggccttcaggcagaccggccaggaattcgccggaacggaacggatagttcagcaggccgccgcagttggcgtccacgtcgtcggcgatggccgcgcggaacaaggtgccgtacagcataccggcatcaaccgactggccgatggccttggcgaactggccgaacaggccgacccaagcgttgaggtcggaggtgaagttgttggcgtggctcataccggccagatcgccggccggggtggtgaccaagtcaacctcagggtggagggccttgagcttgtgctccagaaccaccatggcgaagatggaggtgccggcggagacgttaccagtgcgtacgcgcacggagttggtggctaccatgccagtaccggcgtcgccctcaggcggggcgagcacgatgccgggattcagggcaccggacggatcgagcagcttggcgccttcctcggtcagctcgccagccggagtgccggccacgagcggctcaggaagcaggttctccagcttccacggctgggctgcgacctcaggcagagcgtcgaacttctcgatgaatgcggtttcgtaagtgtgagtggtcgggtcaatcgggaacatgccggaggcatcgcccacaccgaggaccttctcaccggtgagcttccagtgcacgtaaccggcgagtgtggtgaagtaagccacctcggagacgtgctcttccttgttgagcacggcctggtacaggtgagcgatggaccaacgctcggggatgttgtactggaacagctcggagagcttcttgtgagcttcggaggtgttggtgttctgccaggtgcggaacggcaccagcagttcgccggcctcgtcgaatgcgaggtaaccgtgcatcatggcggagaagccgatgtggccgacgtgcgtgagcttctcgccataggcggtctcgacgttgttggccatggaggcgtaagcggactgcaaaccgccccagatctcctcggtggtgtagctccacagaccatcctccaagtgggaggcccagctgtagtcgccggaggcgatggtctggaagttgtcgtcgatgaggacggccttgatgcgggtggagccgaattcgatgcccagcgtggtcttgccagcgcgaatcttctcggcgatgtgggcggcctgctcggccgcgttgtcggttgctgccatatctttcctttgccttggagcgccggcgttgttatccccttccttggggaggatgttagcgctcacaatttcaaaaaaacattgtaccgataacctgcattcgacacaacttataccgtgtcacgcatcataacggtttgataacagcgccaatttaccgccggggagccggccccaaggaccgccgagcacgcacctcggcgggaatcagccccacgccgtgctgggtggtcaggaaggtcggctcgccgccctcccccagcaaacgcagcgtctcgcgcatggcggccacgccaagcccctcgaaatcgggatgcacggtggtcagcggtgggtacatgttatccacgccagacatgtcgtcgaatccgaccacgctgatgtcttgcggaatccgaagcccatgctcatgcaacgcgcgcatgatgccgacggcctgattgtcgttcgcggcgacgaccgcggtgggcaacgccgtgcctcgacgcccatactcatcaatgagatgattcatgtgcgcatatgcctcagaggcatcccacgtatggcagcgcacgatctgtgaatcgatggatcgggaggcggcgagcttgcgccacgcatccagtcgggtgtgggcgtcgcgccattcgttgggaccggcaaaatacagagccgatttgtgcccgtattcgcccagcaaggccaccactttggccattgcaccccactggtcgataccgaccagtgcagtgcgacgcttgttttcggtggagataaggcccaatccctcacgcacggtcatttggccgtgggtggcggtgacgatgacgcgtggctgagtgactcgcgcacggcaggcggcggcgaacatcacgtcggtcggggtcaggaagatgaaggcgtcgacgttctgctcgttgaaggtgtcgcacaggttgtcgaattcggactgcatgcacaaggcctcgtggaccatcatcacgctcatgaacagaccgtgttcgcgggccatggattcgatggatgagatggaggaaatcgggccgaagaatttgaggcctccggcgatcagccctatggtgcgcgaacggcgggaagccagtgcgcgcgcggagttggaggggcggtagccgagttggtcaatggcggcctggactcgcgcacgggtggcgtcggaaacgtccggcgagtcattgatcacacgggagacggtttgatggctgactccggcgagcttggccacttcgaacatggatggacgtttgcttggcttgcggccggtcaccatgctacctaacctcccctctggcggccggcatccgtgcacggccaggcttgtaccttaatcaatactgactttagcgcgtccacaacagttttgcgttagcgctcacactgtcgtgtcgcacgcggctcaggtcaggtgccatgagacacgatggagcggagtcggcccgtgttcggcgatggcggcacggtgtgcggcggaaccatagcccttgttatgagcccattcgtaggcggcgtaacgtgggttgctttgcgcgaggtcgaccatcagccggtctcgggtcactttggcgatgaccgccgcggtggcgacggtggcgcaatgctggtcgcctttgactttggtcgttatatcggctggaatcggcacgtccggcgcgtcgaacgtgttgagcgccttggtgatgtaatcgctcggcccgtcgagaattccggcgactttgggcagggcgcgaacgctttccccacaatttccaatggattcccctacggagtctcccggacgaccttccacaatctcccccgcagccttttttgccgtcaatccccctccaagccgtaagccaagttcgcgttcgacttggctgagcgcgcgcagggcggccacgccgagcgcataggtgatgccccattcgtcgatctcggtgttgctggcctggcctacggcgtaggccgcgcaccagtcgcgcagttcgtcgaaaatcgcctcgcgcctatgttcggtgagcattttggagtcggccacgccgtccggcacgccgaggtaggtccgcccggacagttcgacggcatcatcgccatccaacggctccaaatcacgggcccagatggcggcgcacccgaccatcaccgggccggcgagcgcgccgcggccgacttcatcgaatccagtaataaggtcatagccctgggccgcaaggctgcgttccaagtcaagtgtcggggtaatcatgcgcggctcccatcgtctcacaatggttaggattcagacggtccaggttcaaatggttcaggattcagacggcccggaactcaatcgttcaaagactcacacggttcaaaaaagactcaggaatttgagccggaagcgtcaggcacgtccttgaagacttcgtggtggtcatcaatcgcaccaagccggtcaagcggccagtatctcgcgattccgactccgaccacatcggagatgggaaccaagccgcgatcgccgtcatcctgatgatagcgggagtcggcggaattggcgcgattgtcgcccatgacgaacacgtggtcctcggtcacggtcaccgagaacgggaaggcgctcgggtccacgccggggcgaatgtaggaggtctcattgatggccacgccgttgatggtcaccggctggcccgcgcccttgcattcgaccacgtcaccgggcaggccgatcagtcgcttgatgaggtacccgccaccgggagcgctgctctgctcctcgttcaaccagttgttgggatctttgaataccacgacgtcgccgcgctgcagatcgaagatcttgggggtgagcttgctggtcaccacgcgatcgccgggcaccatggtgtccatcatcgagcgcgaaggaatctcgtaaaagccgacggcgaaaatgcgaatcagcagcacgataagcacgggaacgccgcaccacaggaaaaagtcgcgtagggtgaagtggtcatcatccatcgatgatgctgccgcggcattcgcgccagcggaagaagcggcgtgcgccgggcgcgccggtgccgggggaaccggggacggggcgatgccgtggtcggcgacttggaacgtacgggaatcgcgggcatcggcctcgtcatcatacgaggtctggttgctctccggattgtcggaaatcgggaattcgccgttatcctgatcgtcctgcataccatctcctcgcgattcatgctgccggatatgaggggtgccggcgcccgtccatcatacgtggaaaatacggaaacagcccgaaaccgaaacggttccgggctgaatttcacggtttattcgcgcacctgcatcatcaggcccacgattgcacccgcgaatcgactcacttagcggagttgtcgcggcgctcggcaatacgagcggccttaccgcgcagagcgcgcaggtagtacagcttggcgcggcgcacacggcccttacgcacgagcttgatggagtcgatggacggggagtgcaccgggaagcgacgctccacaccagtgccgaagctgatcttgcggaccacgaaggtctcacgcacgccagcgcccttacgagcgatcaccacgccggtgaaggtctggatacgggagttgttgccttcctggatcttcacgttcacgtcgacggtgtcgccgggacggaaggccgggatttcctcagccggcttcatgtgcttggcgtcaaaagcctcaacagcgttaaccattgttttccttcagtgctgccgcatatcagccacagatctggggccatccacgcgattgcgcatcacgtgcgttggcctgttctcgttatccctcgggtttgcccttgggaagcctgccgatccgccgaaagtcaggccttgcggccgttcggactggacccatggagacgtgggcttatgcggcggcccacttctcgacacagcaatcgtcaattgtacggattattgcggacagaatggctgcctgatggcattccaacaccaaggcactgcgacgtagttgacagacctgcaggcgggctttatcttgggagcgtcggtaggcgaggctaccgcagggatatgggttgctgccgctaacagtggagacactgcacgcaggtcagcagttcttgtcggatcaaggcatgaactaacgcaattccaccgccctgcgatgctgaagcttgaacgatggctcgaatcggcggattcgaatactttccgcccctcctgctggtcgcatggataccgacgatggtattgatctggcgtttcagcgcacggcttgaaggaggtgagagtccgatggacggtgattattccagtagttccgccgccggcaacagtcatagttgcggtggtgatgaccatgttttcttgtattccgttatccggaagtcgggctctcgcctgtagtgttccttggctccccggataacccttgcataattcgtctttcctatgcatagggaggtcttttcatgaccatgttttcattcaatcgcgtcggcgcgcgtccaaatgcgtcggcccgcaacccttccaccgccgcgtccgaccgccagccattcgccgtgcgcctggcctccgacgtactggtcgcggccggtattctggcgctgttcggtctgatcgcttggattctgccggcgatcggcgaaccgatcggcccgaaaggcgtgccgtcacaagtcagtacgcatctcgccgacctgccgtattacgcgctgcgctcggtgttccgcatgctcgtggcactgttcttctcactggtgttcacgttcatctacggcacggcggccgcgcgctgccgccgcctgagccgcgtgctgattcctctgttggatattctgcagtcggtaccgattctgggctttctttcggccaccatcaccatctggatggtgctgttccccggctcgatgctgggcgtggaggccgcgtcgattttcgcaatcttcaccagtcaggcctggaacatggcgttctcgttcacccggtccctgaccagcgaaccaactgaactcgacgaggcggcccgctcactacagctcacacgctggcaacgattctggacactggacgtgccgaacgcgatgattccgctgctgtggaactgcatgatgagcgtgggcggcggatggttcttcctgaccgcctccgagatgatctcggtgaacaatcgcacctatgcgttgcccggcatcggcagcttcgtggcacaggcggcggccgaggagaatctcgcggccatctgctgggccatcgtgacgatggtgctggtggtgctgcttatcgacgtactgctgtggaagccgttgaccgcgtgggcggagaagttccgcattacgcaaagcgagtcggcggtgcgcaagaccagtgtggtgctgaccatcattcgtcagtcacatatcgatgagatggtggcctggctgttcaggcctctcggcgacctgttcgacacgctggcccgcccgttgggtcggaccggtggacgttgggcggcggacgtgaagtccgcacgcagccgcgcgcttgacgtggtattcacagtgctggtgttggcagcgtgtgcgttcggactggtgcagcttatgctggtgattcatcgcgatgcgggattcggcgagctcgggcaggcgttcgtgttgggcatggtgacgttcctgcgcgtggcgctgcttacgctcgtctgctcggtgatttgggtgccgattggcgcgatgatcggcatgaatccgcgcgtttcgcggtttatgcagccgattgtgcaggtgctggccagcttcccctcgaacttcacgttcccgttcgtcacgctctggttcgtggcatgcagcgtggatatcaactggggcagtattctgctgatggcgttgggcacgcagtggtacatcctgttcaatgtgatcgccggggccagccagattcccgacgatctgcgtgagatgacgcgcagcttccagctggggcgctggcagcggtggcgcgatttgattttgccggcggtattcggctcgtgggtcacgggcggcattacggcggccggtggggcgtggaatgcctcgattgtctcggaaatcgtaagttatggacggcatacgctgaccgcctccggcttgggcgcgtatatcgccgaggccaccgaaagcggcaacaccgtgaggaccatcatcggcgtgaccgtgatgagcgtgttcgtggtggccgtcaaccgcctgttctggaacccgctgcagcgcatggccgagcgccgtttcgcactgaactaaagacttaaggagaataatatgactgttgcaatggaaaccattcgttcgctgcgggcgatgaccccgcagaacaccatcatcgaagcccagcacgtcggccagcgcttcacggccgacaacggcaccgaactcaccgtgttcgacaacatctcgttcaacctgtacgagggcgagatcgtggccattctgggccgttcgggtgccggcaagtccacattcctgcgtgcgctggccggactggtcaagccgaccagcggcacggtcaagtatcgcggcgaggccctgaccggtccgaatcccggcatcgcactcgtgttccagaccttcgcgctgatgccgtggctcaccgtgcaagacaatgtggaactcggtctgaaggcgcgcggcgtaccacgtgcggaacgcaccaaactggctctggatgccatcgacatgatcggcctggacggcttcgaatcggcgtatccgaaggaactgtccggcggcatgaggcagcgcgtgggcattgcacgcgccttggtgctgcggccggacgcgctgttcatggatgagccgttctccgccctggacgtgctgaccgccgaaaacctgcgtcaggaagtgctcaagctgtggtcgagcgaacagcgcagcatcaagtcggtgcttatggtcacgcataacatcgaggaagccgtggagatggccgaccgagtggtggtgttgggctcgcacccggggcatctgattgccgatgtgcgggttgatctgcagcgcccgcgcgaccgtcacagtgtcgaattcgaggcgatggtggaccgactgtacgcgattctgaccggacaggcctcgcagcctacgcaacaagccgaggctctatcgccatcggcatcgctcacgaacgcacccgtcacgaacgcacccgtcacggacgcatcagaccttcagcccgccaagaccatcgagaaaatcaaggagcatccgctgcccaacgccacgccgggcgggctcgccggtctgctggatgtggttgccgagcatcctcacggcatcgacttggcagatttggcctcggctctttcgttcgaggtggacgacctgttcccgctggtggatgccggtacgatgctgcgcgtcatcgtggtacgcgacggccatgtgcagatcaccgaggcgggcgacgcctggcataaggcggacattctgcgcgccaagcaggtgttcgcctcactggcgatggaacacgcgccgctggtgcgcaacattgagcatgcactgcggaagtctgcggaaggcaagctccgcggcgagctcatgctggacctgctgcgcgcccgttactccaacgacgaggcgcatcagcagttcgccatcgccgtggagtggggccgttacggcgaactcttcgattacgatgccgatgacgatctgctgagcttggatgaggcgaataagggcgaataagcgaatcagccacgtgagttggccagatagtgcctttatgcctgcaaacagatgccgaagcggaatatgaccatgttcgactcatctgactgacagcaatccgtatatgcaaagtgcccggcatccgaagatgtcgggcactagtcgtgagagagactccctcagtcagctacactgacacctcctctcacccgagggggcaccagaggaacgaatcagaactcgcgacgtgggcagtcgccagactgcccaccagacagcacagccgcggtcgcgcgaatcacgaattctgaccgagcaaagcgaatcagaactcgcgatttgcgcggtagaacttgatcaggctctgggtggaggcgtcctgggcggcgagggcgtcgtcgtcctgggagatggccggggtgatctgcttggcaagctgcttgccgagctcgacgccccactgatcgtaggagtcgaggccccatacggtgccttcaacgaaggtgatgtgctcgtacagggcgatgagctcgccgacggcgaacggggtcagagccacaccgaagatggaggtggtcggacggttgccggtgaacacgcgggccgggacgatctcctccggggtaccctcggcgcgcacttcgtcggcggtcttaccgaacgccagggccttggtctgggcgaagtagttgcccaggaacagctcgtgcacgtcctggtcgccgtccttggtcgggttcggggtgttgacgaacgcgatgaagtcggccgggatgagctgggtgccctggtgaatcagctggtagaaggcgtgctggccgttggtgcccggctcgccccagaagatctcgccggtctcggaggtgacgggggtgccgtcccaacgcacggacttgccgttggattccatggtcagctgctgcaggtaggccgggaagcggtgcaggtactggtcgtacggcagcacggcgtgggaggcgac

SEQ ID NO: 333 - DNA, 8249 bp, Unknown
  R42_10m  MAG No. k141_9731
cgagggcacgccgatcaagtgcaggatggcgaacgtcgcatactccacaatggtctgcgtggcggaaacacccatatacttgcccaacacggcgagtccattttgcttcggggttgccgtgcccacggtattttccgcagtgttcgttgtggccgaggcattcgtgacgtccgcgccctgattgtgcttcacatccgctccattgttcgccatgcccatatacctcccggatgtacctgtgacgttcgacctcgcgatgataccgctgaccgcgtcgggaaccgtcgtggcggtcagacgagaaaaccgcaggccgcagcaacgaccggcacacccagcgacagcaccagataggccgttgccgtggggtagcggcgtttgtggaagagcgtcaccatttcgttgatcgcggtcgagaacgtggagaatccgccgaggaaaccggtggccagcaccagccgccacggttcatcaagtgtcccgcccagtgccagcgccgcaaccagaccggtcaggaatccggcgatgagattgatggtgaatgtggacagcgggaatgcgcgttgccaatacgttttgatggtcgcgtcaagcagatagcggcaggaggcgcctacgccgccgcacaggcagaccaagattggtaggaatacggtcatcacgccttacctcccttgctggtcgtagcggcattcgtatcagcggacgcttcggcggatgcgttcgaggagccggccagatgcgttcctgcccacacgccggcagacgcacaaaccagacccagcgcgaacgtcaccagtagataggcaatgccggccgccacctgaccgtcgcgaatcgcggtgaagccttccaatgccaacgtcgacatcgtagacaaaccgccgcatacgcccatgccgagcccacggctggtgagctccttggcacgcgtgtcgaaccgggaagagccggccaaataggcggtcagacccgcatagcagaagcaggccagcatgttggccacaaacgtgccggtatggaagctgccggctgcgggaatctgcgcgaacgcatagcgaatcgcggtgccgatggcaccgccgcagaagacgaccaacacaatatcaagatggatatcggggagtttgtgcgccggaggagtggccgtgcgcgtgcccggccgggcatctgcggatggggattgcgagcccataatagcctttcctgaaaccgctgaatcctactgaagacacaacgattccatgcaatgtcaaatcgtgtgtaggaactatcagcagtgtgcggttcgaaacaagttcaggcgggtcccatcgccggttctccagattactcatggcgacgaatcgaacagtgagcgtatctcggatattggcctatcgcagtgaattgctcggttgttgccatacctcatgggtatggcgaaacatggtttatggctattggttaatgcaaggcgattattgtttaatagaacacgaggataacgggccttaagcgctcgatgccggaaaacaaggagttatgaacgtatgtctgaaaccatgaaagctgcgattttcgtggagcctggcaagatgaccgtggaagaagtgccgaaggcgatgcttgaacaggatgatgacatcgtgatccgcgtggtgcgcacgtgcgtgtgcggctctgatttgtggttctttcgtgggctgagcggacaggccgcacacagccaggtgggtcacgagtccatcggtgtggtcgaagaggttggcgcggcggtcgaatccgtcaagcccggcgatttcgtggtcgtgccattcccgtacagctgcggcaagtgcccggtatgcaaggccggcttcgaatccgtgtgcccgcacggcggctacttctccgcctgtcaggccgaatacctgcgtgtgcccgaggcggacggcaccgtggtcaaggtgcccggttcgccggaagactacgatgacgcgacgctcgcttcgctgctgaccgtttccgatgtgatgtccaccggttatcacgcggcggtttctgccgaggtcaagcccggtgacaccgccgtggtcataggcgatggtgcagtcggcctgtgcggtgtgattgccgccaaaatgcgcggtgccacgcgcgttattgccatgagccgtcacgaggatcgcgcggcgctcgcccgcgaatttggtgcgactgatatcgtgcccgagcgtggccaagaggctattgacaaggtgctggagatgaccggtggctatggtgcggacgcagttctcgaatgcgtgggctccaagcagtccttcgacacggcgattggcctgattcgccgcggtggcgtgattggtcgtgtgggcctgccgcacgacgtggagatcagcgccgaaggcacgttctacggcaacatcggcatcaagggcggcccggctcccgtgcgccactatgacctcgatgacggtctgctggatgcggtgctcaagggcgaaatcaaccccggtcacgtgttcaccgccgagtacgacctcgaccatatccaggacgcctacgaggcgatggaccagcgcaaggtcatcaaggcgctgatccggttctagggtcaggtgcgcagcgaacggttctcaccaagaaccgtgtgagccattcgcacaaaaccgcacaatcgaacaggccgccggtgtgatgggggagagattgggggtgagccggttcggtgcatgtttccataccgttgttttcgtgtagaatcggctacctctatacctctgttttcgtgtagaatagcatatgcctataccgttgttttcgtgtaatgaggtgattgctcatgttgaagcgcaagatgctggataagctgatcgcatggaaacaaaaagcgggtgggcgtgaggctcttctcatcgaaggcgctcgccgtgtgggcaaaagcaccattgtcgaggaattcggccgcactcagtacaagtcatatattctcatcgatttcacacgtttgccgcgcgacgttcgcgacatcttcgaaaaccagcgtgatgactttgacacatttttcatgctgttgtctgcgtattaccgcaagcgactgtacgagcgtgaatcgttgattattttcgacgaggtacagcggtatccggcggcgagggagctcatcaaatatctggttgcggatggccggtatgactatgtggaaactggttcgctgatctccatcaagaggaatgtggcgaatatcgtcattccctccgaggaacggaaaatggatatggggccgctcgattttgaggagttctgctgggccatgggggaggagctgcttgctgaaacgattcgcaaatcgttcgagtgtctggtcccgttgcccgatgcgctgcacaaacgagcgatgaggctgtggcacgaatatctgctggtgggcggtatgccgcaggcggttgccgattatgtcgagcagcgcgattttggcgaggtggatttgatcaagcgtggcatcctgcagctgtacagtgatgatatcggcaagttcgccaatggcgatgccggccgtgtgcggggcattttcgctcagattccagggcagctgtccaagcatgagaaacgattcactctggcatcggtcgataagggggctcgatctcgtgaatacgattcggcgttcttctggttggaagacgcccgcttggtgaatttgtgccgtaattcgactgaccctttggtgggactgggattgtacgaagataacgattcattcaaatgctatatggcggataccggtttgctggtgtcgcaggcgtttgccgatcgagagacaacgccggatgatgtgtaccgggatattctgttcgataaactctcgctcaacgaaggaatgctggtggagaatgcggtggctcagcaattccgggcgaatgggcgcaaactgtatttcttctcgcgctcggatagggcggatgccacgaaaaccatggaaatagacttcctcatcgttcgggaatacgataatgccgcgatgaagcctcgcatcagcccgattgaagtgaaatccacgaaacgatacggcgtatcttcgctcgacaaattccgcaaaaggtatgcccaacgattgggcaaggaatacgttctgcatccccgccaactcgaagtggatggagaacgcatcaagctgccgttgtatatggcccactgtctgtgacgcgagaagatggatccgatcgccagcgcgtcgtcgatgcccgtatccaaatcaagaatcagtttcctgcgcatattcgcgcctttccctttgcggtattccggtgagtcacagcccgcgtttgacgagcccgtcgaggatggcgtcggaggactccccaagcctcaggcctatgacgtcgacgcggcgcagcagatctcgggttttcagggtgtccatgctcatttcgccggtgtagacggctgcaagccccgattcgtaggcgcgccgcacgcgggcggattccttgctggcctcgaggcagtatcggcgcatgtcggcgccttccgcggtcacggcgagttccagatcgtgcagggcgacgttcacgtgggtcaacgcgacattggcgtgttcgccggcatgtcctttccaaagatggatctcgcgtatgaaatcgcgggtgttgtcgagcacgtcgtcgatggatcgggagaaacggaacaaatcctcacggtccaacggcgtggtccaggccttggccaacgcgtgaacgaccttggaacggacctcgtccccctcgtgctcgatatcgttgacgctctttctggattcatcgacgctcagatgcccctcgacggcgtccaacgcgatggacactcctttgcgggtcgtcgtcacctgttcccggagcagccccatgacgggatcctctgcgagcgcgttcttggcgctgaaccacggcattgtggcaccttctttcgttcgttgtcgcggcgaaggcagcggcctctgcgtttccggaccagcccggaacgggcgccgtttcaggctggtccggaaacgcagaggagccgctgaggggaaatcgcggagaaccgccggaatcaggcgatgacccggcgatactcgtcgagtttctcgggccagtcggtctggatgacgtcggcgccgagggcgaggagggcgccccagcctgcctgggggccttcgaggatggaacgggtgtcgtccatgcccttgaggccgcagtatccgttgcccaggtcgagggcgttgacgaacgtgtacaggccgagttcgttgatcctgttgaagatcgcggggtcggcgagcggggtgtcctcggtggtggcgacgagttccacgccgacggtgttgatctgctcgtcgtcgacgaacagatcgagttcgtctgggttctggatcatgcccatgaacatgtatttgacgtcgtggtcgtggagggcctgctggaagcctccggtgacggggcatttgaggatgagcttgctttccaggtggaactggtcgagccagtcgaggaatccgctgccccagtagcgccaggagcggtcgatgttgatgaggatgtcgggcgcgttggacaggatgtgcgcgacccgttcgacgttgccgtagtaggctccggggtattcggtgtagcgcagttcgtcgagttcggcggcagtcttggacaggatgtcgtcggtgatgcgtagacgggccatttcagtgccgtcgtggaacgcgaagtattcgccgtcggtggagcggattacgtcgatctcggcgatgtctgcgttgacttgcttggtggcgaggacgctgttgagcgtgttctcgcgaatgtcgccgcgcggggtgccgcggtgggcggcgatgacgaacggcgagcgggcgcatgcctggttgagattggcgttgatctgcgcgtattgttcgcgtccgaatcgaatgggggtggctgcggtgttcatgtcggctcctttgctgctgccgggaggctatgggtgatacgggccttcccgccccgggagagaagaccggggcgggaaggccgattgggttgcgggtatcgcgggtgtttacttgcctgcggccttgttgtaggtggcgatgtccttagcggactgggtctgggcctcctgcatggcggtcttgaggtccttggagccgctgacgacctcgttgaaggaggccatcacgtccttgcggatggacgggtaggcgccggtgcgggcacccagggacacgctggtggacgggttggcctcgagctgctcgtagaagaccttgacgttcgggtcggccagggcctccttgccttcggtctcgtcggcggccttggtgttggcgaacaggttgccggaggccttggcgaacacggcctgggcgtgcggggccatcatatacttgccgaattcccaggtggccttctgctcggcctcggagtgctcggcggccacgatccacagggagttgccgccgatcggggtgccggccttcttgttcgaggcgtcatgcgggaactgggcgacggtcacgttcgaggtggagtcgccgggcagcagggacgtgtaggaggcggaggaggtcaggaccaggccgagcttgtcggaggtgaacgcggtcatcatggagctagagtcggtgccggggttcagggcggtgccgtccttgaacatgtcaacgatcttctggaacatgtcgagctgagtcttggaggtcatgttcacaccggtgacgtccttgccgccgcggccgttgtccggggtggcgatgagctcgccgtggctggcggagagcatctccagaatccacgagtcgaccatgttcatcgagaagccgtacgcgccggtcttctcgtggatggtgttggcccagtccacgacctcgtcgaacgtggtcggcgggttggacacgtccaggccggcctcctgggcgagcttgttgttgatgtaggtcacgggctggctgatggcgaacggcagggacagcaggccgttgtcgtcgctgtagtacttgagggccacgggctgcaggtcggcggtgtcgaaatcggagtcgcccttggcgagcttgtagaccggggtggtcatcttgctgtcgatcatgtagccggtggacgtgtcgttcatctgcaggatcgacggggtggacttggcctggacggcggcggagaacttctgctgcacgtcagaataggagccctggtaggaggcctcgaccttgatcttgcccttgtgggcgtcgttgaactcggagacgagctggttgatggcgtccacggccggaccggagttcgagtaccagaacgtgacggtctgctcgccgcccttggcgtcggcgttggtgtccgacgtggatccgcatgcggacagggcgagcatgggcaggaccgcgacggcgaccgccttcagcagggttgacttcctcatgataggtttcctttctcgttgcgccggacggccttcgacggccgccggccggaaaaaatggttttgttggtttttcttgtgtcgtacggatggggatcggcccacgatccgcagccgtcgcgtggacggccgcggccaggggttacttgatgctgcccgcgacgctcatgccgcgcagggacttgttgaacatgagcgtgaggatcatggccgggatgaccgcgatggccgctccggcgaggaccacgccgatgttggagccgtcagtgccgctcagctgggtgatgccgacctggatggtgcggtgctcgggcttgttggtcacgagcaggggccagaagtagccgttccaggcggcgaccatggcgttgatggtcgcggcgatgatggtgggcttgacgatgggcaggagcacgtcgaccatgaacctcaggtggccggcgccgtcaatcagggaggcctcgcgcagctccttggggaaggagcggaacgcctggcggaacaggaacacggtgaagccctgcacgaggaacggcaggaagatcgccggaatcgtgtccatgaggccccagttggcgatgttcagatagttcgacaggagcgtggtctcgccggggaccatcatgctcatgaggaacaccatcatccacatgcccgggcgcctcaggttgcagaacacgatcgcgtaggccgcgaggaacgcggtgacaatctggcccgcggtctggcagacggtcacaacgatgctgttgcccagctgctgggtcaggggcatctgggacatggcgcgcatgaaattgcccagggtgaagcccttgaacaggccgttggcgtcgaagaagaacgcgccgacgtagatgtacagaaccggcagcatgacc

SEQ ID NO: 334 - DNA, 4800 bp, Unknown
  R42_10m  MAG No. k141_9749
ggtggatctcgccaacctgctgcaggtggtgcagggctatgtgccgttcatctcctacgcgggcgtgcattccgatgccaccaccgtggagaccaccagcggcaacaagatttccgacccggacgatcccggcttcaccgtctccgccacccgacttgaccaatccgatacgcaatccggttccgccggcggctacatcggatacggttccggcgtgcaggtatcccattccagcgtgacccaactgcgccacaccgacgtcaaggcaccgaagaatctggaaaccgccggatcaatcgatggcacctatctgagcaaagacagcacatatgcagtcaccgctgcgcgatacgccggcggttacatcggcaaaatggacatcggctcggcggcagctgtgggcggtggcctgagcctgctcggccagaacgtcaatctcaacgatgtactcagtgtgctggatgtcgtcgtctcgacgattgaacactccgatgtgactggcggcatcggcggatactccgttctggccagcgccgcagatcataggaatgccaacaatgagcccgatccactgggcatggctggtggtttcgccggagacatcgaaggcggccacattcaggactcgagctctcatgagttcgtatacatcatcggccaggtttcggccggcggttacgtgggtaccatgcagccgggagccgtggcgaacgtgcttggtgacggcagcgtgctcaagaagcttgccaaccccgacaacctgctctcgctcgtgcaggacttcacgccgacgattcgcaacagctcgaccgatgccgcagtgtgcggcggcgcggtgcgtgcccaggcggcatcggatacgaccacacgccgcggcatggccggcggctatgcaggtcgtaatcgtggcggtcatatctggggtaacaacacagcagcgtggaagcaggagaataccggcggcaaatacaacgggccgcagcgcgtagcctacgccgcgcgcatccgcagcgtatacggtgccgaaatcgccggcggctacaccggcttcatggaagcggccgataccgctgaaggcggttcgctctccttgctcggcggtctcatcaaggccggcaatctcgccggcgtgctgtccgtggtctacccgaccgaggagcacacgaaggtcaccggtccgctgcgcaatatgagctacgaccaatggaagacgtgggtcgacaacatcggcaagtacggtgcgtatggcaaggaatttaccgaggtagctacgggcgatggtgcgggctctgttactgatcaggattccctggacaagttcctcgaatcctacatcttcggattcaacgtcgtcgccggtcgtgcggagtataagactggcgcgaacttgcatgattccggcgtcgccggcggacacgtcggtctgatgcgcaccggcacgatcaccgatggccagtcgatggatgtcaagaccgtctctgccatgcgtgcggcaggcggttatgcgggcacgatggaatccggctcggcatcctcgttcggctccatccaactattcggcgacaaaggcatcaaacttgatttgggacagatgctcgacgtggcacaggtatttgtgcccgtcgtcaaatcttcgagcgtggccggctaccgcaagggtatgaaggtcgtggccaccggtgaagacatcacgcacggtaccggtaatgccggaggctatgccggtctcgcggtcggcggccagatctggggcgatctcgaccagaacggccagaagcttgtcaagggtgtcaccgctgccggtgccaacgtttccaacctgcgcaaggtggaagggcgcaacaatgtcggcggatttatcggcgtggccactgccggtgcggttgcggatgtggacaccaatgcgtccgagggattcctgcaaggaatcctcgactcgctggtatcgaacccggcaagtctggtcagcgtattgcaggccacggttacgacgattcgcggtgcacatgtgaactcggatgacccggcatggggatacacggtcaatggcgcatatgagagcagggacgataagggtaataccacaaccaagtatgccctgaacgccggcggtttcgctggttcgttgcaggccgcgatcctcggtgacaaggattccgccaaaggcaccggcagtgaagcggatccgaacaatgacccggcttctcttactgttaacgggctgcgcgctgttgaaggcgggcaatacgccggtggcttctttggccttgctgatatatccagcgtcgcttccgtcggcggcggcgaggccggcgataagcagaataccaacctgttgcttaaactgctcaaggtcggcaacgtgggcgtgctcgaagcattccgcaccttcatctatgacggtcaggtcaacggtgtgagcgacggcatccagattgtcgcccatgattccaccacaaagggcatgcttgactcgaagcgttacaccggtgcggccggtggcttcggcggtgggctgatcaatggctctgtgaagcagtctgcggtcaccaacctcaacagtgtgaccggcgtgaactacgtgggcggcttcatcgggcatcttggcaaatccggcacggtcgccgccgacaatgcacagctcggcacggatgcgctcaatctgcttggtgccacggccggcgtacttgacatctggggctcgcacgttggcgattcgcgtgtcaccggcatcccggacggttataccgtcaccgccacacaccatggcgacaactacggcaaagccaccgacaaggctaccggacgcgaggtcgcaggcggttttgttggatacgtggatttggccagggtgaagggctgcgcgtctgacaatctcaagaaggtcactagcggtgagattgccggcggattcgtcggtgaaaccagccgtgcctatttggttgacgcgaaggtcaactccgtacttgtggaactgctgctgcaagtggtgaacgcgctggtcaagctcctgtacctcgacaaggcggaacaggtcggcgtcatcgatttaggcaagtggttcccggccatcttcggcaaggtattcaatctcaaggtgctttcggaaggcgacgtgctgtacgtgaacctgttcggactgaaggtgagcgttgctctgtccaaggctgatgatgaaaaccagcagcagaccgacgtggcgattgtctccatcggcgatagtgtcatcaaactgccttgcaacaaagacggcattgatatgaatgggtcgggcagcaacctgaccgtccagctcatcaagggcaaccgtactcgcgtggaacagtccaccgtaacgggcatcgccagtggctatgacgtgttcggcggaggggcaactcaggataccgacggtgtgaaggatctttccacaggctacacgggcggcttcgccggactgaacgacgagggcgtgctggcagacgaccacatggtctacgccgacacgatccgcggtgccagcggactggtcgacccgttctcgaacaccaaactcaagtccgtatgggacttcaacaccatgagcgacatcctcggaccggtcgatgacggccacggcggcaaggcatacaacacctatcgcatttaccgcaaggcggccgcgaacgctagtgaggcccgcacctccgcacaggacggcaacaagatcttctcgcagaagaacacggcagacgatgcgctgaacaccggactcgatcgttgggaagtgaagctgttcgacgtggtcaacacatacgacagcagcgctgtgcgcagctccgcatccggcgacgccggcaccacttgggtcggcattaaggacgccgtggtcaactccacggacggcagcaccaagacgaagctcgatgcctaccagtccccggccaaggcagtgctcatgctcgacgcgaccgtgaccgacaacaacggtggactcacccccgaaccggacgacggccaggacccgtgcggcaaggacggttgccgaaccattgacctgaccgtccagaaggtatggaaggacggcaacctcgaacggccgcagtcggtcgaactgaagatcgccgcgcactataccgatggcagtggcaatacggtgacgccgcagacgattcaatgcttcggcgcggattgcacaactgtgacgcagaagaatccatggacggtgacgttggactcctccgatgcctcttcctggagcaacacctggcgcaaggtgattcaaggactgccggtcgcattcgtggatggacaggatgccaacggcaaggacatcgtgcgttactacacgtacaccgtggaagaaaccgccgtgacctataaggacggcgataccaccaagaccatcaagcccgcggaggccggataccaagtatcggtctcctacaacaccaaggaacgcgtggccattgttaccaatgcggcgttgcttccggatacgggaggcgcgggcacgatgtggttcctgatgttcggcttgctgcttatgggagctggcgtggtctggtacgtgcgtaatcaacgcgttcaatccggcacagtccgctcgggctccagccgtatacgaaagcgaggtgcccatgcctcgtgacgaccacatagacaaaccgtacctgccaaacagaaaagatttccatctagagaaaggaacagtaatgaaatcactgatgaaaaaggttttcgctgccgccgcggcgattgccaccgtatttggattggctgcgacgacagtcgccacggccaacgcagcgggtggtaatgccacgctgacggtcagcacta

SEQ ID NO: 335 - DNA, 19612 bp, Unknown
  R42_10m  MAG No. k141_10002
ccctcggacagtccgccgaagaacccgttgaacatggttgccagcacgatcggaaacacaatcatccagaacagtgcctgacgattgcgcaggttcgctttcaatgcgaccagaaatgtggtccacatgatgtctccttacctgctcccgctggcgggagctgtcggcgaagctgactgagggtggttactacgggaccgcccccgcccgcttcgcgggagcccccgccagcgggggcaagattgttagtcccttaacgccttgccggtgagttcgaggaacacgtcgttgagggtgggcgggcgactggtcaggtggccgatgttggcgccggagcgtttcaccgcgtcgagcacgtcggtcaggttgtgttcgccgcgacggcatcgcacgtcgagttccttgccgtcgtaggtggcttcgatcacgcacggcagcgcacggacctcggccatcgccgaatccgccagatcgagcgtttcgatggtgatgcgctcgcccgtgtcgatcatgttcttgagctcgtcggcggttccgagcgccaggtgccggccgtggtccatgatgaggatgcggtcgcagatctgttcgacctcctccatgtagtggctggtgtagatcaccgtggcgccggcctggttgagccgctggatgccttccagaatcgaattgcggctttgcgggtcgacggcgaccgtgggttcgtcgaagaagatcaggttaggcttgtgcgcgatgccgcaggcgatgttcaggcgtcgcagcagaccgccggacagtttgccgggccggaacttgcggaagtcctggagtccgacgaattcgatggactcctcgaccagcggcgcgcggtcgattttcttcggcacgtacagcgagcagaagtagtcgatgttttcggtgacggtcagttcgttgaacacggccacattctgcggcacgatgccgatacggcgcttcagcgcgtaggaggtcggcgtcatcggctggccgaacacgcgaatcgtgcccgaatcgtaggtgagcagcgcgaggatgcagttgatcgcggtggttttgccggacccgttcggtccaagcagcccgaaaatctcgccctggttcacgtcaaggtcaaaatagtcgagcgccaccatgtcgccgtagcgtttgaccagttggctgacgtgcacggccagagccgggttggttgtcgagtcgtgttcggaagctctgttgtcggttgtcatagtcactcccttccttggcgattccatcatcccaagaaggggccggacgccgccacaggcaaacgtcacgacttggccgcacaggcgtgacatttgtcattacagtccttcggcgtcggtctgcatggccttgtacaccttatcgaccggcatcaggctgatctcgtccatcgaatagttggacgccctgtggctttgcgcaatcatcggtatcatccctttacggttgtgtcgacaacatccgacgcttgtgcctcatctattcgggaagtgtagacccgttgtcttggaccgtcatgcgaataattccgcacgcccgtcaagttcgttgtgttccgcacaccgctagactggtggtggaagagcgtcgagccggggaggtgccatgcgcgtgttggccgagaagggcttgctgctcgtgttgggcctggctttggcctggcttgtcggggtgcggctcgatggcgtgttcatcgccggcctgctgttggccgtttccgtcgccggattggtggaatggctgcgtcccgcgcaatggtcttgggtcttgtgtacggcgtatctcgtcatcgtcgtggcagtgccttcatggtgcgcgttcatgccgctcatcgccttcgatactgcacagctgccggccctcgcctcggccggagcccgaactggggcacggactgcggcaagcggccgtttccccagtgtctcgcggaccgcggcctctcgccgttcccttgccgatgcaatgcgttcggccccgtggctttcggccgccgcgcgctggatatgggtgttgccgctgatcgcgctctggttcgcccgtggcaccgaccgtctccagacgctggtgatgacgctggtcgccctgcttggattcgttctgggccgggcccgcgcctcctcggacgaggcgcggcgcgcgttgctgcacgcgcaggacagggcgcgcgaatcctcgcgggccactcgttcgcgcatcgccgacatcgatgaggaacgcgcccagtcgattcgcatggcgaccctcggcgagcgcacgcgtatcgcccgggagatccacgacaatgtgggccatctgctgacccgcgcgatcatgcaggcgcaggccggcaaaacggtggccaaggcgacgaacgatacggtcgctgcgcaagggttcgccacgttgggtgcgacgttggatgatgcgatgacgatggtgcgccgttcggtgcatgatcttgaggatgatggcactgatttcgccgcgcagatcgatgatgccgtcacgtcgttcgacggcatctcccccggtttcgccgtgacgctggccaacgatatcgccaaggcgcctgcgccggtctcgcgctgtttcgcgaccgtgattcgcgaggcattgtcgaacgtggtgcatcacagcgcggcgcgcgaggcgagcgtgacgttgcgtgacttccccgcgttctggcagttggtcattcaggatccggggccggccgtgtccgagtccgatgggtcccggacggccgctgcccgcccgcgtgcgatgcgtgccacgctcgtcggctcgcgactcgccgccgacagtgttgccgatatgcgcggttcggccgatgagctgatgcgcggcatgggtttggcggatatcgaatcgcgcgtacgcgcccttggcggcaccgcggtctgcgggccgtatgagggcggctggcgtgtgttcgtatccgtgccgaagaagcgttggaccatggaatcgagggattgatgagaatcgcaatcgtggatgatgatccgatcgtctgccagtcgttggagacgattctgacggccaccggcacggccgaggtgctatggacggcaaatgacggcgacgccgccgtgcgccgttatttcgagacgccggcgagccgaccggacgtgctgctgatcgatattcagatgccctgcaccagcggtttggatgccgcgcgcgaggttctggccacggacccggccgcgcgcatactgttcctgaccacgtttgcggaccagtcgtatatcgcgcaggcgatggggcttggcgccaagggctatctcatcaaacaggatgtggcggcggtcgggcctgcgctgcaggcggtgatggcaggtcaggtggtgctcggcgcggaagtgctcggcaagctcaccgaacggactccggatcctgccgattccgacgattccagagataccgccgattccatcgagggcctgcttggcgagcgcgaacgtgagatcaccgcgctggtcgccgagggcctcgataaccgcgacatcgccgccagactgttcctgagcgaaggcacggtccgcaatcgcatcagcgcgatactggacaagctcggcctgaccaatcgcacccaactcgccatcctctggctcaacgcccatcggtgaggggcctttggtcaagtaggtctctccctccgtcatcgcttcgcgatgccacctcgaacgcgattcaggacagcttgcagctgacctcttattcgctcgttgtcactcacccttgcctaaaaacacctccggcgttttcttcacggctcggctcatcagagggaggttatgaaaaaccaacctcagctgtttttcatgacgatactgtcgatggtgttggccacgcgctcgcagtcgtcggagcactgttcgaggtgacggtacacgtcatgccaggcgaacacctgcagcggatcggtgcaggtggtgtgcagcgtgcgcatcgactcgatgaacaggtggtcggcgtccgtttcgatcgtgttgatggcgaacaccagttcgcgcaacgtcttggaatgccggaatcgcggcagttcgttgaccagctcacagatgctttccgtggcacgcaccaccatatccgacatctggaccgcatcgtcgcgcatgtcggtcacattgtcgtagtacatgcggttgagtacgccttcgatgctgtcggtcacatcgtcgagcacgtggccaagctcgtcgatgtcctcacggtcgaacggcgtgatgaacgcggtcaccagttcgtccatcatgtcgtggcgcacctcgtccgccgacttctcaatcgcgtgcatgctgtccatgcgttcgcgcagctggtccggattgaagtcgtgcatgacctcggacagcagcttcgcggcctggcatgcgtagtccgcgctgcggaggaatccgtcgaagtagaacacgtctttttgtctcgccatgatgggtggaatcctttctagaacacgaccatgaacagtttggccattacgaagctgatgagaccgcaaccggggaaggtgaacacccaggtgagcatcatgtcgcgcaccacgccgaagttgatggcggagaggcggcgtaccgcgcccacgcccatgatggcgctggtcttggtgtgcgttgtggagacggggatgccgagcacggtcatgacgagcaggcacagagcgcttgacagatcggccgagaagccttggtatttctcgagtttcaccatgtcctggcccacggatttgatgatgcgttcaccgccgacggacgtgcctacgcccatgatggtgctgcacagaatcatgagccagaccggaatcatcacaccggtcacgctgggttggccgttgcagaacgccatgccgaggaacagcacgccgatgaacttctggccgtcctgcgcgccatgcatgaagctcatggccgccgcgcccacgatctgcgcgtaggtgaagaacccgttggtgcggcggcggtccatgccagcgcaaatcagggtcacggccttgcataccaaccagccgacggcgaagccgaacaggaggcttgcgaccagaccgtagagcaccttgacccattcgcccatgttgatgccgccgatgccgccttggatggcgatggccgctccggacaggccggcgatcaggctgtggctttcggaggtgggtatgccgagcagcgaggcgcccacgctgtatacgacgatggagaacagcgccgcgcatagggcgatgagcgccgcgttcgtgtcgccgccgaaatcgaccatgttgctgatggtggaggccacggaagcgttgagctgcgtcatgatgaagacgccgaggaagttgaagatggccgccatgatgacggcggagcgtacgcgcatgcatcgcgtggtcacgcaggtggcgatggcgttgggtgcgtcggtccagccgttgacgaagatgactcccagcgtcagcaacgttgtgacggtcagagccgggttggaaagcacttgttggaggaaatgcgccagtgagacgtccaaagggaatcaacaccttcttcttcgggggcggaagccgtcacactgattgtaacggaagaatggctacgtagttcccatggcgcgcgggttttatggtgttgttatgctgcgcgccgcgcatcctttcgtgaaaacagagcgggacagtcgtatgcttcgattcggcgcctgcatcgacaactatcgtcatctaccgaggattcggtcatgcgtgtgcgaaaatggacacggtgtcaatcaggaggtgcacagtggttgtaagcacggattcgagccgcacaatgcccgattgggtgaagtacggggtgttctggcacgtgtacccgttgggattctgcggcgccgatatccgtcccgccggcccgcgcgaattccatggccgtggccttgacgcgctgattccttggctggaatatgcccgtgacttgggcgcttccggtctgctgctcggtccgatattcgaatcggcgacgcacgggtatgacacgcttgaccatatgcacatcgatgttcggctgggaggagatgctgcattcgaccggctgatcactgcctgccgggatatgggtttgcaagtgatattggatggcgtgttcaaccatgtaagccgcaatcatcctgccgttcaggcgtcgcttgacgaagccgtcggccgcttggatccggccgataacccgtggcacggtctggtccgcacgcatgtcggcgataatggcgaacccactttggatgtgttcgaggggcacgacgatctggtagcgctggaccattcgtccgataagaccgttgactatgtggcccatgtgatgaactactggctggatcgcggggctgccggttggcgacttgacgccgcgtatgcggtgccgagcgcgttctgggcgcgagtgttgccgcaggtcaaggccacgcatccggattcgtgggttttcggcgaggtgatccatggcgattacccgcgcatcatcgaggaatccacgatggattcagtcacgcagtatgagctgtggaagtcgatccagcatgcgctggagacggagaacttctttgagttggattggaatctcaagcggcataatgcgttcctggattccttcgtgccacagacgttcatcggcaatcatgatgtgacgcgtatcgcctcgcagataggcccggccaaggcggcgttggcggtggcggtgttgctgacggttggcggcgtgccgagcatctattatggcgacgaacaaggctatgtgggcgtcaagcaggagcgtttcggtggcgacgatgatattcgcccgaagttccccgactccccctccaatctctccacattgggtgagccaatataccggttgcatcaggcgctgatcgcgctgcgccgccgcaacccatggctgattgacgcgcgtaccgaggcactcgaactggaaaacaagcatttcgtctatcgctcagtgagcgccgacgcccaacactccctaaccgtggacctcaacatcgagcaatcccccaccttcaccatccacaacgccgacggctccgtagcgtaccaatattaaccagcgcttggccccctccctgaggggagccaaggaacgtcatcgacgtccgttgcgggtaccggacgagcggaatggcgagctgttcttcttggaatggtgacgcttcgggccttgtgtattgccgtatttggcgatcatacggcgctcgtgacgcttggccccctcggaacgctcatcacgcacgatgcggttctcgttcttgcggtggatacgcttgctgccttcatgcttacgcgagccgaactcatcgcttcgatcgtaatcgaatctgtctcgccgatcggacttgccgttcttggagtacttatcgccgcgacggtcatcataacggtcatcagatttcttaccgcgacggcgatcctcatatcgagtgtcggcacgatcctcgcgtcgattgccacgacgctcatcgccatgctcgaacagatagtcgcggcgctcggcctcggggttgctcatgccggcgcggcgttccgcacggttgcggttcttcttcacggccttcttgctggccttgtcgccgtgcttgcgctgcggctcgccttcggcaacaaactcgccgcctgcgttctcgtgctggaatccggtctcggcaacgttctgctcggcgcggtcgcgattgcgattgtgcttgcgcctgccgctgcggccggactcatcgcccgccgcgttcttggcgcccctgttcttgcccttgcgcgggttgcccacgggctgcgacttgtcgaggctccaaccatccacgcgctcggcgcggtcgcccacaagctcaagcacttcgggcgaatcgtgggtcacttcgatcatcttggttttgatgccggcctggttcagcaagcggcgcgcctcgcggcgctgttcgggtagcacgagggtgaccacgtcgcccgccttgccggcgcgggcggtacggccggagcggtgcacaaaggacttcgggtcagccggcggctcgacctgcaccacaagctccacgccgccgacgtctatgccacgggcggccacgtcagtggccaccatgacgcgcacgtcgccggaatcgaatgcggcgaggttgcgatcacgctggttctggttcaggttgccgtgcagctcggcggccggaatgccgttctgcgtcaggttcttggcgagcttcttggcctggaacttggtgcgggtgaacaggatgcgacggccttcgcccgaggcgagcacgcgcacgagttcgtgcttgtcgccgcgcgtggtctcgaacacgtggtgggtcatcaggtcaggttcggtggtggccgaatcgacctcgtgcaccttgggatcatgcaggaaggtgttcaccacttcatccacgccgtgatcgagcgtggcggagaacagcatgtgctgggcgtcgggcgaaatctgctcaagcagtcgcttgaccggcggcaggaagcccatatcggccatttcatcggcctcatcgatgaccacgacttcgacggacgagagcgtgagcgcctgctggcgcagcaggtcctcaaggcggcccgggcaggcgaccacgatatcggcgccggccttcagatcgcggatctggtggatgtacttgacgccgccgtacaccgtggtggtgttcatgccgaacgtgtgggccagcggcatcagcacgtcgttgatctggttcgcgagctcgcgggtgggggccagcaccaggccgcgcgggtgcggcaggaaatcgtcagcgcggcgctcttccaagctggccttcttgcggcgcttgatttccttgcggaactcctccatcgcgatttcgccaagcgaatcataggagccaagccgggtgaccagcggaatggagaaggcgagggttttgccggagccggtgcgccctcggccgagaatgtcgcggccggccagtgaatcgggcagggtgtcggcctgaatggggaatgcggtcttcttgtcatctgccgcaagtacgcgcaccagcggtccgggtacgccaagttcgccaaaggtaagggggcgggattccgcgctgtcgttcatctggaaatcagcggaatcgtcacgatcatcgaaattattacggggcacagtggcctttcatgtcaaaggttacgcaaattacgcaagctttccgagcttagcgtaagccccctactttgcttgatgctcgccacgctgtcattccactctttacttatgaccccatggggcggtaactcgcccatgaggcggtaacttgcccatggggcggtttgaagaaattgtgaaaccgcagaataaagccattttcgtctaccgccccatgagggttttaccaccccatgggatgtttgccgccccatgggccaattaccgccccatgggttctaccaccacgtaaggcgagcaccgccccatggaacacgcaaatggcccctacccgtgaaggtagaagccattgtgcaaaagggctgagccacaatacggcccagtagccctaaaacacactacaaaatatccggatcgtctttggcgatagtgccggttgccttgccaatggccttcaggccgtggtaggccacaagaatcacgatcgtgccaatggcaatgccgttgaaggaaatgccaccaacagtgaacgcgaattggccgatggcaataatcatggtgatggctgccaccatgatgttcagcggcttgtcgaagttgaccttgttctcaacccagatgcggatgccgatcatgccgatcatgccgtacagcagcgtggtcacgccgccgagcactccggcggggatcgtgttgatcacggcgccgaacttcgggcacaggctcaggatcagggcgaaggcggctgcacaccagtaggcggcggtggagtacaccttggtggcggccatcacgccgatgttctcgccgtaggtggtggtgccggagccgccgccgaagccggcgagcgtggtgcccaggccgtcggccatgagggcggtgccgatctggttgtcgtagtcgcggccggtcatctgggccacggacttgacatggccgacgttctcagccacaagcacgagcacaacagggacgaacatgggaaggatggaaaaatcggcctgcggcaggtggaacttcgggaagccgatccatgcggcgtcaccgatggcggagaagtcgacctggccgcggatgcaggcatatacatagccgatgattacgccgaccaaaatgttgaggcgacccagcaagcccttgaacagcacggccacgagcagcacggccagcagggtaaccagtgcggtgtccggcgcggcttggaagttggtccacacggaaggtgccagattgaaaccgatgatggccacaatcgcgccgttgaccacgggcggcatgatgatgtcgatccatttggagccggcgtaatgcacgagcacgccaatcagggccagcagaataccggtgaccatgatgccgaagctggcgaccgcaatgcccttgttggcggtggtgaccgcggtgatcggtgcgatgaagccgaaggacgagcccaaatagctcggcagcacgttcctgttgataagcaggaacagtgcggtggacatagccgtgaagaacagggtggtggacgggtcgaagcccgtcagaatcggcaccaggaaggtggcaccgaacatggcgatgacgtgctgtgcgccgataccggcggtgcgcacccaagtcagacgttcatcgggctcgacgacctcgccgggcgccagcgtcttgccgtcgccatgcaattgccattggaagatattggacattactactctcctcgctctcgcttggggcacggcattcacaaccagccgcactacgcgccattctagctcacgaagattttgtgaagtctctcttccgggaaaggctatttgccgtaatactccagcaggtgcggatcgacggcctgcaccacatccaccaaatcgccattggacaggtacgggcgcttgaattcgcgccacggctccaccttgacctcccagcggccggtcgtctcgtcgagcacgggccgggcggtctgctcccagcgcacacgcttggaggtgcggccggtttccgggtcgcggcgcgtgtagtgcaggcaggtgcagttggtgatcttccagtcgtccgagtcggcgcgatgcaggaattcctcgtcggccagatcctcgatggtgagcatcagggcgagcatgaagtcgccgtgggtgaccatgaccacggattccgaatcggatttgcggctcagcgaggtcaggatgttgtgcacacggtcctcggccacatcggcaatcgactcgcctgccggcggacgccagtacagcggatcggtattcttgaagttccagttgcgtgcgtagttgtttttgaattcgtccttggtgatggtgttgatttcaccccaagaacgttcgcgcagcacacggttctcctcccatttggccttgggcagggccatggtggctgcggtttcgcgggtgcgcacgtatggcgagaccatgtaacggtcgaacagctgctgctggctgaccagccaacgaccgatgcagtcggcctgcttgcgtccggtggcggtgagtctccaggagcggtcgggtacggtgacgttgtcctgcgtatacagggagttgtcgccctgttcgcccgcctggacgatgacgttcgcttcggattcgccatgccggattacgtatagatcgagcggcatgctcatatggattcctctttcgttattggttacgttgtgttgttttctgctgtttcctacttgacctgcgtaatggtgttccccttgaccatgaacgcatgccgggccatgtcgatcatcggctgatcgaacttggagtcggtgtagaactcgtcgatgacggcgtccggaccgtacagttcgcggaaccgtttggtcttgttggtgttgaagttgaggtacgtgaccttcatcgtctccacatccacctcgctggccacgagattcctcacgccgagtctgcggcaggcctcccccaccgtcagaccgaaggatgcggtgaggatcacatcgtccgactcaggctggtaccaaggcttgatacgtgcgtaatatcggtcccagaaatcgtccacgagctgttcgacgctcgccacccgtttggatcggctcagttccgtgagatagccttcggtcatcttgcccacgccgtattccatttgttcaagcgtggcccggccaagcttgtatttgaccgcgtaccgcagcacgggggcgatatagcggaacactttcgggtcgtggcgggcggaatacaggtacaagtcgaacaggctttcgccatcatagatggttccgtcgaaatcgaatacgcgcataccttctgcttctactctgttattccttgtctaaggctaatctcggtaagccggcgaaagcgcaaatacgcagtgaatttcacatgaacactgttttttggattgatttcggtacaggtaacgtacactggtgacagcgtggaaggaggtgcgtaatggcgacgtctgaaatcgaacaatggtggattgataagtttcaggagaacctgggtccgattcgcaaggtagccggatggacgactcagcaactggccgacgagctgggagtcgcgcgacagacggtgtctaacttggagaccggcaaaagcccgatgaccaagctgcagtatctcgctttacgtacggtgttcagcgccgaaatcgcacgtcgtgaagaccgcgatctggcacgcatcatcaagactttggtcgacgatcccattgagcaacgcattcgcgaacggcgcgcccaagagcaggacggcgaggccgttgccgacaatgccccagtcaatacaggctgtggcaacgttgccgacaacgccgccaccgagaaacgcaagcccagtgccgccaccttgaaggcttcaaagactgccgcaacgggcaagcccacgctcagcacggcgatgcaggctcttgccgtcatcaccggcgcattggccagtggaaccgccgccggcatcatcacctacttgatgttcccggacggcggcccgaacaagcgctgagtcgccgaaatatcgaatccgttactcgcaggccacgccatcgtgatcgcggtccaacttgccgttgtatccaggctgcccttgatacaacggagcagcaccagccgcacggacttcagagcaattcgcataatgcacattttgctgcgcttgctgttgctgttgtgcctgtcgagcggcctcctcagcttgccgctgggcctcggcctgcgcggcagcctgttcttcagcggcctttcttgcagcctcttcttcagctgccttcttggcggctgcctcttcagcggcctttcttgcagcctcttcttcagctgccttcttggcggctgcctcttcagctgctttcttctcctcagctaccttcttcgcttcttcctcctgcgctatatcgctggctttacgaacattgataacaggcttgtccccatcttccacggattggacaacccagttcgaagctctgagcaccattttgtccgtgtcgcttttcacctcataatcagaggaggaaaaaccggcatccttgagctcgtctttcacatcggccagcgaacgccctttcttggcgatggcgataattttcgaatatgtggattcctccttgccgtccgcaccgtcagaagaccccgagcatccagcaagcacaagacccagaaccatcataagaatcacggtcaacgcccaaaccgcacgattgacacgcttcatgttcccgaaacgaaccctgttgttcaacattattctctcccttgtagtcgcagatctgcggatggtcggaaccacgtcaatgtgaatccaaccatcctgataattactgcttattcaatgatatattcatccattgttttcgccgatatatcgcaccagcgtttccctcattatcaactatttcgagttgcatgaatgcgccgtttataggccaagaatttcgtgcttttttgcatcaaattcttcttgggagagaatgccgatatcaaccaattccttcaattttttcatcgcctcgacttgttcttccacagacatggatgccgtgtgagcggcgggagcagcggcttccggtgccggcgcaggcgccggcgcttgaaccggggcggccgtcataggattaatggcttgtgccatattcatgcccagcaacatgccaccatcgccaaagccgttgtcttggatgccttgcgcaatgcgctgctgggcagccatattgccagcttgctgggaaacgccctcgtatgcggcaacattcatcttattcgaggcgaactgctgcacgagttgacgtgattgctcggtgaactcgatactttcgatgcccacactagacacttcaaagccaaaacgatcattccacgtacccgcattggcccgatcgccacgcacgcatgccgcgatgtcattcgtcttgccgggcaattgcgaaatacgatattcattggacaacgaattgatggccacaataaacgactgtacgaattcagacagaatctgcctacgtggcccttcatcatcgaatgaatacgacacggtagtggcaggcacaaagttacgaacgaatcgaactggatcagtgacctttagcgacatggatccgcgtgcgcgaatttccaaatcgacgccatagaaccggtcgttatacaccagcggcgcagaagtgccgaatttgatgccacgaatctcacgcaggttgacgaaggccacatatttggtgcggccaggctgacctccgaaggtgaatcgatcggcaacctgattgaagaacgatccgatgccgtctccggcgagcacgctctgctccccgttgcgatattcataaccgcccgactcggtgatgacgttttcgatacctgtttcagagaaaatgaacgccgcagtattctctggcacatagatacgcgaaccattggtgattattccctcggaaccgtattcattcgaaccgcgatcgttgttgcttccgcggggaatgcccggcacaacgacagtgtgttccgtgaacggaccagcggtgatgatatcacgccacaggtccgcgaatgtaccgccgagcgcgccggcgaacgccttaataactgccatctgttttttcctcgatatctcatgcatatggccgatcttgcgactatgcaatcgcaagaccggccgttatgctggcatgttggttatagctgcgtttcgcgatcgcagtattcgcatcgaacgacttctttgcgatgaccggaaagcggagcgccacaaccttcgcaattcaccgaaaccacgggttcggtaatcccaagcccactacggaatgcgccaaaagtgtccttcagcgccccggccagagcctccgttccggggatggccttgttgaaggccggctcatccattggcgtatactgtctgccgcgtatacccatataccgtcatcgttcctttcttggaaaaccgttacctcgatacgccagtctgatcactggcccaccgatgcgagcttctgcatgcatcgagtcatgacctcggtgtagtaggccgaatcctcactgctgagggagttttcgtcaatggcgtctaccttctgggagaactcagagtaacgcttcatcatgctggcatagtcggtagccatgctgaccacgttgtcggatttctgatatttgttcatgaaggcaacatactcatcgataaaggcctcgtagctgtccatcgtggccttgaagtcagcactgtcattggtgttccgctgcgccttctgatccgaagactggtcgctctgcttgttggcatcgctggaatcagtgcccgtatcagtgctcttatcatcctgcttcgcggcgtcgccgtccgtagacgtatcttccttcttttccggaacctggatagtgatggacatgatggtctcgtcgtcagtgttacgagaaacgctcacactgtatccatcggcgttcttggcattgaaactgtcagcggacttgctatagtccacggtgaaaccgttgtcttgcacggacttgacgtagtcggcatactgcttggcgtcggtaccgcacacctcgatggagaagtagtccgaagactcacttctaatttcaccctttgtggatttcggctgcggcagcagcgccgcgatatccgactccggccatgaatatgcttcgcacttggtggcgagcgatgcttccaattccgcccgatcagccttggccttcgcaccgtcacgaattacgaacacgccaccgattaccagacccacaacggtgataccgactgccacccaggccagcactcggccttgcaccttgccactcgggcgggtcacgtatacggcgaagcctgagagcagtgccggaatcaccgtggcgaacagcagtccgccccaggatcggccagaaacatccacaaattgggcgagtacgaacaacactccccaaataatggcgaacacagccagcttggaagtcttcttcaccccttgtgcattcggagcaagcacggcaggcgcagcggcaccagcaaaaccagtggcagcaccggcaccatgtgtggcgggtgcaggagccacaccaatacgcttgtccagagcggcgaggaactcatcaacgcgcttggcgctttcgtttccagtcgcctccagacgaatggcggcccctgccgcaccctgcgggactacggttagcgtgcagttcaccccatcataggagtggaaggaaaacgccccggtctgggtgttttcgttatccaaggtaaacgtggcgccagtagtcagctggtcgtgaataacttggaacagctgttgcggactgaccgcatatacacgatcaaatggcgcgccggcgggccgctgcgatgccgtagccggagtcatcgaagtggtggtagcaccatcagacgctacgttcggttggccagccggtacagtattcggcacggtaggcgcattcgcgcgatcttccggtgcgtcattcgtgccttcggacggtggaaccggctgaggttgttgatcaaatggcgttgtcatgatgcccttctttccttaagcagcagcattaccagcacagaagaggcaagcccggcaaccgttacggtcaatccgactgccatggcaagccggtatcgttcgctcatcattgcgtcccttcttattgctcgctttgctctgcgatacatcgaaccagtgtatggcgttgttattatgtacgcaaattagcattttgtatgcatgttagctttattgtcgatgcttgataccgcgcatgaacatcctttccgccaccgcacctacacggatggcatcgaccattgtcggcgacacgcgcgggccatacatcagctgacaactgaatttttcggcgtgtttccgaaaagtcggcgtcctgtacgctgggaatcgagcaaccgcgtacgatggcgcagcacagcacccgcaacacagcgacaaggagcatgggcaatggcagacatccccgaagaacatttgaccgaggaactgttggatcggctgctcgccagcgccagcattgagcagtatctcgatgagggactcgtcagcgcacgcacgctgaccgactatctgttcgaccgtatggaagcccatgacctgagacgagccgacgtggtgcgggcatccggcctcaacgccacagtggtttatgacattttctccggcaaaagccgccccggccgagatcacgccattatgctggctcttggtctcaagtgcacattacgtgaaacccaacggctacttcgtcttgcaggcgtttccgaactgtggtgcaaacagcgacgcgacgcgattatcatctggtgtatacgcaatggattcgaccgcatcgccacggacgacgagttgtatcgtatgggagaggcgacgttgctaccggccgattgacgacattcggcccaacaacactcaccagtgagacgcaagtaagagggcatcaaggagagacatggacgataagcaggcgatgcatgcgatgagcatcgacgatgcgtaccatgtcgagcgtacgctcgctcgcggaccttccggcgtcaccgaactggtgagcattgacggcaacggcccgttcgtacgcaagaagattccctctcccctagcgcaacgcaatgtgtgggcggcgctcagcgcctgccagagtaatcgtctgccgcgtgtggaagcgacgtacgagctgcccgaccggttcgtcatcgtctacgattacgtgccgggcagcacgcttgcgcaaattgcggaggaaaacgggcggcttgcaccgaatgtggccatgcagcttatcgaccaaatttgcgaagccgtgcaggagcttcaccagcacggcgttatccaccgcgacatcacgccggccaacgtcatcgtggcccaggatggcgcgcatctcatcgatttcggcatcgcgcgcatccggtcagaggcaagcaaccgttcacgggataccacggcgcttggcacctacggattcgcctcgcctgagcaatatggctttgccaaaaccgacgcgcgttccgacgtattctcgctgggccggctactcggattcatgctgaccggcgtatatcccgatgccagcgactacgagcagcgacttgccgatgatgccgcagtaccggctcgactacgcgccgtcatcagctatgcgtgcgcattcgagcccagcaaacggccacagagcgtccaagagtttcgccaggcgctgttctcccagtccaatccgcccataccgaacgcatcatcggcaaatccgccatcaacgagaacaacgaacggcagcgcgtcggcgtctcgactattccggcgtctgcacttgagcaaacgcgccatcgtgctgtggtccattgccggagcggcactgataatcgccgccattgcgggaggcattgtgttggcaggccaacttggcattatcgggtcggcaacatcacccgattcctcgacacaatccagcagccaatcaaccgataaggccgatggcgggcactcctcgaacgggtcaggaaccgacaatgccaatggcacgggcggagtaggcggcactgacggcgctgatggagacaatcaagacaccgtcaccgacaatcctctgaaaatagtggaatccggctggtcggcggaccagcaagggtatgtccactacgctttcgccctgcgcaacaccagtaagacccagcaggtgcagtatccgcagattaccattacggggcgggccaaagacggttccatcgtgttctcgcagacgcaagcactgaatatggcattcccgaatcagactgtatatgacgccggtcaagcaggcgaaggcaccgccccagaaacggttgattttactgtgctcaatccggatacatacaacgtcgccaaggctcagggaaccgccgccttccccatcagtggaatatccaaaatagacaacagggacggcggcacgacgttcaatggcgaggtccgcgccgtggcagatggattcaagccatctgatggacagcaaatcaagatttccctagtactgcgtaacgcacagaacgcaatcatctatggagatatcgcattcgtggattggccgg

SEQ ID NO: 336 - DNA, 8539 bp, Unknown
  R42_10m  MAG No. k141_10046
caggcggctaccatcgtcttgccaggcgtcttccacacgcaacagcagatgattgctcatatgattgcgcttgagctcgtttgcagccagcactttgggcaggaacgcctgagtgttcaagaattccgtgccgggcaccagactcgtctgccgcgcaacattctcataatcgaaggcacgcaccattgcggattccaccaagccgcacatgatggtgaacaggttctggaagtacaggttcatttggtcgggctgcgctttggcaagcacaatcaccacggccagcctgccattggcatgcacgcccgccgcatacattggaaggttttgttcgagattgcggtttacccacaatccgccatgatccaaggccgtaacaatgttggcataattctcaagcagcgccgatttactgaataaggattcggtctgcggactcgcggccatcaaatgcgcgaaacgaccaccattatcgattcggtaaataccgaaactatcgccgcccaacgtatcttgcataatgcgaatggtcgcgtaatacagctttcgaggcagcacttcgtccaattcacgggtcatcgcatacattttgccgaaactgtcgcgcctgccgataatctgtccgcgcagcatacgacgatcatcaagcacatcgtggtacaggtcacgcaggaacgcaagtcgctctctcaacaagctgttttcgtcacgcatgaatcgcaggttttcgcgattgcgcagctgcacgtatccacatactgcgccggcaacgaaatacaccacaaacgtaagccagttcgacgtgtcgtaaaacagcggagcgaacgacgcgcccttcgacgcatacgacaacgccatgccggcacatgcgagcgcggccgcgaacacgcctgcgttcagtccgtacatcgtgccaacgatcaccacgaaaaacaggcgcaaatccacggttcccaactggctgtcgccttgtaccgcggtgcgaagcagttcttccaatatgaacgtgaggaagatttcgattgcgatccatggttttgaatggttgcgtagaaaatcccagatcgggtgctttccggactgttcccgcgcacgcgcctctttccagcgttgcagcaccaagggaagatcctgcttgagcgaatatcgcggcgaccaaccataacgcaagcgcagcgcatggtcgtctgccgggtaatgctgtgtcctgtcttcgccaaaagtcaccgataatccaggaaatgccgtgctaatcacatcagccaaatcaccgtatgtgaagtcaaacgcgttgggcacgtggaatacttcgctttcggcggtccaatcgtcgaacatgcggtagatcagttcggcaagatcgtcggcgcagagaaagcatgtctgctggttcttttgctcgcagaacgacaatgtgcccgattccgcctgttcaaatagatgattgaaatatgcggtgacgccgttgcgatccgacgcatacaggtacgggcttcgaatgattttcgcttccagacggtaggtgcgtgcgtagtacaggcagagttcttccgacgctcgagacatcagacttttgctggtatcacgtacgtcggcgttttccggataggtaaattcggattcggggccgctgaccatcagtatttgcgtttgcctgttgcgaatggcatgcagaagtcttcgcaatgctcccagatcgccgtctctatcgctgcgtggggtcagattttcggaaaagaatacgatgcgatcaaattcgtatgtggtgatggtgtcgacaagggtgttggcgtcagacatgttgacgattctgagacggtcattgccgtctacggtgccttctcgttccgctatcaccacatggtctcggggaaaagcatgctgaatccactgtttggtaatgaaatcggtattaccgaccaaaagcacttccatgctgccgccccagtgaatactcccttaaacggggttatggcatagttctgcccacaaaccctccattgttcctgccttacggtattccagtgtaatccgttaacagacaaaatcaccccctcaacgggggcaacggggggggtattagtcactgctaatactttttcatacagcacctttccgctacgctcaatctccgccctcagcgatgaagaaatcggctcatccagattgatgacatcaactttaagcagtgaccacagattgtcctgaaggttctgctccaagcgattgaaatcgggacaaccggccacggcaagatcgatatcgcttttaggccggttcacgccctttgcgcgagaaccgaacagcacgaccttgcgagcgccggcatcagcggcaaacgcgcgaatctggtcgtacacgtgctcgataggaaccatgacacctcccgccgcatccaacagtcccggaccaatcccggaccacccgcgcttccatcatacggccgcgtcccactcaccgcacggagcccgaaccacccgaacgcggcgacgtagttgcgggaggcgggctggcgctgtagggcgtgcgggaagttcctgacgtctacttttcaggaggtgaatcctcatgttcaccacgttttctctggccatcattctcgactgcaccgtacgcattgtgctcggcacggcattgggcgcgctgatagggctcgaacgccagttgcgcgcccgaagtgctcggcgtgcgctgggatgtggagcacatcaccacgtccgactgaaacgtccgactgacgctgaccagcaacatcgcaacagtacaacaagccaacaagtgggatggggcatcgagcctcatcccactttgttattatccggcgattgtcagactcactcacgccacggtgaacgtggtgcgcttcaggtcctcacggcgcgaggagtggccgatgagcagttcgaattcgccgggctcgacgatgcggttggcgtccgggtccacgatcgtgcagttcgccaccgggatctcgaaggtgacggtcttggtctcgccgggttccagtgcgacgcgctggaacgccttcaattcgcggtcggtccagctgtaggaggtcacgatgtcgccgatgtaggcctgcacgatctccacgccggcgcgctcgccggtgttggtgagggtgatttcggcacgtacggtgtcggtttcggcgaatgtgccgtcggcgttgcttgcgccgcccgtaatggtcggttcgccgtatgcgaacgtcgtgtagctcaggccttcgccgaacgcgaacgccggatcctgggtgaggtcggcgtaccggtcgccgtgctggccgcgaatctggttgtagtagactggcagctggcccgcgtggcgcgggaaggtgatcggcagtcggcccgacgggctggtcaggcccaggattatttcggcgatggcctgaccgccgcgcatgcccgggttcggcgcccacaggatggagccggtgccggtttcagggtcgctgacgcgcttggcgaacacgccgtactcccccacgatggaggcgggcaacacctgcggcttggagctgatgagcacggtgaccatcggcttgccggtttcgcgcgagacggcggcgagcgcgtcgagcagggcgttctggccaccgagcagttcgagcgtggcggtggagcaggtttcgccgaccagctggaccacgtcgccgaccacggccacgatcagatcggactggcgggcgttggccacggcttcgtcgatcattgctcgatcgacggcggcggaaacgccgattttcgggcgaggctggccgtccgggtagaactcgccggcagggtcaggcacgaggtcgatgacgttcgcgccgcgcgagtagaccacttcgcaatcgtcggaggtgagctgggtcaggccgtcgagcacggtggtaatcatgcctcgaggctggccatccggcatccaagagacctgaccggagttgccggtccagtcgccgagctggttctgggcgtcgtcggcaagcgggcctaccacagcgatgcgcttggccttgtttgcggcgaacggcagggcgccgtcgttgcgcagcagggcgacggattcgcgggcgagttccaggttggtctgctggtgttcggcggagccgatgaccgccttgatgcgttcggcatccggcaggcgcgggtcttcgaacaggccgaggcggaatttcagggccaggatgcgggctaccgcatcgtcaatcagggattcgtcgagcagaccggtttttacggcttcgatggctccctcatagaactgtggggtggtcatgaccaggtcgttgccggccttgaccgcatcggctgcggcgtgcacgtaatcgggcttgacatgctgttcccataccgagcggccgacgttgtcccagtcggtgatcagcgtgccattgtattgccatgcgccgcgcagcttgtcggtcagcagccatttgttgaacgtgaccggcacgccttcgatggactcgtagccgagcatgaacgtgccgcagccttccttggccacgcgttcgaacggcggcaggaaccaggattcgagcttgcggtgggagaggtcggcttcggaggcgtcacggccgccctgggtctcggagtaaccggcgaaatgcttggcgcaggccaggatcgcgttcttcggcagggcctcgccggccttggcgccgccctggtagcccttgaccatggcggaggcgagttcgccgatcagcatcgggtcctcgccaaaggtctcgtccacgcggccccaacgggtgtcgcgggcgatgcacagcaccggggagaacgtccagtgcacgccggtgcaggagacctcttcggcggtggcgcggccagcggcttcgactttggcggcgtcccagctgacggccatgccgagctgggaggggaagatcgtggcgcccggccagaaggagtatccatggatgcagtcatctccgataatcaacgggatgcccagacgcgtcttctcattgacggtcttggcggcacgagataaatcctcggggctggtatgcagaatggatccgacatgcttattcacgatgagatcctcaagatcgccgccgcgggcgtcaagctgcatcatctggccgaccttctcctcaagagtcatacgggagagcaagtcggcgattcgctcaccagcgggcaaatcaggattcttgtacggtaaggtttcagcagttgcggcaggcgtggtgttgtcggtcatacgaagtcgctttcctcagtgaaatcgaacagctttttaattaccaattggtagtttatctattgacagcatacaacacgcttatgccgcgcgcatcacatacaccaaaacgaccgtatgtatgcgaccccttcgttcgcccgcatacttactgccgccatcaagcacaagcctcagttcaaggcacacagcgaatcagcgatacccgtcccatatcggcgaaggaaatatcgccggctccagatcggcccattcatcgcataagtcaatggccggcccccgtaaccacctcagttgcacaccatccatgatctccagagcatggcgcaacgtgggccggacctcctcaaacgaggtgaattcggaaggcaggttccagttgtatgtcgaatagtatcgccatattgaatcccgacgattggcaaactcgtcatgtaacggatgcgcaggattgaacgattcgacctgcaatatcgagaacagctgaacaagcatggggcgcgtggaattgcaatgtaccaagaacctcagatacgcgggtaatctgaaatcatcgggcactgaaccaggcaggccggaggccatgaagtcttccacactgccaaacgtgttgtaattctcgtgatacatcgcggcaagcaggttatctttgctaggaaaatatcgcaaaactccctgcttggtaacaccgaccgcatcggccacatcctgcacagaagtaccgttgtagccacgctcggaaatcagtcgcacggcggcatcgagaatttcctgccggcgttcccccggcgacttgcgaacacgcttatgctgcaatgaattcccagatgtcatatccgccagtctatccgcattctccccactcccatgcgcaaccacatccaatatccttggccggatatgcaaaacggcgccaaaacaaaacattctgtcatgccttcgacaccgatatcgcgcaatagatttttctgtatatgcttcttcgcttactcctggaatacgtcggggtgcttcagatcgccgggaatgtcggacaaaaggccttcgagccccaggaattccttccagaaatcgagcggctggccgtatggcgaagcctcgcgaccgtgggcctggatgttggccttggcttcgaacacctcttcctcgctgatgccctcgaagtagctttccagacgttcacggtgctcaggcacgtagaacagagaggacacaatctccgtcagacgttcggcacgctcgataggcaaggaatcccagtggcgaagctcgatgaagttcttcagacgtacgtcattgaagtgcgtggagatgatgtggttgatctcgtacgggttgagttcgcggtccgggtacacctcccccgcgttctcacggaaggccgggcgatgcagttccttggggcttgctccagaagccacagcttcaggggtatgggtcaggtcagcgaacataagcggcgtggacaacacgtcgatggcgtaatcctcccaaccatagcgagcatcgaacagaccgggcagcacattggtgcgctggaagtccagataatcccacatacgctggcgcagcagcggccatgggttcgtctcgccctcgaaatacggggcgttacggaagaagtaggccagaatcgggccgataactgtgcccagacgcaacttttcgatggagtcgcgctcatccacataatcaatgctgacctgagtggaggcggagcaacgcatcatgcaggggccaaactgacccacacggccgaggtagtcggtcattgcatcgtagcgatccttggggttgaccggcacatccgcaaagctggatttgggctggtaaccatagttgaccaagcggaagtcgagatcgtcaagaatcgggtcgagctcgcgacggaacttggaatacaacgtattcaggtcggacggcttcttcagaatgccgattgaagtctccacctggccgccgggttcgagcgagacggcgacgccggggcgcgcgagccccaccagatggccgttctcccagtattccttctcctcgtcatagtagggtacgagacgtttgagcagcgtttcgatgccgttcggctcgtagtaggtcacggcggtgtcgtcgctgttgtgcacgggcaggtgctcgatctccacgccgaagccgccggcgccccgctgggagcgtccattctcaaagaacttgagcaggctttcgacgtgcttggggttcggcttggcgagcaggtgcgcgtaactgattcggggagtaaccatgctttgtatcgtattcgagccggccggtgcgcgtgcccgaaagcccgtaatacgctatacgaaaaaccgatagcaggctccggcccggtttctcgctctagagactcccctcagtcgctgcgcgacagctcccctcacagaggccgagccgtaaagcggacagcccagtggactgtccgtaggcgagggtgagccgataggcgaaccagcatgtcgcgagcgaagctcgtccttaattgcggacgagccagagcataaatcagtccgcggaggtgaagccctgcggctcgccggcctcggcgaacttggcgttgtgagccttcttggcggcggcgatcatcagcttgatacgattgagctggttcgcctcggaggcacccggatcgtaatcgatggagacgatgttggcttccggatgcaggcggcggatcttgccgaacatgccgcggccggtcacatggttgggcaggcaggcgaacggctgcgcgcagatcacgttcgggcaaccctgttcgatgagttccagaatctcggccgtcagcagccagccttcaccggcctgcacgccgatggaggtgacttcagcagccttcttgaccagttcgggcatcggctcgtcctgcttgaacttgccgttcgatgtggccagcgcggccttgatcggcgcgttgtacaggtcgaggcccttgcgcatcagggcgtaaaccgtcttgttgccgcccataccgaggttcttctcgttccagtcggtgatgtaggggcgggtggtcatgaattccatgatgccgggcaccacggcctcgcaatcctgggattcgatgacgtcgaccacatggttgttcgcgtccggctggtacttgacaagaatctcgccaaccacgccgacacgcaccttgcgcgggatgtcgcgcagcggcagattgtcgaaggacttcacgatctccttggccagcacgttatacggcagatagcccttcttgatgctcggcgtcttggctgcggtcttggaatagccgtgatgctcgatggtctcacgcacgatggtgtcccacagctcgtacagcttgttggcc

SEQ ID NO: 337 - DNA, 15947 bp, Unknown
  R42_10m  MAG No. k141_10408
acggcacggcagttttctcggccatcgtgccggggtatttctcggagaggatcgtacggcgctcgcccggggccacgcccgccccatcggtgccgacgaacgtgtacagcaccacttcgctgccggccttgagcccatgctcgccggggatgtcctcgtccagaatgcccacggcatcggtgccaaggatcatcggcgtctgttcggcggcgagacccacaccctgtagcgaccagacgtcgtgatggtttacggtcaccgcgcgcaccgaaacggtcgaccagaacgggcgggcctggggttcgggctgctcgcccaccgccaacgcggcaagcggatcgtcatggttgacggtggatgcgtatacggccttcattgcgcgctccttggtatcaaaaggaattaccgcattcattgtcccacatcgcgcagcgaacgaatcacccatttacggagatgttgggggcattgattcgtcatgtggacctcggacaatgccgggcgttagcattcaacttcggaaagactagcgaagggagattcgagggtatgcgcaacgcgtcaggaaacggatttgattcaagcgattccttcgccgtctccggtgccgccgagggggccgcgcgccttcacgacatccccccgagcattaccccttcccatggcgacgactcccatctgctgagccgcattgccagcccggccgatgtcaaggcccttgctcccaacgagctcgccgaactgtgccgcgagattcgcgccacactgctggcatatggccaccaacacggcggtcatatcggctccaatctgggcatggtggaggccacggtggccctgcatcgcgtattcgactcgccgtgcgaccgtatcgtgttcgacgtgtcccaccaaagctacgtgcataagatgctcacgggccgcgccgacgcctatctggacccggaccgtttcggcgaggtgaccggcttcaccaaccccgacgaaagcgaacacgaccagttcgtgctcggccacaccggcacttcgatctccttggcctgcggcctggcgaaaacccgcgacatggaggggccgggcagcggcatcggcaatgtggtcgccgtgatcggggacggttcgctcagttctggcgtggcgttcgaggggctgaacaacgcggccgagcaaggcggcaacctcatcatcgtgttcaacgacaacgagatgtcgatcgccggcgatttcggtggcatgtacggtccgctcgcccgcctgcgcgcgtccggcggcaccgcccagccgaatctgttcaacgcgtttggcttggattatcggtatgtggcggccggcaacgatgtttccgctctggtcgcggctttcgaggaagtgcgcgatatcgaccatccggtggtggtccatatccacacgctgaagggcgcgggatacgacggcgccgattacgtggccggcgcaccctcggcctcggccggtaacgtccatgagctggatccggcagtctccgacaccggcgtgcaccccaccgataacgtgaaccacagcgagccgtggcattcggatcactgcaacctgtccgatcacgaaccgcatgaaggccagtgcgaggcctcgcattggcagaatccggatgccgcaatcggcaagccggacgatccgcgcaagcattacggcaaaatggcgatggccgcgctcgaaccgcgtttcgccaccgagccaggactcgtggtcatctcccccgccacgccgggctccaacggcatcacccatgagttccgagagcgcgcgggcgcacattatgtggacacgggcatcaccgaatcgcatgccgtggcgtacgctgccggcatcgcacgggcgggtggcacgccggtggtggccaccacggcgtccttcttccagcgcgcgtacgaccagttcttccaggagatgagcctgaaccgttcgcgagtcacggtacttgattttctgggcggcttgtccggttcggacaatacgcattccggcgcatatgacgtgacgatgttctccaatattccaggggttacgatgctggtgccgacttcggctcgcgactatctggctgatttggcgtgggctaccgcgccggccggttcggcggacgcccctgctggtccggcggtgattcgggtgccgggcgaggcgattctggcggcggaacgggatgcgacgctgctgccggtgacgggtgggcagattgctgaccgcccccagtcagcttcgctgccagcctccgccagctccgccagcgggggcatatctgccgcaacagtccgcgggaccgttagcgtaacggctcagcatgccggtgcgcgtcacatgctggattggcgggtcaatcagacgggctcgcaagtcgcgatcatcggactgggcaatgcgtatccgttggcggagcagacggccgccgcattgtctgacgattatggcatcacggcaacggttatcgacccgcgccagtgcacgtcgctggattcagacgtactggagtcgttgcgtgatggccaccagcaggtcatcacccttgaagacgggcagcttgaaggcggctggggcgagaaagtgaccgcatactatgcgaatcatcatgtctcggacggcagccgtaatcctcgtgtgctgaacttcggcgcagccaaggaatttaccgaccgcgtgtcgctgggcgaactgaacgaacgttatggactaacggtggagcaggtgacagaggcgatcactcgttgtttttgatggcgtctagggccgggattttaacggctttattggccgggccgaagccgaatagcaagccgatcagcgtggaaaacagcacggcgaacaggaacagccaccacggaatcaccgaataacgggtcacattctcgccaccaactatcgcctgccagagtatggtccagatagatgttccgccaccggtatggtcgccggagcccccgccggcaccgctgaccataccgccagacataccgccagacatgccgccgctcatgccgcccgcatacaacgcgccgacaacgttgatgcccagcgatatcagtccgctcagcacgcagccgatcaatccgccgaagaatccgatcgcgccggcctccgcaagaaacatgacgcgaatgtcacgaacgtagcagccaagcgccttcataatgccgatctcgcgcgtgcgctcggttacggacataaccattgtgttggcgatgccgatggccgcaaccaacagcgaaaccgcaccgataccgcccagaatcagctgaatcgcgcgcgactgttcttccaacgacttacgcatgtcttcataggaggaggtctcgtagcccaacgctttgatctgtgattcgacttcgggcacggacttgaggtcggcggccttgaccagcacttgatcataggcggtggcttttttggcggcggctggatcgactttggcggccagttccttcaacgcctgcaaatccatgaccagaccgtcggaggtggcatagcccttgttgtagtcgcccgccacaatgccggaagcccgcacatcgagggtgacgttttccgactgacccgcggcgctgccgcttgcgccgcccgcgccgcctgtgccgccgccaccgccgccgtacatgttcatgctgtactggtcgccctgataattggtgccggtggtcagactgatttgcgtggtgagcgggtcgaagaacggatcttcgtcctgatcttcctcgcactggccggtggcctggttaaacgtgcatgaggaatactgaccgccacgtgtgctggtgcgttgttcgccgttcttcagggtgtccatgaaaccataggcgaaccattcgccggcaagcacctggtcttttttgaccggtttctcgccaccgacgagcttgtagcccatctggtcgagctgggtcatgtcgatgcccatgatctgcacgtaatcatagatgtaacggccgcccgcgccggctctggccgtcacgttataagggaagttcatcatcggcgtcacgccggatacgccgctcatcgcgcggaaggattccacggccttgtcgtcgagcttggtatcgcccatcttggacgagccgccatcgtccatcggaccggcataaccgttggtgtacacggtgacgatggacagatcgcccatcgatttgaacatcttctcgttctgctcgttaatgccttggcccaaagagaccatgagcacaatcgagcagcagccgacgataacgcccagcacggtcagaatcgtacgggatttacgccgccataggttttgtctgcagagccgcagtatgtcgccgaatcgcatggtcgggcctttcaggccttgtgggatgagccggctggtgcgactgatgaggctggggtgactggtgtgataggagcggtgtctgccgcagcaccatccgtcacgccggtatcggtcttatcatccttgccttcggaccaatcatcccagtcctcatcaatatcgttcttcttggccttctgcttgcgccggcgacgcaccagcagcacaatcaccacgataatgaccacggcgatcacgacgatgaccacatacaccagcaccggcaatccctgattggcgttctggtccatgttcggatcggccatgccggaatcatccatcggctgcatatcggttacgggtatggtgagcgggaattccttggtcttggtctgtccgtcggaatcctcgtacgtgactttgagcgtggtcttcagctcgcctgacgcgtgcggtgtgaaggcgtaaccaatcgtgccggtggcgccggaagccacattgcccacgtactgggttttcatcgtggcatcgaaaccttcgccctccatcgtggcctcgacgttggcgatatcgcctttgcccttgttcacatattccatcgtgaccgtgttttcctggccggcgatcacctggtcgggcactacgggatcactgatttcgaaccggtcaggctgactgatcggcacggaaatcttgacgtcggactggcttgaggagcgggcgctggcgtccacatactcgtatcggaagttcacggtcacggactgggcaccgcttttcgcggaggcgagcgcctgcatcggcacgctttgcgtcatggcgtaaccggcccacagcgcgtcgacgtagaacgtgttcgtgcctcccgcgatggcgaagctctcgccgccgtccacggtgacgaccatgttcgtcaccgccacctgccccttgttctggaaggtgaagtcgagattgaatttggatccggcggccacggaatcacctccatacgcgaagttggtgatgatgatgttgggcaccggtccggcgatcggcgcggaatcgccgtcgcttccctgagacgtactgttcgtgccgcttgtgccgtctgtgccgtcgaccgcgtacgcctgatgcggaagggagatgacggcaagtgccagtgacagcgtggagagcaacgcgacgatgatggcgatggtgtggtgggagaggtgcttcatcggtcagttccttgggttctatgggcggacggcgtggacggtgtagttggtgtggttggggcggacggcgtggacggaacagttgggcgggaaaggtcggtgttgagccgatcgctggtgatgcggccatcgagcaaggtgacaatgcggtcggcgtatgaggccatctgcggatcgtgtgtgaccagcacgatggtctggttgaagtcatgggcgaatgcgcagatcatcgtcatgacctcggttttggttttggagtcaaggttgccggtcggctcatcggcgaacaccacctcgggcttggtcacaaacgcccgggcgatgccgacgcgctgctgttggccgcccgacatctggcgcgggtaatggctgagacgatggccgagcccgactcgtttgagtacgccacgcgccgcgcgctcgcgttgctccttgggcactccgcggaacatcaacggcatcgccacgttttccagcgcggtcagattgggcaacaggttgtacgactggaatacgaagccgagatgcttctggcggaaggccgccagctcacgctcgtcgagcctgctgacgggtacgccgccgattctcacgccgccgcgcgtcggtttttccatgccggccaactggttgagcagcgtggatttgccggagccggattcgccgaaaatgcagcagatctggccttgcgggatactgagattgacacggtcaagcgccaccaccgtctcatcctcgacggggtattccttgcgtaggtttcttacctcgatgattgctcgcggcacgggcccttcttccttcgttcgtcgccattggcggacgcgcgatagctggttattatccagcacatctcaagtcagtgtataaccgttatgcaggagccgcaccccttaagggtgttcccggatggcagtgataagcatataaccgctgatctcaaggtcgacagttcaggctccagacggacccagaccggcataatactcaaaagcccctggcccccacagacgatgagggaccaagggtttattgcatcgtgaccccggacgggctcgaaccgtcgaccttgagattagaagtcacatgctctatccagctgagctacggggccaaactcgtgtaagtctagccgtaggggtgtaaaacacctcggcgtaacgtcggcttgcaccggtaccatcggcgatatggggacaacggagagcaacgtagatcacgccgcatcgggccagaccgtcgcaggcgatagtggtgagctcactttcacatacgcacagggtcgttttgccagtgaaggccgggattgggaaagcccggttgtgaccaacatggctgcatccgtctctgccgatgccggcaatgccctcgccggcagcatcatcaacaccggcgccaacaacactttgaccagcaccaccgaatcgtcgcttgccaccctgctgtccgaccaatgcccgttcgttatcaaggccaccattttcgagggcaatggcaaaaacgccattcgcgaacgtcacacattcaccggctcggtgctgcgccagctcgaccaagccagcgccctgctgaacggcatcaacgaatccggccaacacccggccatagccctgcgcgaagcattggtcaacgcactggaacatcgcgattacacgtactccggccccacactgatcaatatcttcgattcccgcctggaaatcgtctcgctcggcggcctgaccgatggtttggaaatcaacgatctgctcaacggcgtatgccagccacgcaccccgcgtttggctgaattgttcgccgatctgggcctctgcgagaactgcggtaccggtattcaacgcattatggacgcctacgcgcagagcgcggtcagtccgcaactgcgcgtaggccccacttcggtggcgatggtgctgcccatcccggtctcggccgaggccgcatccttgcatcggaccgataccgatgcttccgccgcgcccagcaccactgacgaagcgcagcgcgccaaaatgtattcattccccacgattcagcgcatgacggataacgccgcagatgctttggccggcgcacgcatcatcggctgcgcgccattgcagacgctgattctcggcagtggattcggcgagcgcccggacggtgacgaccaggtcagtacccgcccgctcgatacagcgacgctggaaccgtcgcctcaaacgttggagcagttcacgctcaatttcctcgcgttccgcggcgtgaagctcagccgtaaaaccatgcagaaagcgcttggcctgaacaaggatcagatgacgcagctcttggaccagctggagttgagcggcaagatcgaacgtcatacgcacgccaagtccactacgtattcgctggcacatgcctcaggacggtaacgaccagagcggcaacaaagcggcaacgaccagagcaatacagcccaaggcacgataaagcagcagctcagttctcgaatacgcgatcgcgaatcatgcgaccggattcgtcgagcgcggtggagaaacggccgtagtcggacagaatcacgcccatgtacagcatgtccacgagcgcggtatcggccacgcgcgagaaaatcgcattgccatagatcgtgtgcgagtcacgacccgtcagcaacgtcacgtcggcccagctggccagcggcgcgccgatggcattggttatggcgatggttttcgcgccatgcgatttcgccaatcgcaacgctttgaccgtatccgccgaactgcccgaatgggagaaggcgacggccacagcgccgtggggcaggtgcccggcaccgatctgctgcaggtaagcgtcggtattgagacggcatgtcagtcccagatagccgagcttggtgaacagatccatcgccggtgtcaacgagttctccacgccgaaaatatcgatgaactccgattcggcgagtagggcgaccgccttgcgataggccttggggtccaacgcactgtgcagctcatcgatcagcgccttcgcgccataggccgctttgccgggaatctcatcttcgccatcccacggattcagatcgaatccagccaacggattgaaggtcactttgtgctcggcggccggatggcgcaacacgtaccgcagttcacggtaaccgccgaaaccgagcttgcgggcgaaacgaatcaccgtcggctggctgacgtgggcgatgtcggccatctggccgacggtcaggtcggccgcctcctcgatatgatcccgaatatactgggccacggcgcgctccgccggacgcagcgacggatacacgtggtcgatgcgctcgcgtattcccaccgaggattgcacagccgcgctcctagtcgtccgtattttccattcctgtttcgagggtaccggctgtataccggcgaacagtcgacttggattgaccgcaacatgaacggtgagcgaactcttccgtttacctttccgctccattccctctacaatcaaaaccatggtgcggattagcgtgggaagccccacccatcacacaagcgggcggctgtacggcgtgttcttcgaggacatcaaccatggtgcggatggcgggctgaacgccaacatggtgaacaactacagttttgacggcgtctatctcgaccatcacacgtggcgtatggccggcgccgaacgatggtgtacacaggccgattccctgcgtttctgggatttcatcaactgttccgccgccagcctcggcagtgagatacgcgggattcacggccagcgggtgaccaccgactgccccgccccgccaattcacgcacatagccgatacgctcgcatcacgtccgatgttccttccgaaaccggccctgcatatctggaaaacctcggctataacggaggcggcgacaacgggggcgagcccgcgttctccatcgccgccgaccacacctattccgtcagtctcgcggtacgtccggttcatgggcgggccaagctgtccgtcggcgtggtcgataggtacggtctgccgctcaccagcaccactcgattgtcgtatatcgtggacgcagatccgcttgacgatacggaagagaccggtctgaggcaggacgatggtgccaatgcgcaggattccggcgtttcgatcagtccggattcgtcggatggtgccatcgccatcggccgtgacggctggtaccggttcaacgccgacgtaaccggcctgaacaccgattacggcaagctgcgtatcaccattgacgccggcgaacgcaccacgttcgatctggatctggtgcagttcatggatgcggactattggggcgcgggcgacccgaaatggcgttacggcaagctgcgccgcgatctggtggaaaccattcaggcgttgcatccagcgtttctgcgattccccggcggctgcatcgtcgaaggtgtgacgcccggcaatgaatatcgctggaaggataccgtcggctccctggccgcgcgacgccaacagtattcgatgtggtcgttcaagatgccggatggttccagctattcgcagagctatcagatcggcttctacgagtatttctgcctgtgcgaggacctcaaggccaagccgctgcccactctgttcgccggcatcgcatgccagtcgcccggccgcgatccgcgccacatggatatcaattcggccactttccgcaacaatgtgattcaggattacctggacctcatcgaattcgcgaatggcgatccggagtccagctcgtgggccgcggtccggcgtgatatgggccatccagaaccgttcggcctggacatgatcggcgtgggcaacgaaaacttcggggctgactacgtggccaagtttgacatgatcagcgaggccattcacgaacgatacccggatatgctgtgtgtgatgagcgccggactgttccccttccagccgacgatgaaacgcagctgggaccatgcgcgagcgttggccgcaaccgattccggggcacatgattccgccaccggtgacgcgattatcgtcgacgaacattcttaccactcccccgaatggtttgcataccaagcgtcacgattcgacgcttacccgcgttgcggcgccggcgtctatttcggcgaatattcagccaacggctattttgccggccaaccgcagaccgaacagggcgcgaacacgtggaagtcggcactcggcgaggccgcgttcctgaccggttgcgagcgcaattccgacgtggtgcgcatgatctcctatgcaccgctgctcgcgcatatcccggctaaggggtgggcgcagaatcttatcgaactcaatccggcgcatgtgaaccccacggtgaattatgaggtggagcggctgttttccacgtatctgggcgacacgacatatgccgtgtccatcgagcagaccgcgtcacgccccgccaaacatctgtatgtcagtgccaccgggcatgacggggatgacgcctgccgttacatcaaaatcgtcaatacctccgattccccggtggatgtgacgttggaaatcgcgcgcggactggccgggctgggcgcctcgccatcgcgaccggtgcgtttggaggtgacgacgttaagcgccagtccgacggcgaaaaccactatcggataccgcggcgaggcttcgggggcgattgtgccggaacgtcgggcttacacattgccgtcgccgtcttcattgctggcgatgaagatcaagccgtacagcgtcacgctggtggcttcgcgctgattgacatcggccattaggccgattcctttgccgttagaatcaccctcaaggatgagggggaatcgtgcagattcagggaataataggggctatcccccatagcgaatacaagcacgggagggcaggatggaaaccacggcggccagaagaccgccggccaacgatgaaggagtatgcggtatgtttatcaatctgttccgcaggcagcgccctgcgctcgcccggctggcccgcaactccaacgcctatcgtcagccgatggttgcggccgtatcatcgtccgcagtcggagtatccagcatcacctctgcatccaccacagccaacacagacggcgtatccggcgtatccacgctggatgccaccatcggccgcattcatgacatcccgcagtcggccatgagccgactgaccggctcccccaccgtatacgcgcggtagaccaccccagtcggcttcgccgacagcccccgtcagcggggtggagatggctgggctcagagactcggctcgatgatccagctcaaggtcagcaatacggccaaaaacagaacgttgacggcggagtagacggccagataccggcctttcttgtgcgggtattggcgcacgacgttcttgtaagaaataagcgaggccatcgaggcgatgagcgtacccatgccgcccaaattggtgccaatgatcagatcgcgccattggtcgcagaagccggaaagcagaatcgtggtgggcacattgctgatgacctggctggagccgaccgccacctccagcggatggccgccgaccagcgagcgcgccagttcgtagaattcgggcacgcgcttcatgttgccgatgaagatgaagaacatgcagaaggtgagcggcagtccccaatccacgtatttgaatacgcgccgatcggtgaacaggaacacgacgaccacgatcacgcacatcacccacaggggaatcacgtcggagacggccagtaggcagacgatgaacagcagcgagtagacgatggtgcgccagccgccataaccggcgccgtagccggtgatacgaatctcgtcgggctggtgtttgttgcgctcgggagccagcacgccggtttcgaggtcgcccaggtcgccgaccggtttgccgccaaacaccacggaaatcacgatgaccagcaacacggccgccgtgccggaatacggtgccatgatgccgaggaattccatggtcggcatgccggtcagggctttgagatacaggttgtgcgcgttgccgatcggggtgagcatactgcccacgttcgcgccaatggtcatcagcgtgaccacgaggatggtcttatcctcttgcccagccatgatgagcacggccaccgcgaacggcacaaacgtgaccagcgcaacgtcattggtgatgaacatcgcggaaaagaacgtcaaagcgacaagcgtaatgaccagtccgcgcatggtgctgaccttctccagcaatcgcgaaccgatgatgcggaacacgccgatacgctggaatccgcacaccacaatcatcaggcagatgagctggctgatggtgctggcgtgaatgtagcttttgtaatcggcgtccggcggcacaatgaaacacgaaatcagggcgagtattgcggcgacgatgagaatcgtctcatttttggctacattgatcagccagcgtcgcatccattcctccgtgaataacccaatatcgcagccgttctattctacgcgcagaccggcataaggtacgtagtcgcgttgcgctggcggacatgagtttttggaccggtgccgcgcaatgctgtgcccgtatatacggctgcatcattgtgtggcaggccagacacgaataccgtacgtgactggctcaaaccaatggaacatagtttcattcgaggaagaggagcgatgaagttgcgtattaccccagtattcccggtcaaacgtttcgccgccgtgtctgcacagaacgtgaagaacgtgcagttcgattacacgaacatgcccacgtacaacacgatcaccaagtagcgcgcactgccgcactgatcggcggcacttgccgcatacatgaatggccggtgtgctgcggattccttaccaagaatccgcagtacaccggccattatgatatatgccgcaatacaggggggcaatcagccctgcaccttaccgccttgcgcgctacggtatccgaagttcatcatctcgctgttgtaggcgaccacgccacggccgaccgccggcagaacgatcatgccaccatcgccatgatgcgcggcgacttcgtccaaagtggccgtcgcggcatcctcgacgttctcgccggcgaaacgcacacgatccgacacctgatgggcggcgaccaccttgatgaatgcctcgccgatgccggtgcaggacaccgccaccgtggactggttggcgaacgtgccgcaaccaggcagcggcgaatcacccacacgaccgtgcatctggttggtgatgccgccagtggacgtgccggcggcgatattgccctcggcatcgcgcgccacggcaccgatggtgccatgcttctcccactcatcgccaccggactgagcctcggccaaggactgacgacgctgttcggtgatgaagtactcgttgctttcggtcgcgacgccccaatcggcgatctcggcatcggtcgggtccgcgaacagcacatgcttggtctgctctttgacggcacgcgccgcatcgatcgggttcttcacggtgcttacgccggtgaccgcaccgacctcgccatcgccggtcatcaggcaggcgtccatctgggcgatgccatcgctggtcagggcggcaccacggccggcgttgaattcgggagcgtcttccatgacgtggatggcggcgaccacagcctcatgcgccggtgctccggattccaacaactggtatccggcatcgagggcgcgctgcagatcaagttcgacctgggcgatgcgttcaggcgtgctgcgcttgccacgactgcccgctccggcgtgaatgataagcgtgatgccggtttcgctgcccgccagttcagtggtcaccggagaaacggaggatgtggtcatatcgtgtccctttctggagtcagatggatgtgctgacgccaacgtatcgttgcttccgcatgtatgatagccgttgatggccgcgaccggttccgcatttcgcatcatcggctcgcgatggcgtgactcgttactgcgccacctcgccactacgccaggggcaatgcgatgccggctcgatcggccaggtcacgcaacgaccacgtggtctgccccgttcgcccgacaacgctatgcgcatgccacagcgaactgatgatggcttcctcgcttattcattcgtcgaatgcacccatcgatgtgggtatgcagccatcaaaaaactcgacaaccgcaatgagccagtcacttggctacatctgtgctatcgtctcgccaatgattcgaatgccggtatcaatgtcagcagcatccgggcgcacaaagttgagacgaatatgggaatcatccatttcgtcaacgtcgaacacgctgcccggcatgaacgtaacgccttgggaacggcaggattccaatacatccagagagcgcacgccgtccggtaaggaaacccaaatatagtagccgcctgcaggcacggtccaatacacttcatccggcgcataccgctccaatgctgcgattgctgcatctcgtcgaatgcggtaagtcttgatcaaaccgcgcaaatgttcggcgatgcggccttctttaagcagttccaggcagatgcgctgcgatgacgtgctcgtatgctggtcgaccatgcgccgcagagccgccagccggttaatcacatgcgggtcggccacaacccatcccgtgcgcaggcccgaagtgacggttttcgagaacgtcgacaaatacatcacgtatcccgcattctccatgcccttaagcggtatggggcgatgtgcgtcggacgattccccgccgtaccacaaatcgccgtaagcatcgtcttccacgatcagacactgatagcgccgcgccacgtcgatgagttcgctgcgtcgttcgggcggcagcgtggtaccggtggggttttggaatgtcgggacggtgtagatgagcttgggccggaatcgcgcgcaatagccgtccaacaggtctgtacgcataccgtgctcgtccactggaacgccgatgatgcgcgcatccgccgagcggaaggtctgcaatgccgggaagaacgtggattgttcgaccagcacgcagtcgccaggattgacgaatgcacgcacgataagatcgatgccttgctcggaaccggaaagcaccatcacgtttcgtacatcgcactgcacgccgcgtgtgctcatatgctcggcaagtaatgcgcggagttcatcgaatccttcgataggcgattctggctgaccgtcgaattcgcgcgactcaaacgcttcaatgctcactgaacgcaacaaatcgtcgggaatatccgccggattaggcgagccggtggcaaagtcgatgatggtatcgccgcgttgcgcccgctcggccgaggcaatgtcgtggtaggtgaatcggttggaatagtcggagaacaacaccgaccacggcggccgcacaacgctcggtttcggctcctcgtcaatcggcttatgtctcgctacaggaatc

SEQ ID NO: 338 - DNA, 4685 bp, Unknown
  R42_10m  MAG No. k141_10449
cgaaagaatactgaccattggtcacgcggttcgggtacggtgccagcacccagccgttgcagcaggggatgaccttgttcgggtcgaaggggacgatgaggtcttcgccgcgccacttcagctcgcgcaggctggcacccagttcggtgacgacggcactccattcgccggacgagatgacatattggttaccagtgcgaggcttcaaagccatagtgcacactcctttgtgaaacagattgttaccgctcacaatcgtatcgcataagtcccaagacgcggcggcacataaggataaaaaattggctcccctctggaggggagccagcgtaacggaactacttctggactacttcgtagcggaccacagtggtgtagtcgccattgggggcgagcgtcaccaagtggtcaccagtgcggaaggcattggccggggcggtcatcggttcgacggcgataccatacggatgctcggcgaacggcgcgccagtggcggtgtagcactgccaagcattgatcgtctcatcgccaatgagcttcacttcaataccgtccgggcgggtgaatgtggtggtggtcgtaccatcggcggcacgctccacgtcgacccaggcatcatcaaaggcgcggccttcgagcgtcgggccatcgttcaggtcgtagatgccggtaaccggttcggtgccggtgggaatcagcgcctcgttcaccgtcacatgactggcggccttgatctgcaggtggcaggcggcggagtcggcgtcacgctcggcggaagtcgcgccctgcttgccgttggccagccacggatgcaggccgagagcccacggtgccggctcgtcgccatcattgcgggcattgacggtcacggtcatgccgttgtcgccgagttcgtaggtgacggtcacggtcacatcgaacgggtatccgtccaggttggggaagcgcagtgaaagcgtcacggcgctatcggtcaacgattcaagcttccacatgtagtggtaggcgtatccgtggttcgcgttgttgcgcggtgcgggatgatattcgttgaccggcgcgcagtaatgcttgccattgaaatcgtattcgccgttttcgatgcggtttggccacggggccagcacataaccgttacaggtgggggtcaggtcgttgactccgaacgggcagaaaatttccttgccttgataatcgaatcggcgaatcttggcgccgagttcgcagatgacggcggaataatcgccatagtgaatcgaatactgatttccggtgcgtggtgttttactcgtcatggaatcactcccgtagtgaggttggtgggccggtagctcctgctatcgctggccccagtctagcgcgtctcctctatcgaggcggggattggcgatagccggcatataataaacaattcgtacagacacggtagcaatacgtggagtgacgagtctcacaccatcatgcgagaagcacgtggattccttggaaaccggtgattcgtgggagacgcggaaaagttgtgacggcagattcctgtaatccctgccttacactggaaaacactattgacgttcaggaggttccgatgaccaaaagcgttgtgctcgctgatccgcgaggcttctgcgcgggtgtggaccgtgcgattcttaccgtacagaccattctcaaagccgcggaggcttccggaaagcggacgcgcgaggatgggctgcccccggtatatgtgcgccggcagatcgtgcacaacaagcatgtggtcgaggacttggccgggcaaggcgcggtgttcgtccaggaattggcggagattccggatgctgctgcccaagcgggtattccggtggtgttttccgcccatggcgtatctccggtagtgaaggcggaagccgaacgtcgtggcatgcatgtggtggatgccacctgccctctggtgggtaaggtgcaccgtgaggtgctgcgtttcgtgcgcgaggggtatgaaatcgtctatatcgggcacaagggccacgatgaagcagtcggcgtggtgggggagaaccccgaacatgtgcacttgatcgagcatgaatcggatgtcgattcgttggattttgcgcccgacaccaagctggtgctgctctcgcagaccacgttgagcgtggatgagaccgccggcaccattgccgcgctgaaggccaagttcccgtggattcaagagccgccgagttcggatatctgctatgccacatcgaatcgtcaggctgcggtcaaactggtggcccagcagtccgattgcgtggtgattgtcggatcggccaactcctcgaattccgtgcgactgatggaggtggcgcaggagggcttggggaagcgcggcaaagcgtatcgcgtggatgatgccagcgagcttgatccggcgtggttcgtcggactggagtccgtgggggtctcctcaggtgcctccgtgccggacgaactggtgtccggtgtgattgacgctctgcaaaacttgggtttcaccggtatgaagtccgtcgaaaccatcaaggaaaacatgcacttcgtgctgccgtcggagttgcgcaggaagaagtagtcatccttggctcccctcaccgagggaagccaagaacggtcaccacgtgccgattggtgcggcaacggcgttcaagaccttgagcaggtcctgcgggttcacgcctacggacagtccgcgtttgccgccggagaccagaatctggtcgaattgcagggcgctttcatccaacacagtcttatgacgtgtcttctggcccaacggcgagatgccacctaccacatagccggattcacgcattgccaccttgggatcggccatagaggccttcttggcacctacagccgcagccagggccttcaaatccatatgtccgctgaccggtaccacgcccaccacacgctccgaaccggtgtccgccatcaacgtcttgaacacctgatgctcgtcgaagccgagcttggtggccgcctccacgccgtagccgtcatccatatggtcgttggagtgctcgtattcgtatacgtggaattccacgcccgccttctccagttggactgtcgccggggtggaacccgcgcccttatcatgcttgcttttctttgccatgattaccgttctactacgaagagacccccgcacaaggcgggggtctcacagcttagttctcaaacgaaccgtagcggcctagaccgcagtggttcactcggagatctcagcgaagtacagcagggtacggatcatgttggaggtgaagccgtactcgttgtcgtagaaggacacggtgcgagccagggtcacgccgtcaatggtgttgacgtcggtctgggtcgggtcgaacacgccaccgtgggtgtcgccgaggatgtcggaggagacgatgccctcatcgttgtagccgtagtaatcggtgtcggagaaggcagccttgaaggcttcgttgatctcgtcggcggtggtctcggtgttcagaacggtggtcagctcggtgacggagccgtccggaacctggacgcgctgggcatggccctgcagcttgccgttcacggacggaacgaccttgccgatggccttggcagcgccggtggagtgggcgatggtgttgatggcggcggcgcgcaggttgcggccggtcttggtgccacgcgggccatcgagcagcatctgggtgccggtgtaggcgtggatggtggtcatgaagccggccttgatgccgaacttctcgtccagcagcttgaccatggcggccatggagttggtggtgcaggaaccggcggagacgatcacgtcggaagccttgaggatgtcgtggttcacgccgaacacaacggtcggggtggtgtcatccttggccggggcggagatcaggaccttcttggcgccagcgttgatgtgagcctgggacttctcggcggaggtgtagaagccggtgcactcgagcacgtactcgacaccgtcgttcttgacccacggaatgttgttggcgtccttctcggcgtagaccttgtattccttgccgtcgacgatgatggagtcttcggtggccttgacgtcaaccggagtgccatcgtcatgacggaaggtgccgtgggtgctgtcgtacttcagcaggtaagccagggtagccggggtggtcagatcgttgatggcggcaacttcaatgtcaccagcctggccgccgcgagcctgcagctcgaagatgcgacggaaggcgagacgaccaatgcgaccgaagccgttgataccaatcttaactgtcatgtaattctcccttgtagggtggccttggcgcgctttggcacaccgggccattgtttaccaacagttgctactgtaatgccgactctgtacacatggcaacgtttcagcgtgcgttttgggtaaaaatgccgtattttttgtgagcgctcacaatttggattgcccgcaaccgacatgtgattttcctctcctttggaggaatgtctcgaatcatcacgagcaagcgcgcggcatgcaagtcagcgaaccagcagcttggacacttcggtgtccagctcgccgatatcgccgccgaattcatggaatctgctcacctgtggcaacgccacttcgatggggaaggtgacgatcagtgtgccgcgtttcacgctgatggccgcgtccacgccgtcgcggaactcgttgc

SEQ ID NO: 339 - DNA, 34928 bp, Unknown
  R42_10m  MAG No. k141_10785
aactggcaatcattgactataaagaagtagtacaaacacgctcttgagttctcaaaccaccaccacaccagcaagacaggaaaccaaccagaagaaggaacccgccgcgctgagcggcaacaggtgaataacttacacgcatgtttggattcgcgcaaatcaaggcgcgcaaaagcctcaggaatcgttgcaatcacacggttccttcggcgtgtcgcaaacagcctatttgcgctgttctgataccagaataatccgttttgcattgccgatgcgtaacaaattcatgcgttcaccggcgtgttgcaagaattcgattgcgtgaccatccaggttcaccttctcgcaaccggtcatcgcatatgcaaaaagggacttccctttacgggaagtccctttcagtagctattgaagctcgctagcctcaggccaaggtgttcgggtcaaccggaacgcccgggttcatcgtggaggtgatggtcgccttggtcaggtaacggcccttcacggtggacggcttcagacgcttgacttcgtcggccacagccttgaagttctcgtccagagcggactcatcgaagctcatcttaccgatgaggaagctcaggttgccgttcttgtcgacacggaactcgatcttgccgcccttgatgtccttgacagccttggtgacatccatggtcacggtgccggtcttggggttcggcatcaggccacgcggaccgagcacacggcccagacggccgaccttgcccatcatgtccggagtagcaaccacggcgtcgaagtcgaggaagccgccctgaacctttgcgatcaggtcgtcatcaccgacgatgtcggcgccagcctcggtggcctcggtggccttcgggccacgggcgaacacgaggaccttggcggtcttaccagtgccgtgaggcaggttgacggtaccgcgcacgagctggtcggccttacgcgggtcgacgctcagacggaacacggcctcgacggtctggtcgaagttgtaggcaggcatgctcttgagcagagcgatggcctcgttggcggtgtagaggttgttgcgatcgacgcgctcagcggcttcgcggtacttcttggaacgctttaccatctgtccttctccttatcagtccgtaaccgtgatgcccatcgagcgagcggtgccctcgatgatcttcatgccggcctcgatatcgcgagcagacagatcttccatcttggtctcagcgatttcgcgaacctgcgccttggtgacagagccgaccttgtgggtcagcgggttctcggtacccttctcaatgccagcagccttcttcagcagagctgcagccggcggggtcttgagaacgaaggtgaaggaacgatcttcgtaaacggtgatctcgacagggatgacctgacccatcttgtcctgcgtctgggcattgtatgccttgcagaagtccatgatgttcacgccatgcgaacccagagccgggcccagcggcggggccgggttggccttgccagcctggatctggagcttgatcagcgccgagactttcttcttgggagccatattatggttcttctttctataacgcggttcgaatggtcgccgtcctcagatccgcttgcctgctatcacgctcggtcttgactcgttatttatccgtgcatgctgtaggcaatcggcctgtggtcggtctcctcccgcaacttatattgctgtgctgtgctagcgggtcttccctccagacacaagctttcccattatgcaaatccacccggacaacgcaaaaagcccgaccacgatggtcgggctctgcaaagtttggggttaatccagcttctgaacctggtggaagccaagctccaccggcgtatcacggccgaagatggacacgagcacggtgagcttctgagtggtgggctccacgtcggaaacaacggcggccatggtggcgaaaggcccatcggtgacggtgacctgatcgccaacggcgtaggagacttcgaccttgcgcttcttggcggcggcgggcttgtcgccagcggccttgagtgcctcggaagcgatcatcggagccatcattgccacgacttccttgcgggagagcggggctggatccttggtcgggccgacgaagccggtcacgccttcggtttcgcgaacgatacggcgagcgttctcatccggccacatacgaatcagcacatagccaggaacacgtacgcgggtgatgatcttcttacccttttcggtgtgcttctcgacttcttccatcggcacctcgacctggaagatctgatcttccatgccgaaggaggcgacgcgggactcgatgttggtcttcacgcgcttctcatagccagagtaggtgtgcagcacataccacttgccatcaagggaacgcagggacttggagaattcgtcaacggcctgctgaccggcatcggtttcctcggcctgctcggattcgttgacttcttcctcgtcctcatccagagaaacggtctcggtctgagtggaagcaacgggagcggattcagtcgcggccggagcggcggactcaacatctgcattgtcgacggatgcgtcagattctgcggaaaggtcagcaaccggttcagccggggcagctgcctcatcggcagcagcttcggaagcctcgacaacaggctcctcagccggcacggcgtcgagattctcgagattcagttcatcactcatgcgttgttattcaccttaggttgtgcggatcagccgaacacccacagcacgagcttgcccagaccgaagtccatgcccgtgacgagggccatcagcagcagcacgaagataaacacagccagagaccagaagaacagttccttggcagtaggggttacgaccttgcgaagctcgtcgatgatctgcttgataaacagaccgatacgcatgaagacattcggcttgactaccttttcgctgttgttcgtcttagccattctgtacctcgcgtcagctgcttgattattgaaaacttggcagggaaggcgggactcgaacccacaacctacggttttggagaccgttgcgctaccaattgcgccacttccctaggtgaaaatccacctcggcgtgcattccgtagagaacgcttcgccacggcgaaaccgccaagttgttatagtaacggctccggtggattatcgcaaatcgcgtgtcgcgcgcgtggcatgtgcgcggcacacgactcttctcagttagcccattccttgaatcgacgcatgccttcggctaggtcttcgtcggccagtgcgtaggagaaacgcaggtaaccgggagcaccgaaggcctcaccagggacggcggccacgtgggcctcatccaacagtgcggcggcaaaatcagcggacgtatcggacacagtgccgttgggccccagcggcttgccaagcaaagcggtgatgtccgcaaaagcgtagaacgcaccggtcggagtcgggcagttgacgccctcgatatcgttcagagcagccacgatcgcgcggcgacgtgcatcgaacgccttgcgcatctcatgcacctcgtccagcgggccagccacggcggccagagccgcacgctgggagatgttggccacattggaggtcatatgcccctgcagcttggtggcggccttggccacctcaagcggcgcgaccatccagcccacgcgccagccaggcatcgcataggtcttggccacgccgttcagcaccagcagctgcccgcggcattccggcacggcggcaccaatgtaggtggtgcgcgcgtcgtcgtagttcaggtgctcgtagatctcgtcggagataacccagatgtggtgctcgacggcccaacgaccgatcgcttccacggtttccggcttccagacggctccggtcgggttgttcggggagttgacgatgattgccttcgtacgctcggtacgggccgcttccagcgcctcaagcgagggctcgaagttcacgtcggcaccggcgaatacttcgaccggcacgccacccgccaatttgacggcttcaggatagctggtccagtacggagcggggatgatgacctcatcgccatcgttgagcaagatctggaaggattcatacacggcctgcttgccaccgttggtcaccacaacctggtcggcggacacctcgtagccggaatcgcgcagcaccttagccgcaatcgcttcgcgcagctcgggcaggcccggcgtaggcgtgtacttgtaattctttgggtcaaggcaggcatctgccgcagccttgaccacgtttgcgggggtcgggaaattcggttcacctgcgccgaagccgataacgtcaagtccggcggccttcatggccttggccttggaatcgacggcgagcgtagcgctcggtgccacagtgttgatacggtcggaaagagtctgccattgcgccatagtcatggcttccatgctaaacctacagcacgaaaaatcgccagagccgcactatggtgatgggatctgtcgtgtgacagatcccatcagtcacacaagtacaagattgtcgcgatgaaccagtgggtgggcgtactgggggccgaggaaacgcttgagttgggcggtgttacgcccgagcatctgcggaatttcttcggaatcgaagccggcgaggcctcgggccaggtgttcgccgctttcggcatcgatccagaccggatcgccggcggaaaaatcgccatgcacttcgagcgcgccggccgccagcagcgaggcacgcccgccgcgaatcgcctggccggcacccgcatcgaccacaatagtgccgcgcgggtcggcggcgaagccaatccacagacggcgtgatgaaccgcgggccttaaccggtgcgaacacggtgcccaccggatcgcccatcatcgcagggcccgcgttcgaggcgcaggtgagcaccgtggggatgccggagactgccgccacgcgcgcggcctcaagcttggtgaccatgccaccggtgccgaccttggagccggagccggaaacctggatgtcgccaagtgcatcgataacgttcggcacatattccacacggcgggagccgggctgcgagggcggtgcagtgtacagcgcgtccacgtcggtcagtagcaccaaggcttcggcccgcaccagattggctaccaatgcggacagacggtcgttatcgccgaatcgaatctcgttggacgccagcgaatcgttttcgttgataatggggaccacaccaaggtccagcaatcggtccagcgtgcgttccacattgcggtactgggtggcacgaatcgtatcttcggcagtgatcagaatctggccgacgcgaataccgaaacggccaaaagcagtctcgtagcgagccataagcaaaccttggccgaccgctgcggtggcctgctgagtagccacgtcggccgggcgttcgtcaaagcccagcgggccgaagccggccgcaatagcaccagaggaaaccagtactacacgcccgcccatcagtcgtatttgggcaagggcggcggccagagcgtcgagcttgcctggatcgaggtgaccgctcggctgcgtcagcgaactggaaccgaccttaacgacgatggttccagcggatgcgacggctcgccgcacctcggcctgactcggagtgctcatttattcctcggtttcaccatcttcgctggactcaccgtggccgaacagactggtttcgtcatggcgatcgtcgtcaacggtcgggtcggcccagtggccggccttgcgttcggccatcatcgcatcgcgcacggcggcacgggcgtccatcatctcgtgatattgggcacgacgttcggcgttggagcggcggtgcgtgcgcgggtcctgctcttcgagacgcagatccttgcctcgggcaccgaggttggagccgtcgagcatttcggcaccggcggagatggtcggatcccaatcgaattcgaccatacgggcaccacgaccgatgcgcacctcgtcaccagggtgggcacccttgcggcgcagctcgtcctccacgcccagcttggccaagcggtcggccaggtagcccacggcctcgtcgttgtcgaagttggtctgcatgacccagcgctccggcttgacgccacgcacctcgaagaacacttcgccattgccgagttcgcggcgctcgaccgtgaactcaagcgcactgccgccctcgtcagcgcgacgcggacggcggcccttggtctccaatggcttgataaccacgcgcgtctcctcttcggcctgctcgcggttggccacttcctcacgcatctcatgcaccagcgcagacaacgcgaagttgagctccttcagcccctcatgagaggcggtggagatctcaaagaccttcagcccgagtttctcgaactccggacgcacgaactcggccaattccttggcctcgggcacatcgatcttgttcagaatcacgatgcgcgggcgttcgggaatcgggatggcacccaatggcagttcgagcttgtcggcgtagagcgccaactcgttttccagcgcgtggtagtcggacatcgggtcgcggtccggttcaagcgtggcgcaatcaatcacgtgggcgatgatttcggtacgttcgatgtggcgcaggaactccagtcccaggcccttgccttcagaggcgccaggaatcaggcccggcacgtcggcgatggtgtatcgagagtcgccggcgatgacgacgccgagattcggcaccagcgtggtgaatgggtagtcggcgatcttcggcttggcggaactcatcgccgcaatcagggacgactttccggccgaggggaaaccgaccaacgccacgtcggcgatggacttcagttccagaatcacgtcgcgttcctcgccgagttcgccgagcagggcgaagccgggggcgcgtcgggtcttgttggccagggcgatgttgccgaggccgccggcaccgccctgggcgacaacgcagcggtcgccctcgtggcgcaagtcggcgagctgtgcgccgggatgcttggctttgccctgttcgccgcgcgcctcaaagacgacggtgccgcagggcacgggcagaatcaggtcctcgcccttggagccgtccttattgtcgcccaaacccatggtgccgctgccggcgacacgatgcggcatgaaacgatagtcgagcaggctggtggcgttacggtcggccacgaacaccacggaaccaccgtcgccgccattgccgccgttcggaccggccaacggcttgtatttctcacgacggatgccggccgaaccgttgcccccatcgccgcccttgacatggacggttactcgatccacaaaatcactcatattgattaccttacaaaaaagccgcgtccttacgggcgcggcttgaaaaagcttgacgctatatcgctcaggcgatgacgtcgacaaccttgcggtcgcgacgcacaccgaacttcacggagccatcggtgagggcgaacagcgtgtggtccttgcccatgccgacgttgtggcccgggtggaagttggtgccacgctggcgaacgatgatgttgccggccacgacggcttcgccgccgaacttcttcacgccgaggtattgcgggttagaatcgcgaccgttgcgagagctggacgcacccttcttatgtgccatgattcatggtcctttctataactcaggcaatcgccgtgatcttgacgatagtcagcttctggcgatgacccttacggcgagcaacaccagtcttgttcttgtacttctggatgtcaatcttcgggcccttggcttcatcgttcacaacctcagccttgacggacaccttggccagatcggcggcggcgagggtgaccttgtcaccatcgacaacgagggagaccgggaattccacggtatcgcccttcttggcgtcgagacggttcacgaggatgacgtcgccaacctcgaccttttcctgatggccaccggccttcacaatcgcgtacattatcgttccttttatgttttggaaagctaccttgcctaacacgcaccgagcctgcggtcagacaccgaatttcgaatctacaccaccatgcggactaaatcaaatgatttttgtccgcgtgtcaagcacgacacacctgttactcttccgccgtattgttggcggcgacggcagcggcggcaatctgagccagtttggctttgacgtcggcgctggaaccagccggttcgggagcgggagcggtgccgcgaccgtgcttgttggttttgacgaacgggtcgccaccgcgaagcgcgtagggatcgtcgtagtcggccgaaacggtcggctgatcatgcaggatgaaaccacggcccttgcaggtcgggcattcctcggagaacgcctcgaccagaccctggccgatgcgcttgcgggtcatctgcaccaaaccgagcgaggtgacttcggccacctgatgcttggtgcggtcgcgtgccaggcattcgaccaagcggcgcagcaccagatcgcggttggcgggcatgaccatatccacatagtcgatcatcaccatgccgccgatatcgcgcaggcgcagctggcgggcgatctcttcagacgcctccaagttgcagcgcgtcaccgtttcttccaaggacttgcccttgccgataaagcggccggtgttcacgtcgatggtggtcatggcctcggtgcgatcgatgacaatcgagccgccggacggcaggtagacctgacgttccatgcccttacgcagctgggagtcgatggaccatttgtcgaacacgtccttgccttcgtgctcggccgggtcccacttctccagcttgtccttcaggtcgggggccatggtgtcaaggtattcctcgatacggtcgtagaccttgtcaccttccacgatgagcttgctaaagtcgtcgttgaagatgtcgcgcaccacgcggatggccacgtcgggctcgccctgcaggagtttcgggcgcttgccgtgccagaattcctcgcgcttggcgttgatgcgctcccactggcggaccagtgattcgagatccttgacgatggcgtcttcggatgcgccttcggccgcggtgcggataatcacgcccatgtctttcggggcgatcttggagacgatgttcttcagacggctgcgttcgcgctccgaaagcttgcggctcacgccggtcatgccaccggagggcacgagcaccaggaagcggccggcaagcgtgacctgagaggtcaggcgggcacccttgtggccgatcgggtccttagtgacctgcacgagcaccgggtcgccggacttgaacgccagctcgatgcggcgcggctgaccttcgagacgagcggcatcccagttgacctcgccggcgtagagcacaccgttgcgggactggccgatatccacgaatgcggcctccatgctgggcagcacgttctgcacgcggccaagatagatgttgccgacggtctgtacttcctgaatgtcggagacgtaatgctcgaccagaacattgtcttccaccacggaaatctgggtgtggtgttccttctcgcgcaccaccatcaggcggtccacgttctcgcggcgtgcaaggaagtcctgttccataagctggctctggcggctgcgctcacggcggttgtcacggcggcgctgcttcttggcctcgagacgagtggagccttccacatcggtgatttcgtcgatgtactgctgcttgcgggagcggcggaccagcggctgttcgctgttctgactctggtcgtcggtgccctcgccgttcttgccgccacgacggcggcggcgacggcgagtgacggtctgctcctcatcgtcctcatcgcgatcacggtcatgatcatcgcgatcgtcacgacggcgggaacgcgtatcctcggcatcgttctcggcggtatcgtgctcgccgttggcaccggtttcgccgcgtgagccacgacggcggcgacggcgcgaacgggtgcgggtgacgtcggattcctcgtcgccctcctcctcggcaatcggcgagtaggcgatatcgtccagctcgaggtcttcctcaatctgctcgacttcggcggctgcacggcgctcctgggcgttcagacggcgggagcggcgcgaacggcgggagtccgaggtgtcgtcggcgtcgaaatcgtcgtgatcggcgttggtatcgccggacgcggcgtcacgggaagcgtcacggtcggcggaggcgcggccgcggtcgtcgcgatcgtcgcggcgacggctgcgcggctgggcatcgtcatcgtcgtggctgcgcgagcggcgggagcgacgagacgggcgttcgtcggcgtcaacatcgtcatcacgagtgtcagcggtatcgtgcgcatccacggcggcgggcagcaccggttcctggaacagcagggacgtcatcggcttgccacggcgcacggtctcgtggccagagggcagggattcgaccgcgtcgaacaggcgctcatccggggtgtcctcgtgcgtatccgcaactgcacggcgagaacgacggcgaaccgtacggtcttcgtcatcatcatccatatccataggcgcacggcggaggcgggagcgaaccgggcgatcctcgtagtcatcatcgtcggactggcgggagcgagagcggcggcgaaccgaacggtcctcgtcgtaatcgtcatcgtccacgactgaacggcggcgggaacgcggggcggcatcgtcatcgaaatcatcggcactgaccgtgcggcgcgaacggcgcggacgatcatcctcgctatccaagtcggccactgcggaagcggcgcggcgcggacggcgcggagtctcgtcgtcatcatcggtatcgctggaagatgcggcggacgtacgacgggtgcgacgcggcgtttcggcggcatcgtcggccgtggaaacgcggcgcgtacggcggcgggttggacgttcggcggaatccttggaatcgctggattcatcggaatcgccggaatcggatgacttggaatcggccgcggtgctggcattgggaagcgcgggggcttcgaacagcggggtgcgttcctgcacttgcagttccagggaggcgccggcagcaccggtgccgcggaccacgcggcggccgccacgacgacggcgaacaggttcgacgggctgggaggcggcggcaggcgcagcgttcacggctgcagccgaatcggcattggatacggttgaattatcggttccgtcgttgacgaaaccttcacggttgtcagtgggcacaatgctcctcgcggcgcgctgcatcacgacgcctatttccaggcctatacgcttgactcacaccacgctctcaccgtggccgcgcgaaaacgcgccgcgtaaaggcaacttcgtctcaagtctgtcctgcgggtggcggacaccggcgcttgcgttgtctcattctcgagagccgcaaggggatcgacgccatctcgcacgctgatggttatgcagaaccaccatcctttagtatgccacatattttgtgcgggtgtggcccggcgaggctgacgttctctcggctcccctccctgcggtgacagctcccctcagagaggggagctggagaggtgtcagaccagccagtcggtaagaattgcggtcatggcggccaggtcggattcgggcacctgctcgtcgtgcttgtgcgccagcagcgggtcgccggcaccgaggttgacggccgggatgccgagctgggagaagcgtgccacgtcggtccagccgagcttggccaacgggtcgcggccggtgcgctccttgaccagtcggaccagatcttgggcgagcggggcgttcaggcccgggcgcgcggaggggctttcgtccttcatttcgatgccgtagccctcgaacacgccgccagtggccacatgctcgccattgccgagttcggcaccggcatccgcgcccatcatcagagccttggcctcggccagtgatttgtccggggcgaagcggtagttgacgtgtacgcggcattcatccggaatgacgttcgtgcctttgccgccggaaatcagcgtggcgttgaggccctcgcgatagtcgagcccgtccacgttcacggtggccggctcgtaagcgttgagtcggctcaggatgtcggccgccttgtggatggcgttctcccccatccacgcgcgggcggagtgcgctgccacgccgtgggtcacgacgtcgaagcgaatcgtaccgttgcagccgccctcgatgccgctgttggtgggctcgccgatgatggcgaaatcgccggtgatccaatcgggatgggcctcgacgactttgcgaaggccgttcttttcggcgacgacttcctcatggtcgtagaagacgtaggtgaggtcgactttcggggtggtttccggcgtgcggccgtcgagcgtggcggcgaggtagagcatcaccgcgtcggaggccttcatatcggtggcaccgcggccccacagcacgcggtcttcgggatgagcgtgggcgatttcttcgcgaatcagcgaatcgccgggctccagccacttcggtgggaaattgtcgatgaccggcacagtatcgaggtgcccggccaagatcacacggttcggctcgccgaagtcggtgctggccaccactgtgtcgccgtgacggcggacggtcaggtgctcttgctcgttaaggaaggcctcgacctcgtcggtgagggggccctcgtggtcggacacggagaagttctccatgatctgggtgagcaggctgttcagctgctcggcagtggatgcggtgcggttcaattcaagcgtcatgtgaacagcgtaccgcgtgggcggcgggcccagcacacccactacatgagattttgcggccgaatacatttttatgtgccacactggggtggcgaaagggaggattatgtcaggtctaatcagcgccatgcaaggcttctgcgttatcggcatcgtgattgcggtgggatatgtcgccgcacgaatgcgaatcggcgggccgtccgctcagatggtgctcaaccggttctccttcttcgtatcgagcccgtgcctgatgttcgccatcctctccaaggaaccgatcttcgacatcttccatccctcgattatcgtggcgttcttctccgccgtgctggtaggcgtggtgttcctggtgctcaaccgcatgttcttccacctgaacgccccggacgccaccatcggcgccctgaattcgctgtacctcaattccaataacatcggcctgccaatcgccacctacattctgggcaatccggctctggtggcaccgattctggtcatgcagcaggccatcttcacaccggtgggcctgacagtgctggacgtgaccaccaagggcaaggtctccatcaaggaaatcgccaagcagccactgcatcaaccgctgcttatcggttcgctgctgggcattgtggtctctgcgatttccgctaaaagcggctggttcccagtgccgaaattcattttcgacccgatcgacatgatcggcgattcagcggtgccaatgatcctgatggcgttcggcatgtccctacacggcaccaagccgctgcagcagaagggcgatcgcccggccatcttcacggtcgcggtcctcaagaacatcatcatgccaatcatcgcgttcctgctcgcctatttcgtgatgggcttccgcggctccgagctgtacgcctgcgtggtactcgccgctctgcccaccggccagaacgtgtacaactacgcggcccgctacaacgtgggcctcaccttcgcgcgcgacggcattctgatgagcaccatgaccagcccggtgtttatcgcgatcatcgcggcgctgctgagctgagccggcaactgtaatcaccgtaaaaaaacttccgcgaaatccaccgtaggattccgcggaagcctgagatatacgctacttgagaatcgccttaatcgcctcatactgctgagcagtgagttgcaccgctggctcacggatcagggtggaaatgttcagtcccttggccttgaccgcacccttgatggcggagatgaacaggtcggtctgatcgtacagcgccatcaggtggctgatgcgttcggcggcctcaattgcggtgccatagtcgccggcctcatatgcacggtgcagcgtaacgaaggtctccggctccacattggtcatgccgcagatcacgccatcaccgccggagacgcggttgacgagatagtactcgtcgaaaccggagaacaccgcaaaccgtggattcacggccttgaccgcgcgaatcaccttgcgggtgtggctgattgtgtcgaccgtgtccttgatgccgacgatgttcgggtgcgcggcggcaagctcggccacgagctccggggtcaagtcgctgccggtgcgcggtgggaaattatagaggatcaccggaagattcgtcgcttcagcgaccgcgccgaagtacgccttcgcgcctcccgcagtagggccgaagtaatacggcgaaacgaccacgagcgcatccactccacttgcttcgactgcccgcgcgaagtcgatcacattgttcaagttggtatcgcccacgcccgcgaacaccttgatgcgcccggcgacatgcttggccacgaagtcgaccgcctgcttcttgacgtccagagggaaggcatagaactcgccgatgctgccaaacaccagcacgccgttgataccggcctcgatcagatgatcgagatgctgcccccagcgttcatagtcgatgtcaccgtcgtccttggtgatggtgatggatgggcagatgatgcctgagaattcggcgctgctcgtcatgattgttcctttcgttacggaataggggtgccgcacaagcggcaccgagtttgcggcctctcccccagtcgtcctgcggacgatagccccctcatcagagggggcttgggtttagtcgatgttgtaagcgcggcgggcgttgttttcgaagaagtcctcgtcctcgccgaacgtgtccagcatgagttggaagtgcgtggcaaaggtcgagttgagttccacgaccggccagttggagctgtacagcaccttcttcgggccgaatgtgtcccgcacgtatttcacgatgtccgggtccaccgggttgtcgccggaaaccttgatatacgaattcggcagttcggccaacgctgcgagcgcggcgcacgattcctcatcaagcccgggcacgttgccgagatgatcgatgatgaccgtcacttcgggaacctgcgagaacgccttggccatgtcgcccaactccgggccccggttgcacagctcgaatggcaatcccttggcggccatcgcgcgtagaccggcgatgaattcgggttcgagcgcacggccccgcggctcggaatccacatgcagcggttccctgatgccatcggcgttgatcgggacacgcatccaagggcttacccgtccttgcaacatgcgcttcaggatcagagggctggcattctcgtacaacaaccggtcctcgagctcatggtcggccgcgtcaacctccacgtatacgccgccgaggaaattcacgccaaatttggcgtactgtgcggctaggtcttcaatcgtgtacttgtgttgcagcgagggcaatcctgccagccatggcagatcctgcgcatccggatcccagatatggaagtgggaatcgattacgttgagtgtcatgtcaggcctccttcagaccgatcttggaaccccagaatgcgtaccatgccacgaacaggaagcccgggaccatcaccaggatggcgatctcgatgcctgccgcatcctgaatcacaccgagcagcagcggaatcaacgcggcgcccacaatgctcatcaccaaagccgaggaaccggtcttcgccgcggaacccttgatacctttcagcgtcagggagaatatggtcgggtatccgatggaaatgaacagatacgccaccatgaacgcgatgacggagaccttgcccaggccaaggaataccacgaacatcagcacggctgaaatggtcatgtatacgccaagaatcttcgagggatcgaatttggccatcaatggggtggtggcgaagcgtccgatggtgaacagcagggaaagcacggaaagcatcatcgccgcggtgccggctgtgatgcccgcgccccagtgcttgagcgcgtaggcggagaagaccgccatgccggccacttgcaggccgatgaaaatgaactcggcaagcacgcccaatgcgaagtgcgggcgcttgagcaggccgaagaaggagctgttctcggaggaggcgccgcccgcggcctcctcttcgtctcccggaggcgtgggcagcttgaacagcgcgaacacggcgagcaccacgaccagcacaacgccgatcacaatgtatatcgtgcgggtatcattcaggaactgcgccttagcggcgtcgaagccggactcgcctgatgcgacggtggtgccgagaatctggccaagaatcagcgggccaacgatgttgccgacgccgttgaaactctgcgccatgttgatacggaacgattcgcccttttcatcacccagcttggtgatatacggattgcagttggtctccagcgatgccgcgccgagcgcgataacgaacatggcgaacaggaacaggccgtagctggccatgttggtggcagggatcaccatgaacgcgcccagagcgaacaggaacagaccggagatgacgccgcccttataaccgaaacgcttggcgatcaagccggccggaatggccatgacgaagtatgcgccgtaataggccacctgcagtaatgacgcttcggcgctgctgagttctatgtagtttgcgaacggcgagttcaacgcgttcacgaggttcatggtcaaaccccagataaagaacagtgaggtcaccagtacaatggcgatggtcgccttggaaccggttgtgtttttggatgtcatcattgactccttagtgatacgagtttccccgatattgcctagcgagaagtggaccaccctgggccatgttggtaaacggatgacccagggcgcgggtgatacgggcggcatacgcggatacggcgtacggacggagcaatgatcaaagctccggaattgccgcgcgaatattcgggaaagggctgcttgtcagctcagcgcacggtcaaggtggacatagccgccatcgacgtacacccactgaccggtggtgtggctggagcggtcggagagcaggaatgccgcttcattaccgatctcttcggtggtggtcatacgatgttccagcggaatcttgtcggtgatcaccgacaggcgcgcctgctgggccgcttcatcgccaaaggtcttgatccaatcggcatagagcggggtccagcactcggagacgactatggcgttgacacgcacgctatcgtgcaccaatgcggcggcccattcacgggtcaggcccaggatcgcgcccttggcggccgcataggcgctggtcttgccttggccggtaagcgcggtcttggacgagatgttcacgatggatccgcggctttccttgagatacggcacggccgcgtggaccagctcgtaatagtgagtcaggttgccgtgaagcgattcctcgaactcacgccaagtagtggtctcgagatccttgttgtcgttctttccggcgttattcacaatgccatcgatatggccgtacttcttgtatgttgcttcgacgacgccggcgatcttgtcggtgtcgttgaggtcaagcaagtgcacatcataggtggtggtgtactgctcgatatccttcttgaactcgtcgagagcgctgtcgggtcgattaatcaccaccgggatggccccctcctgggccagttgcagcgtgatgcctttgccgatgcctttgaaaccgccggtgatgatgatgactttgccttcgagatgcagatccatgggaactccttcgtccatccttattctgcgtttcatgggtgttccatgtcacgcccggccggggcttcggcaccccagccggagtggttgtgtgttgttgtgttaagttgtgttgttcggttatgaatttccagttgcggtcagccgcgatacaggtacttctcggccgtctccagcgtcatttcggtaccgttgcccggagcggtcggagcgacgtagttgccgtccttgatctcggtcgggtggacgaaatgttcatgctggttatcgacgtattcgatcatgcggccgtccatcgtgccggacacggccacgtaatcgaacatcgcgaagtgacacacggcctcgcacagacccacgccgccggcgtgcgggcagacgggcttgttgaacttctttgccagcaggtattcgagcacgatctcctgcggaccggccactcgggtggcgtcaatctgcatgatgccgaaggcgttggcctgcaggtactgcttgtacaggatgcggctctgcatctgttcgccggtggcgaccttgatggggttaatggcgcgcgcaatcgtggcgtggccaatcacgtcatccgggctggtcggctcctcgacccacgccagatcgaagtcgtggaacttgttgatccagtcgatggcggtgggaacatcccacacctggttggcgtccacggcaagacgcacgtcggggccgatggcttcgcgggccttggccaggcgacgcagatcgtcgtcgatgttctggccgaccttgagcttgatctgcttgaatcccttgacctgggtctcctccttggcgagggccaccatcttctcatccgagtagccgagccaaccgggagcggttgaatagccggggtaaccgacctccagcagatgcttgatacgctcggccttgcccttctgaccctctttgagaatcgcaacggcttcctcagggcgcagggcgtcggtcatgtagcggaaatcgagcgtggagaccagctcctccggctccatctcgcccagcagcagccacaacggcttgcccgcacgcttggccttgatatcccacaacgcggagagcaccgcgccgatggccatatgctccacgcctttttcagggccaagccaacgcagctgggaatcatgcacgaacaggtcccatgcaatgcgcatgttgtcgagcagttcctcggtgttgcgcccaatcagcacctgcgacatcgattcgatggccttgcaaaccacgtcgttgccacggccgatggtgaacacgaatcccacacccgtgatgccgtcgtcggcgctggtggaaatctccacgtacgcagaggaataatccggatcggggttcattgcatccgagccggaaagcgtcgttgaagtggggaatcggaagtcatacgtcttgactttggtgatggtactcatgtgttcgggctccttcgcctggtgtgaaccaacggctatatcgtacgtccgaataaagaaatttgcaagcctatttgcgaaaatttttattcaaggccggacaaagggcaagaaaacacggaattgttacggcacaatgcgtcataatggtgggaacaacgacgaaatcgtctcagtaattgaacggcgaatatccaagagggaagcaccgatggttaacgatacatccacccacaagctcaaggtcggcgagctcgcaaaaatcgccggcgtatccgcatccactgtttccaaagtcatcaatggcaggtcaggcatttccgacgagacgcggagacaagtcgagcaaatcctcaaagatcacggttactcaaggcctctggtcaacaccaaactctcccccaccatagagctcgtcgtcgaatacattgagcacaacggcacgatggaactcatcaaatacgcctcatactgggcgcagcaggcgggcctcgccatcacggtcacccagaccaaccatggcgatgccacggaagactgtttccgcggcatcatcgatagaaatccccaaggtgtgattatgcagcagatgggcggtctgaccactcaagcgaagtctttgttgaaatcgcgcagtattcccgtggtcatcatcgacccaatcgataccgtcgattcggatgtgatgagcgtgtccatcgataactggaccgcaggataccaggccggcaaacacctgctgtcgctcggccatcgacgcatcgccgttatccgggggccggcgaacctacagaccagcatcgcgcgctatagcggattcaccgccgctctgcaacaggccggggtggatctgccggagtcctatatcgaacagggcgactacttccccgccgaaacaagctatgaagcagcctgccggctgctggaactcaccgaccgacccaccgcgattttttgctgcaacgacttatctgcagtaagcacgtatcgtgccgcacgagagcataagatcgcgttgccaaagcaattgtccgtcatggggttcgacgacattttccccgccggccaactcatgccctccctgaccagcgtgcatcagccgttcagcgaaatagcccaacgcgccgtgcagatgatcatcgacagccgcaagggcaatcagggtgatatgcacgtcatcctccccaccagtgtcgtcacccgggaaagtaccgtaccgcctcaatcatcggcccgataatcggccagattcaagctggcggccacccgattggacgcgaacgcacccaccgaaaccagcgcatagcacagcgcaagcccgccgaagaagctggccagcgtggccggttcggtcatcgaagcggcgaacagaggggccataagcagcatggaacagccgccggccacgatcaccacgatgttgagcggggtgagtacctcgatgaatcgcgcacggttcaaggtcttgacatcagtgccctccaacaccagcatgcgatattcgccggcctgatcgtacacgctgccggcctgcatcacaccggagctgaccgcggcaagcacagcggcgaacactagcgtcaggatgccgccggtgccgatgtcgcgaatgaacacggtggacgggtcgttggcgtcaccgaccacggcggccgagccaaagaatccgcagatcgaggtgatgccggcgatgaacacggccagtgcaatgccggacacattgcgccaggcgcgcttcggattgtcgagaatacggcgcatggcaatcatcgtggccgcatccttggggcgcttggccttggccttggcgcgagcggtgaccacccaggagcccacgaggttcaccagcgcgaagcacagcagcatgaaaccgatgatcacgccgtacatcactacttcaccggcctgagccagcaccatcggattcttgaacagaagaacggcaatcaccatgatgacggcgaacaccaccacacgccagccggacggcagcgtagtcgcaacgcgtgaagtgacgccgagtggcgtgatggccacgcgccgaagcgtgaccagcgaagagatcagcgccaacacggtcacgccaacaagcgtaatgatcaaggcaatcggccccacccacagttgctcgaacgtaaacgtctgattctggaaatgcagcaacatgattagggggatcaacacgcagtaccccgcgatgccaatcagcgcccccaccaaggcctgcccagccgcatcaagcgccgtaaggcgaataacttgccccgtggtcgcgcctgccaagcgcagggatgcgagccgagcgtcacgacgggacgcagccaatcgcgcggcggaaccggcaagcgccacgaacggcacaatcagcagcaggcaggcaaagaacgccagcacgacgtatgccgtggcgtattgatccaggctgtggggattggcgatacgctgcttccagatttccgctgttccgggtttgcaagcgtcgagattgattgcgcatccaatggtgtggtcggcggaggcgcgccacatgaacccatgcacgccgcccaaaacggtgagaaagatagtggtggctgcggcaaaagcaatgatggccaacaccgaagtatgacccgcactgccacgcgagccggggcgatggaacaatcgccacaatgcgaaagcgctcatcgtacgcctcccagctggccgtcctgcatggtcacggtgcgcgagcagaacgaagcgacgttggggtcgtgggtgacgacgaccacggcggaaccgttgtcccgcgcggcggccatgagaatgcccatgacctcgcggccggtggcttggtcgagcgcgccggtcggctcgtcggcgaagaccacggcaggtttgacggcgagcgcacgggcgatggcgatgcgctgcatctgtccgccgctcatctcccccggccggtgcgtggcgagcgcgcgcaatcccatgcgttccagccacaggatcgccgtgtcggtggcggtgcggtagggcatgccgtcgagcatcatcggcagggcgatgttttcgacggccggaagttcgggcagcagttggccggattggaagacgaatccgaagacattacgacgcagtttggtgcggtcggcgtcgctcatatggctcaggtcagtgccacggaagacgaccgtgccggcagtcggcttgataatgccggccaacgcgtgaagcaaagtggatttgccggagccggacgggcccatcacggctactgtctcaccctcccggagcgtgaagttcacgtggttcagggcgagcgtgtgcatggtcggcatggcgaagccgggctgggctggctgggatggctggccggcctgaatggcacccggtccggccgcagcgggattcgccgacgcataaccggctcccgtgccggctggcatcacgccggtgacgccgtgccctgcctgtgcgcgggccatgctggcggtgtagtccatgaccaggtcgtgcgcctcgatgaccggggcccactgctgggtgtgcgatgccggctgctggaactgttggggttgctgagactgctgaggctgagccgccggtcccgacgccggctgaggctgctgcaattgcgatgctgctgtgttcatactcccgagcgtacggagcgaacgcccagccgaccatcgggctgcggtatgaacctttctggatcaccggcccgctcctcatccgcaaggattagagatacgcagtcgacgcgacaatccatatatcagatgttcattgctcgagaagacgaggaacagtggaagaccggttcggaagctggaaccacaacagaccaagcaaaggagcccacatggccatcgcaatcgacatcccgcacacaccaatcatgtccgtacaaaagtcgtacaacaggagtatgactacagagaataacaagaacagtcgttttgaaatgagactcacctaagagcaacgttccagaatcgaccaagcggccgagtccaaaggcatgacttcgttgcaatgggcattatcgaatctgctcgccgccgcagatcgggacatccatgaagctcatatcattcggctcaacagtaaagcgtggaatgatttcaccgcagcattaaacgaacctatgggcccacgtctgaatgaattgttggagcgtgatcccatatggacgtgaccaacttcactgagcctcggcacctgactgcgagcgaggatatttctggtttcgactgtggcctgccattggtcaatgattggctggtttccacacactaagtgcatacagcattgagcattcggaagcccggttggctgaggcgaaatagtccgaaccccattcccgtaattttgctaggcatgatgggcgtggatatcagatttcaaaccatgcacgtcgacagtcagttactccgagatgcggtacttcattctctgaacgatatgattttcggcatatccctgaatcatctagaatgtttactccgctcaatgtccacaatcaccaatgattaatggctggagaccgctatttgacgccgaccattgtctgaatcgcattcagacacaacactcctcattgcgcgcagaccagcgagttccgccgagtcggcgatgtgtctcttcggcggttgatttaggattttccgcatgcgacagctgaccacaccgctaaaaatgccattttcgcactgacttggggcggaggtcgtggcgaaacgcacgagggaacgtgtgtcatccgatatggtcatgcccgccaggcattgaagcgtcctgtctatgcgcggttgatgtcccggtggcggggtcaatcgatcgacatacgaaccgggacagattcggctgtcccggttcgggatctcggcctcttttggcgaaccgggacaggcccttccatgaacacccgatatatgcaaatccaaaaccccggaattccgccattccccgacggcgaccatcgcacgatagggcgtcaggtgaatgagattctgtcccggttgcccaaaaagaggcaaaatgacgaaccgggacagcgaaatctgtcccggttgtcccaaaagagacgaaatgacgaaccggggcagcagaatccgtcccggtccacacgcggttcacacgcattacccaggtaaactcatcggcaaaacattggcccagccaacaccactaccgatgtccagcacaggccagctcgtccaggcgggcggcgaagcggggccagtcggtcttcatagcggtgaggagcttgcggttgggcacgtcgtcaatcgggacccagcagatttccatgctttcgtcgtcgtttgccttgggctcgacggtgtggccgggcttttcaaaggcaaacacggtggtgtaggaccacgggccatggtcctcgcggtaggagccgaccacctcgatgtcttcgggggtgatgttggcttcctcgtagctttcgcgcagcgcgccttcgatggacgattcgccgtccgcagtggcaccgccggggataccccacgtgccaccttcggcgctccacgcggcacggtgctgcatgaccacgtgagtcaccttgccgctcgccgggtcgcggcgagccagcagaatgccggacgcaccgttggtgccccaatgcttgcggccgcaggcgcagtccacccagccatcgccgggctgatgcacgttttcgaccggcggcagaatgccagcgtgctggttgcccgaggccttgctttccggctccagttcgccacggccgacattccacaggtcggtccacgtgatgcccagttcgccggccagatgccgggccagcggcaggctgaggccgatgataccgtgcggatcgccctcgatgctgtcgatgaacgcgccgccgaagccttccagcgtgaacgatccggcgacttccagcggctcgccggtgacgatgtaccgttcgatgtcgtcatcggtgaattcgccgaaatggactttggcatggcttgcgccgcgcacggtacgtccggtcgcgaaatcgatcaggcagtggccggtccagagttcaccggtcgcgccgctcatgcgcttcagtcgttcgcgggccacggcttcgctgtgcggcttgccgtagcattcgccgtccaggaggaacatcgaatcacagccgagaatcagcgggccgaccgtcgcctcggtcagtcccggctgtccggcaatagcggtggcgatgggttcggtgatggtcggcatgtcgatgccggagaagtcgcgcgtggtggcgacttccgccttggaatagtcgatgggccggccagcggcggctttgcgcaggtcttcgacgacggcttcgcgttccgaatccttgatttccttggccttgagcgggtaggcaatcacgcgatcgccggttgcggcggcggcagtattggccacatcgcgatacgcacggtgaacggcctcggccttggctgcggcaagaatcatcacacgctgcttgatgctcaaatcgtcgacggtgacaccttcctcacgggcggccgcttccagcgcagcaggctcatccacgtgcgagacgcgaattgtggggcagatacccgccgaatacagcacgtcacggcgaggcttggacttggaagcaagaattagcggaatggacatgacttaagtccttatgctcccgctggcgggagctgtcgaacgaagtgagactgagggtggtctctgccggtatggcggaccactctcagaccgcctgcggcggccagctcccgccagcgggagccttctcctcgacttagcgacgctcgatttcgacgccggcggtgttgatgggcaggtgaagcacacgccagtggccggaagcaagctgctccgatgcgatctggtcgatggcttcgcgggcgttgccgtagtgcagcacgagcacgcaggggccggcaccggagacggcggcggcatagcccttggagcggaagagcgcaatgagctcggtggacggcggcatcagggtaccgcgatacggctggtgcaacttgtcctgcgtggcggtgaacagtagcgcgttggactgggcctgagcggccgcaagctcgtcagcgaacggcgattcacgggttccgccagcgcaagcgcacgtatcggcatcctgagccggggcagcggcgacgccggacttgccctgctgggcggcctgggccagcaccatgggattcatcgcagcgggcagcagacccacgcgagacacgttgtagacggcgtccttgtatggcagttccctaggcagcgcctgacgggccttctcagtggacagctcatagtcgggcacgaacacggcggcggtgatggacgggtccaccgggtagttgacggcgtggaatccgccgtgcagcggttcaccaccaggaacggcgaccgagccgacgccttccgcggtttcgaagtcccaagagacggtcaggccaccgaacacagccggggccacattgtccgggtggccttcgatctgggcggccatatcgaagatggccggacggttgaggtcaccggtctgggcgaaggccgcggcggcggcgatgccggccacaatggcctcggcggaagagcccatgccacgagcctgagggatgttgttggtcgcttccagcgtgaagccgagtcggccgaggccgaacgtggcacaggcacggcggaaggtggagaccacgaggtgggtttcgtcgcgtgggagggtgtcggcaccctcgccgtggatgatcacgtgggcaatgccgtcgttcgggtcgtcgttgagcgtgaaagtgagctcgtcatggtagtcgagcgccagacccacggtatcgaagccggagccgaggttggcggacgtggcgggcacgcgcacgtgaacgctattgcagattgggttcatggttgttccttaaaaaggagctccccttgtcaggggagcttgggtattcagctttcaactcacgggcagccgttcgaccgcctcatcagagggagcctagacggtgtcagtccagcacgcgcaggatggacgggtcaccggtgacgaagtcgagcgcctgcacggccttgacggtgttgcgcagggtttcctcgtcggtcaggtgggtcacgatgcgcaactgctgaatctcgccgtcgtagccggggtcggtcatggtgggcttcagatcctggttcacaccgttgatggagacaccgttcttggcgaactcggcggcgatggcggccagcacgcccggcttgtcgtggatcaggaagcgcacggcgaatgcagccttggaggcggtaatcggagccttcggcagattcttgtacagcgggatggacgggccggtgcagccagcagcaatgtggcgggcttcggtcaccacgtcgcccacgacggcggaggcggtcggagcgccgccggcaccacggccgtagaacatgaggtcgtcggcggcctcggccttgacgaacacggcgttgaaggagccgtgcacggaggccagcgggtggttctcgtcgatcagggccgggtagacgcgggcggagacgccggcctcgccgttctcgaccacggcgagcagcttgatgaccttgtgctcggcggtggcggcggcgatgtcgtcggcggtgatcttggtgatgccttcgacggacacgtcgtcgatggtcacggaggtgtggaagccgagggtggccatgatggcggccttgttggcagcatcgtagccttcgatgtcgccggtcgggtcggcttcggcgtagcccttggcctgggcgtccttgagcacgtcgtcgaactggagacccttggtggtcatctcgtcgagaatgtagttggtggtgccgttgacgatgccaagcatgttggtcaccttgtcgccgaccagggactcgcgcagcgggcgcaggaacggaatcgcaccgcctacagcggcctcgaagtagatgtcgacgcccttggcctcggcggcggagtagatctccgggccgtacttggccagcagcgccttgttggcggtgaccacggaagcaccggattcgatggcggcaagcacgaacttgcgggccacggtggtgccgccgatgagctcgatgacgatgtccgagttggtggccacgctcaaagtatcggtggtgacgatggactggtcgatccacgggaacttctcggtttccttcgggtcgaggcaggcgacgccggtcagttcgatcgggcggccgatacgagcggacagttcgtccttctgctcgacaatcaggcgggcggtctgggagccgacggtgccggcaccaagcaggcctacgcgaatcggggtttcgctgttgtgagccaattcagggtccttccaaaaagttttctatatcccacgcctattttacggattatttccgacagcagaccgaaagtactcatcaagctgacggcccttttcgtattatgacggttttggccgcacattacagactgtcaggcgctcacctctgcacgctgattactcgctgacgtcgaggttgagtaggtcgtctacggtctggcggcggagcatgacgtgcgcgccggactcgctgacagcaaccaccgccggaatcagcgcctggttgtagttgctggccatggtgcggccgtatgcgccggtaaccggcacggcgagaatgtcaccgcgcttcaaatcggcgggcaactgcacctcgtgaaccacaatgtcgccggattcgcagtgcataccgcacacgcgggcgagcatcgtttcagcggaaccagtgcgattcgccagacgcgcggtgtagtcggcaccgtagagtgccggacgaatgttgtcggacatgccgccatccacggacacgtacacgcgctcggtaatcgggttgccggcactgtctttggcatcggacaagtgcacgtgcttgatggtgcccacgcggtacagggttacgccggcgggtgccacgatgtaacggcccggctcgaagctgatggctggcgcgggcatgccgagcgcacggttggtgctgttgaccgcatccgccaagcgagtgagttccacgtcaatgtccattgaatcttcgccatcggtgtaggccacggagtagccgccgccgaggtcgatttcgggcaggatgtaggcgtcggtggcccacagggtcttgcgcagcagcatcatgcgcttggccgcgtgaatgaaggcgtccgcatcgtggatgttggagccgatgtgcgagtgggctccgaccagttcgagtacgtcctggttggcgaggatggtcttgagcacggcgatggatggaccgtccgcaatggcttccatcgcggcggccagcgccttgtctgtgtcggagacttcctcgtggctcaggtcgtacgggtacttgacgtcgtagtgcagctcgcgctctgatttctcggtcttttccgcgccattttccggggaatgcgtcgcagagatacgcgcgttggtagcggcaggcgtcacgtctttgagggcgttcagcacgtcgagcacggcggcgtcggccccggcggccagcagcggcacgccgaacttctggtcctcgtgagcagtggagatgtactcgtggccgccggcgtggacaccgacggtgacgcgcagcatcacacgggcgcgtttgccgagcctgcgggcgatggcggcgacgcgctccggctcgtcgggctcgtcgatcacgattttggcgaagccctgttcgatggccagcgcgatttcctcatcggacttgttgttgccgtgcagtaccagacgacgtccgggaacgccagcggcgagggcgattttcatctcgcccatcgtgcaggtgtccacgaacatgccggcctcggtgaccaatcgcacgatttctttggacaggaacgccttaccggcaaagctcacgtgcgtagtggatgtgttgaatgcttcggcggcagcgcgcacgaagtgcctggcacgtgcgactacttcatcagtgtcgatgagatagagcggcgagccgaactcgtcaagcagcgattcggcggtacgaccgtggaatgtaatggcaccgtcggcattcacagccgtagcggccggccaaattggagaaatgggcataatcacatcttttcgggggcggtgacgccgaggaggtcgaggccgttggcgatgacctgctggacggcgtcattgagcttcaggcgggcggcggcacgggccggctccggattcttggcgatctccaaggccttgcgagcctcatcgtcgccacgggtttccggatcggtcagggccatcggcaccacgcgctccacgttgtaccacttgtgataggtggcggccagctcttcgagataacgggccaccttgtgcggctggcggtcgtcggccgcagtggcgagcacgctcgggaactgggcgagggcggcaagtacctcgccgtcggcctcggtgtcgagcagggccaggtcggcaccctcgtagctgatgccggcggcggctgcgttgcggtccacgttcttggagcgggcgtgcgcgtactgcacgtagtacaccgggttgtcgttggtgtgcgaggcgagcagggccaggtcgatgtcgaagttctggttgtagtcggagcgggccagcgagtagcgggcggcgtccacgccgaccacggagaccagatcgtcgatggtcacgacgttgccggcgcgcttggacatgcgcacgggcttgccgtccttcatcacgttgaccagctggccgatgagaatctgcatgttcttgccgggttcgtcgccgaaggccgcgcacatggccatcatgcggccgatgtagccgtggtggtcggcgccaagcatgtagatggccacgtcagccgggttttcggcgcgatgtcgcttgtcccagtagtaggcgatgtcggcggcgaagtaggcgaactcaccattggacttgatgatcacacggtccttgtcgtcgccgtgcttggtggattcaaaccaagtggcgccgtccttgtcgaagatgtcgccgcgggacttgagctcttcgatggcgtcgtcgaccttgccgtcggcgtacaggctgttctcatggaaccagacgtcgaagttcacgcggaagtccttcatggacttctgaatctcatcgaacatcatcggcacagcgcgcttgcggaattcctcgcgcacttcggtgtcggcctcgccgagcggttcaccgtcgtcgttgaggccttgatcttggtgggccagtgcggtcaggtccacgccgtcggactcggcttcggcctgaacacgggcggcgatctcgttgatgtaggcacccttgtagccgtcgcacggggtttcggtctggtaaccggcctcgccgaggttgttggcctcagcccaagcggcgaccagcgacttggcgaaacggttgatctgctcgccgtggtcgttgaaataatattcgcgcaccaccttggcaccgttggcctcgagcacgcgggccatggcgtcgccgacggcagcccaacgagtgccgccgatgtgaatcggaccggtggggttggcggagacgaactcgagattcagggtctggccgcccagatgggcgttgcggccgtattcgttgaccttgttgagatgcttgtcggtgtcggtcacggcaccggcggcgagtacggtgtccaccacggcggcggccgaggcggagtcaagcgtgatgttgatgaagccggggcctgccacctcgaccttggcaatgccgtcggcttcagcgagcgcggcggcgaacggctcggccagatcgcgcggcttcatgccggccttcttggccagctgcatggcgatgttggaggcccagtcgccatgcgcgcggtccttcgggcgcatcacggcgagcttgtcgacgggcggaatcagctcgtcggtcaacgcgccggcctggccggcggcgacgaggttgtgggcaatgctggaaatcagttcacttaaggcttcagggctcattcttctaaggataccggcgatggcgacaccatgccgcgtccggtcattgtcggcggccataatggaacgacgcgcgaaagaggtgcatatggccgggctcaacccccaatcattggtcacgttgtggcagatcgaacagtatggttcgttctccgccacggccaaggccacgggttggtcgcagccggccatcagccagcagatcaaaaagctggaggcacagtgcggttcgactctggtgcaacgcacctcgcatggtgtggaactcaccgccaccggttcgatgctcgcccgccacggcgaggccatcgccgatcggctggagcgggcggcccgtgaggtcgaggattatcggcatcatcggtttgctcacctgcatttggtggccccaccgtcaatctgctctactatcgcggcccgtaccgtggtcaagctcagtatgttcacggacatcgagctgagcctgattcagatggagccgccggaggcgatcggtctgatttcccaaggcaaggccgatgccgccgccgtgttccggtacagcagcatcccgaacttcctgcacatcggcgacgatctgaccttccagtcgctgggttacgatccgatgcgattgttggtccgccgctccagcgacatcgccaaacgattcgaggagaccggcgaacccgtgccgctgtccgccgccaaagacgagcattggatcgccggctgccccacctgccgcgcaaatttggtgaaactggccacccgtgccggattcaagccggatatccgccactgcacggatgattactgggccacgcagaacctggtcgaggttggcatgggcgtctcgctggtgccggcgctcgatacacatatcaatctgcaaggcgatctggtggcctgtcccatcgccgacgattttgcggcgcgcgaggtcggcatcgtgactcgtgccggcgaccatcgtcccgcgctcggttcattgctcgaagagctcgagcgcacggcactcaaatatttgagtgccaagtagtcggacagcgataagcaagcttgcgaacgccatcacgatttcggggagccagaccgttgagcggcccttctgcaccgggaacaatggcatgttatgagcatgaacaacattccccagtcaacgactgtgagcaacgcaaccgccggcgcctcttgctttgatgccaatcacatcgacgtgacgaccatcgaagatctggagcaggtcggttcggataaatggacccgttaccccggctgcatcggcgcattcatcgccgagatggattacggtctggcgccgtgcgtggccgaagccatcgaagaggccaccgaacgtggcgcgctcggctacattcccgacccgtggaagaaggaggtcgcccgctcgtgcgccgcatggcagcgtcgatacggctgggatgtggatccgacgtgcatccgtccggtgccggacgtgctggaggcgttcgaagtgttcctgcgcgagatcgtgcgcgccggcaactccatcgtggtgccgactccggcctatatgccgttcctgagcgtgccgcgcctgtatggcgtggaggttcttgagattccgatgctgtgcgagggcgccggcgagagcagcgggcgcaatgatgaatggctgttcgatttcgacgccattgagcaggcgttcgcgaacggctgccatgccttcgtgctgtgcaacccgcacaacccgatcggcaaggtattgacgcgcgaagaaatgctgcgattgtccgacctggccgccaagtacgacgtgcgtatattctccgatgagattcacgcgccgttcgtctaccaaggccacacgcatgtgccattcgcctcaatcaaccggcagacggccatgcaggctttcacctccacttcagcctcgaagtcgttcaacattcccggcaccaagtgcgcgcaggtgattctcaccaatccggacgatctggaactatggatgaggaacgcggaatggtccgagcaccagacggccaccatcggtgccatagccaccactgcggcctatgacggcggcgcggcatggttcgagggcgtgatggcatatatcgagcgcaatatcgcgctggtcaacgagcagatgcgcacgagattcgccaaggtgcgctatgtggagccgcagggcacgtatatcgcgtggctggatttctcgtcactgggcattgacgacccggccgactatttcttcaagagggccaatgtggcgttgacggacggccgtgaatgcggcgaggtcgggcgcggttgcgtacgcatgaacttcgccatgccctacccgctactggaggaatgcttcgaccgcatggccgccgcacttgaggcggacgggctgttgtaaaaaattgtggctcccctcagagaggggagccgaggaacggccgaattaatcgaagtcggcacccaacgcttcgagtttgccgcggaagtcggcgtagcctcggtcgatcaggctgatgccgtgcacgtccgaggggcctgacgcggccaaggccgcgatcagatggctgaacccaccacgcaggtccggcacgtcgatgtcgcgtccggtcagcggggtcggtccgaagatcacggcggaatgcttgtagttgcgctgccggaaacggcacggcagcgag

SEQ ID NO: 340 - DNA, 5776 bp, Unknown
  R42_10m  MAG No. k141_11751
agttattaagaactgatctcccgttcctatccctcccataaggcccgtccgcctgaaccgcaagttgcggtccgtggcggacgggcctgttcgttcctgcggtcggcggtcatgaacatacccatgtcggttccggcagtggggccggaaccggcggcgtgtcgactatcggccaggagtgtctatcagctggtatccgatatgggccgtggccctgcgccgcctgccaaaggagataaccgtgcgtgcatgacgtgacttcgcatggccaaaactgctgaccgcggacggacgcggcatcgctttcggtggcgactatagtcccgaccaatggccggaggaaatctgggatgacgacatccgcctgatgggccaggccggcgtcaacaccgtggcccttgccatcttcagctgagatcgcctccagcccatcgaagaccattgggatttcgactggctcgatcgcgtcatcgacaagctcggtgacgtgaccgtcgccggaccgcatgtgcaggtgcttgcctcgtatgccggcgaagaagcggatgagtgggagcttgacggcatggccgcgatcacccgcaacacgtacggcgaaggggaggcgtatttcctcggctgcgatctgggcgtgagcgatctgacgcgattcgtgggaggctggcttgccgcgcagccgcaggatggccggcagccggaagccaacctgcggtcgcccgccagcggcgtgacctctgacgttctgcacaccgtgcgtcaatccgacgacgccatattcgacttctatctgacacgtggcagatcggatgtcgaactgcgcgacatcgcaggggagccgatcgtcctgttccgggcggaacggggcagtgacggcggcgcgtatacggtgcatcgcaatggcgttttcgtgacgaagcgcccgaacccgtcggtgtagtcagttgcgacgaaacaggagggcggagccgcggacggttttgtgagacggtccgcggcctcaccgttggaagccgcggactcggatcatcagcaacggacgcgccgttgatttccacttccggagcaacgatggtgagctttgccgcgacgagatgctgcaggacggtgccgacgtacatgatgcccggattctcccttcgccgctgcgctgcctgccgcagcagatgttccacggccgcatcaacggaaagcgagttgtcggactccagcttgaatggtttgctggtgaagaacgcctgaattcgtttgacccagtattgctcgatctcggtgaattgctctgctgtcggacgtaattcattgatgagctcggcatagtcatgcatcagcgccatggtgccgcggctggttcgtcccttaaaggttgaaccgatagaaccgtcattcattactttttcaacgataccgacacgctcattcgattgtgtccaatactgctttctttctgcatgaacaacggtactcggcaaggcggtaacgatagtcgcaaaggctaagaagcccgtacataatcgtttttttgtagtgtttcagattttcagtagaatggcgacagccaaatcccgctggcttgctagtaaagcgttgtcctcggggggagttttgtttgttgttgaaagataacgcggcatcgaatagataggggaggcccggcatgggacgtcatcagcgtgcagaaacctccggactcatctccttcttgatttgcgccatcattggcgcggtatcgatgaacctgtacatggaatacgcgccggccatctggcagctgacgcaacgccgattcatggtatgttcgggcatcgtggcggcatgcggcgtcatttccttcattattggctatgcgcgcaaatcacgttcattgaacctcaaacatggttggtttgcgccgattcgtcgcattttcgaaatcgttgccctttcggtggtgtatgcctcgaccattttcctgtcgtcttttgcactcatcggtgcggccaacgacatgatgggcaatgccatcttctccggctatatctccagcgtctgcgccgccttcgccggcgtggtggggtacatgacctttgtacaggcggagatgatgaacgccaaaactattgccagtctgttgccgttcttcgtcatctccggcgtggtcaccgccggcatgaccaccgacgacccatactggtatcacaacaacttttcgcagctcggcgacagaaccacgtttgcggcccgtatgttcaactccacgctgattcttgccggcacatgcatcatcatcgtcagctacttcgccatctccgaactggtgaccaccgaacggctacagcgcctctggcacgaccgcaccagcagagatccgaatcgcggctacgaaatcccacatttcatgctgcgcatctccattctgtccttcctgctgatggtggccggcctggcattcatcggcatcggcgtgtttcggtacacgccacacaatctcttgcacaatatatgcgccaaaggcctgccgttcgtcatgctgctgctgttcgtgctcctgccgtggcttgcgccacgcctgtccaaagcagtgatggtggcctccgacctgaccgcgctcgtatgcgctgcattctgggtcaatatgatgatgggtcacaacaccctcaccaatgtggaggcgttggctggtctggcgttcctcggctggttcatcgtgttctcgcgccagatcgccgccatcgaggccgatcgcgcggccgctcagttgttgcacgcgcaggccatcgaaggcggttttgagcagccgtcttccgcacctgatcagcagatcgaatcccgcatcgctgccgaccggtgaataatttgtttgatagatttggccttatgactgaacgactcacgaatctctggcctgccccgctcgccgcacagccgttgaacactacggtaacggtgccgggtagcaagtccctatccaaccgctacctgattctcgccgccctcggcagcaagcccgttactctgattggcctgctgcgttcgcgcgacacggaccttatgatgggcgcactcgaagccctcggtgtccgctgcgacgtggattccgcaaccgataccaccgtaacggttactcctcctgtatccggccgattccatggcaacgtcaatgtgttctgcggactggccggcacggtgatgcgtttcgtgcccggccttgccctgtttgcagatggcccagtgaattttgatggcgacgaacaggcttatgcacgtccgatgaagccggtgcttgacggtttggaacagctgggtgcaacggttgattaccacggcgaggttggccgtctgccgttcactattacgccgcctgcaaccttgccggctgcccaggcgcaggtcagcatcgattcgtccggttcttcccagttcatctccggcctgttgctgattagttccaaactgcctggcggtctgcacctcgcgcacacgggggagaagaccccgagcctgccgcacattcgcatgaccgtggccgatgtgaccggtgccggcggtgcggttgaggccgacgaatccgcccgcacatggacggttgaaccgcgcgcaatgcaactgccgagcaaggtgaccgttgagcccgatctgtcgaacgcggcgccattcctcggcgcggcattgatcgccggcggcacggtccgggtgcctcattggcctgaaaccaccacccagccgggcggcctgttgcccggatatctggagcagatgggtgccgaagtatcgttcccgaccatcggcggcgtgcgctattgcgaggtgaccggtgacggcaccgtgcgtgggctgggtacgttcgatttgacggcggccggggagattgcgccctcgttggcggcgattctggtgtttgctgataagtcgacagacatggttggtattggtcacctgcgcggccacgaaacgaatcgtctggaggcattggtcaacgagattcgtcgtgttgggggagcggctgaggaattgcctgatggattgcgtatcgaaccggtgccggcggagacgttgcacggtgccgtgatggaaacctatgctgatcaccgtatggccacgttcgccgcgatgctggggctgcgtattcccgatatcgaggtcatcaacgtggccaccacgcgcaagaccttgcctgatttcgtcggtatgtggagtggcatgctgaggcagtaaggggtcctgtgttcctggtggaactcccctcagtccgctacgcggacagctcccctcagagaagggagccaagttatagggcctggatcccctctctgagtggatctgtccgccggaggcgactgaggggagtatgacgcaggggtagtggtctcttgaccatatacgaatgggggctgattccaatcggaatcagcccccatagtgttgcaactagagattagtgagatgcctaacggcggttacttacttggcgaaggtgttgccgtaggtatcggtgccagcctcggcgattgcggcggacttgcgggcgatggccagttcttcgttcgtcgggatcacggcgatgatcacggaggagtccggagtggagatgatgcgcggttccttggagcgggtggcgttcttctcctcgtccagcttgacaccgaacggagcgagcttgtcgcacaccatcttgcggaccacgtcgtcgttctcgcccacaccagcggtgaaggtgatcacgtcgcagccacccatctggtaggtgtagttgccgatgtagctgacgatgcggtgcacgtagacatccagagccagcttggcgtcctcgttgccttcggacaccagacggtgaacctcacgcagatcgccgtagccggtcatgcccatcatgccggaacgcttgttgaacagggcatcgagctcgtccacgttcatgtgggcgttgcggatcaggtggaagaccacagccgggtcgatgtcaccggtacggccacccatcatcaggccctcaagcggggtcagacccatggaggtctcaaccggcttgccggagacctcagcggaagcggaagcgccgttgccgatgtgcagaacgatctgcttcaggccttcagccggcttgccgatgacgtccggcaccacggaggagatgtactcgtgggaggtgccgtgggcgccgtagcggcggatgtggtactgatcggcgatttccttgttcagcgcgtaggtgctggcggccttcggcagctggaagaagaaggaggaatcgaagacgaagatctgcggaacgtccggcagcagggagcgcatgacttcggcacccttggcctccgggccgttgtgcagcggggcgagcacagccagatccttgacctggttgatggtcttgttggtcacgagggccggcttcgggaagatggagccgccctgcaccacacggtggccgacggcgacaatgccagcctcagacaggttcgggccgtactcctcgaagaagccgagcacgcgcttcagaccctgctcgtggtcgtgaatcggctcttcaagctcgtgcttttcgccgttgtactcgtgcttgtagtggccgtcgaccggctcaccgatcttctcgacgaggccggaagcgaggccttcgccggattcgagatcaaccagctggtacttgatcgagctggagccggaattgatgacaaggacggttttcgccattgtgggcatcctccattgtgattgaatgttcccgtgagacacgggttaccgttgattagattactcgttgcttgctacaaaataagcattacagtggctcccgctggcg

SEQ ID NO: 341 - DNA, 19687 bp, Unknown
  R42_10m  MAG No. k141_12114
ggcgccggagcgggcgccggagcgggggtcaccggagtggacggcgtgccgccctggttaccggtatccaccctgttggcggcgtcctgctgctccttctggaactgacgattgtaggaatcgacctgggaagcgatcagtacggtctgggccgcctgcttggcggattgggaatccagactgtcgatcatggaagacagttcgtcacgccttgcttcgccttcctggcgcagcttatccaaagcgtcacgttcgctttgcgcggtttcggcggcggtctgtgcggaagcggccttctcatcggcctgggtcttgagcacagcgatctgcttttcgatggccgccaagcgctcgccacgattcttcgacgtgctcagtgaggtcgcggcggaggaagccgcattcgcctcgttgcgggacaacgcgtcccgggactgcatggagttgacgaagtcctgtgtgctggtggcacccgtcaccacgctcatcacgtcggaagcattcgagccgtgcatctcgtcacgggccagctgggccacggcggcgtgcgcgtcatcgtagtccttgccggtctgcttgatccgctcctcaagcgtctccttgtctttctgcgcggcggaaagacgtccggatgcggcatcggcctcgtcctgagcggtggcggcatcctcgttggcctgtgtgaccttggcctgcgcggcgacaatcttgttgttggtcagatcgtccagctcaagtaccttattcgccaggtcctggctggcaccggccagctgctgcttgagttcggcctcgcgctgtaccgacgcggcgtgctggttctgcgcattgatcaggtcggaataggtgtctgcctgggcaggctgtgccgagctgaacgccagacctcccacacaggctgcggcggccaccagtgccgccagtgcgggcttgatcacacgtacgttcgtcatatgtgaatagtcctttcgctcacttaagccaataccataacatgcgaacctgagaggcttgcacacgatgtcatcacatttctcgcgggtaagccggtcgcgttacgccctcaaataacgccgcaacgagatggttgaagcgatgatggacagcagtatcgcgcccacaaccaggaacggcgatatcaccagtaccgtgagctgattcacataaggaatccatgtaacggatttcgccagccagccggtgacgaacacgttgacgatagccgaaagcatcaggcacgagagcaccgagccgatcagcgaggcgatggtgccctccagaatgaacggcagacgaatcgtccagttcgaggcacccacgtacctcatgatttcggtttcggttcgtctggatgcggcggacatacgaatggtggttccggtcagcaggatggcgaccaccaccatcacgccggcgagcacagccgtaaccgccgtggctcggttgagcacggcgaacaccgggtcgaagatctggcgctgatcggtaacgtcttccacaccctccttgccggagagcacttcggagaccacctgatatttggtggggtccttgagcttgagccagagggagtcctgcatatcgtccgcggtcagcgtacggccttggaattcaccgttcgggtactgcttggtgaaggtgttgtcgtagaaatcctgcttgctgacatagtcgatgttggagaccacgtcgttgagttcatcgcgaatggttttctgcagtgccgtgatctcattggctgagggcgatttgccggaagcacagttcgcggactggctggtgccgtcgggacatagccacaccacgacctcgaccttgtcgtaccagtcgcccttggctttggtgatctgcgcctgagtaagcaccgaagcgccgatgaacaggaatgagatgaaggtgaccagcgtcagcgacagcagcatcgacaggttacgggtgaggttggcccacgtttcggacagaatgaatcgtgctcgcatgatgatcccccttactccttcgcgccctcagcgggttgatcgtcggatgtttggtctgcggcggactgctcgtcggcggactgctcgtcagcaggctgctcggcggcggactgctcgttggccggcggcgcgggcggttccggcggtgcgggcggctccggcggggccggcggctcggcggcggatgacacggacgtatcggcaaccgcggcggtcgcggcggactcgtccttgaacgggtcgaacgcctgggtgctttccagggcggcggcctgctcatccaacgaaatgcccttgccccaggtcagcgtgtcttccagcggcgcaaacgtctcgccatagcggccggtgcggccggaatgcacggaattggccaaacgggcgatgccttcagacggctcgtcactgccctcgatggccttggtcgccgccgccagcacatgatgggcggtgtcggacttggcttcgacttcggcatccgggaagaacagggcggaatcgtaggagccatgagcctcgtcacgcacgatcttgccgttgtgcagttcgaccacgcgcttgcgcatcgagttgacgatctcttcgttatgcgtggccatgacgatggtggtgccggtgcggttgatggcgtccagcacttccatgatgcccagcgaagtggtcgggtcgaggttgccggtgggctcgtcggccagcagaatctgcgggtgattcacgtaggcgcgggcgatggccacacgctgctgctcgccaccggagagctcatgcggatagttcttttccttgccggtgagtcccacggtattcagcaccttgggcaccaacgatttgatggtggaccgccgcgtgccgatcacctcaagggcgaacgccacgttctcccatacggttttgttattgagcagcttgtaatcctggaacacgaagcccagcgaacggcggtactgcggcacttgacggttggtgatgcgccgcagatcgttgccggccacgcgaatctcgccgctggtggcctcctcctcgcgcaacagcaggctcaagagcgtggtcttgccggagccggacgcacccacaaggaacacgaaatcaccgcgttcgatatcgaggttgatgtcgtcaagcgccggtcgggtgcctttgggatagatcttggacacattgtccagtgagatcagtgccataatgctgtttactcctcggtttcggcggcgcggcgctgttcatggcgccagcggatgccggcctcgatgaacgcgttgatgtcgccgtcgaacacggcctgagtctggctggtttcgtagccggtgcgcaggtccttgaccatctggtaggggtgcagcacgtaggagcgcatctgatcgccccagctggccttgatgtcgccggcgagctccttcttcttcttggcctcctcctcgtggcgcagcacgagcagtcgggactggagcacggccatggcggaggcacggttctgaatctgcgaacgctcatcctgcatggtcaccacgatgccggtgggaaggtgggtgatgcgcacggccgagtacgtggtgttcacgccctggccgccggggccggaggaacagtaggtgtccacgcggatgtccgtatccggaatgtcgatatggtcggtggcctcgaccagcggcaccacttccacggcggcgaagctggtctggcggcggccctggttgtcgaacggggagatgcgcaccagacggtgggtgccgccctccacggacagtcggccgtaagcgtagggggcgtccacctggaaggtggcggacttgatgccggcctcttcggcgtaggaggtgtccatgaccttggccttgaagccgttacgctcgcagtagcgcaggtacatgcgcaacagcatctgcgcgaagtcggccgcgtcgacgccgccggcaccggagcggatggtcaccacggcggaacgttcgtcgtattcgccatcgagcagggtctggatctccatctggtcgagatccttctgaatctcgccgatttcgctttgcgcctcgtccagagagtcctggtcgccctcctcgtggccgagttcaacgagcgtttccacatcgtcgatgcgctgggaggcggagttcagacgcttcagctgcgattccgcggcggacagccggctggtgatcttctgggcgttttccggatcatcccacaggcccggggccgcggcctgcgtttcgagatccttgatatcggccttgagccggtcgacgtccagcgccttggcgatggattcgtatttggcgcgggcttcgccgatcgcctgggtaaagtcaaattctgccatcgtggtttaccttactgttgattctttgagattctttgggaagtcacgtccttgttgacagccttcgcacattcctctggcgttggtgggcattgccgcgccacacacgcatccgcctgcaatccatgctgccagaaggttccgggcctgccttgccgatagccggccgggcgacctcacaaatccctcgcatcagacgtgttcaactgcgggcacgaatatgcgaaggcaacgtcaaagccccgcgtaaatcgccgggatgatcagggagccgagcatggccacagctatgacgacacacaccacacgcacgatggtgcggcggcggttctcacgctgctgtcggccgtcctgatagttactcacgagaccaatagtgtactcaccgcttacgaccgcaggacttgccgccgacgccagccctgccggcgggcccccacggccctttcctttgcgctttcagcgccgccagatggtgtttcatggccaccagcatgatgtgcgaatcctcaaggcccaagtggcgttcgttgtgggcggaatcaagcgcgccctgacgtttggcgtaggcgtcgagcgtgttgtctccgtaaggatgctcgttggtgggtaccgcgccggggtcccactgccggctcatcggcagggtatcgatgatggtgatgcgcccggcacggtagctttccgcgtatccggcgacgttcagcatgaaccagctatgttcgaaggtggcgttatgcgccacgtacggctgctgggtaagccgcgcgagcaggccggcctgggcttggggccattcgtcgaagagtcggtacccggcctcgctgctgcggccgcgtacatcgatgccggtgagtttggcgatgagggcgttgccgagcgccgcgttttccggcggcacgccaaaagcgagacgggactggccgtaggcgtcgccggcggcgtaatagccctgctcataggcgtatgtctcaggttcgccggccgggcgcggactggccatgttcatgaactcgaagccgacgtcgatgatgtagtcacgcgccggatcgatgccggtggtttcgatgtcgatgcccatcaccgcgtccacgtcgcggccgggcagataggcgtcgcgccagtcgggcttgggatggtggccggtagcgttgccagacgaggcggcaccacccggcgaagtcgcgccggagagattggcgcgggccatcgccgcatcgcccgcacgcttctggaagcgctgggccttacgtcgttcggcgcgtgcgtcaagaatcgccgccgtacggtcttggatatcgtccaaggcgactgttgtggggaacttgacatcgctgttttcggcagcagtgtttccggcagatgcgtcaccggtttcaccgctcagattcagcatgccttggtcatcgttcgatgggcggctgccggagtacggcctgagcacggcaacggtggtcctcccccgccgttcgcgactgaccacccataggtgttgctgttcgcccagatgcaacagcgtgttgatgttgtcgttgagccgacgattggcgtaggcgagcgcgcgaggcagacgataggagccgatgaatcgatcgtaatcggtcatgaatgtgctgttgcattgggcgatgattgattccagatgctcgcgtgtggcgtaatcgatcttcaatgcgtcgtggatagcttgtggcgtcagttccggttggtccaacccgagctgaggctgtgctgcggtttcgccatattgctcaccatctgcagcaagcgccagcaatacgctgatgccatgcatcaggtccagcgaacgcacccagtcccagtcaatggtggtgccgtcggcgtctttgggcatggacgccgcccattggggaatgtctcccttggcggcgtccagccatgtgcggtcgatcatagtgcgaagccgagttcttcggcggcctcggtgggtaccgggtcgtcgcaccaataatcctcgaggttttcggtggtggtcagcgaacggatttcggcgcgatcgatatacagttcgccgctcaaatgatcggtctcgtgctggaagatgcgtgcgggccagccgtgcaacggctcgctgtggtgcttgccgtcttcatcatcccattcggcggtgatgtcgagccaacgcttgcgcacggcctggtatccgtcgaagctcaggcagccttcgtagaacgaggcggttttgtcgctggtgggtttgtagctcggattgatgatcacgtggaaggggaattccgcgatttcgcgcggatcatcctcgtcgtcgcgcacgtggtcttcgaccacggcgagcgcgagccccaagccgatctgggtggcggcgagccccacgccgggcgcctccagcatggtggtgtgcatcgtatcgatgagtttggcgagcgtacgcttggaaagctggccatggtaggccaccgtccgttggcgcaacaccggttcgccggcctgcacgatgggcaggagcttctccttgccgccggttttgataagttgttcgacatcacggttgagttcgaggtcgactttggcgttctttccaaacattgcttttccttagggaagggtgctacagcgcgagttcttcggcgacgatcttggcgaggcgggtgcagacttcgtcggcgtaggcctgggtggcggcttcggccatcacgcgtacgagcggttcggtgccggaggggcgcagcaacacacggccggtgtctcccagcagttcctcctcgcgggccacggcatcctggatgcgcttgttggtggcggcggctttcttgtccacgttcggcacgttgatgagggtctgcggcagctgcgggaagtcggcggcgagctccttcaggctcttgccggacttgacgacctcgttgcacagggtcagtgcggtcagggtgccgtcgccggtggtggcgaattcgcggttgatcacgtggccggactgctcgccgccaagcgagtaatcgcccttgagcatttcctcaagcacgtaacgatcgcccacggcggtttccacggtcttgatgcccatgtctttcagggcgagcttcagaccgaggttgctcatcacggtgaccacgagggtgtcgtggttgagcttgccttcgcgctgcttggcacgggccagaatgcccatgatctggtcgccgttgatcatgttgccgtcttcgtccacggcgaggcaacggtcggcgtcgccgtcgaaggccacgcccatcacggcatcggtggccttgaccatggcctgcagctgctcggggtgggtggaaccggcgttcttgttgatgttgtagccgtccggcgaggcgttgatcacgattacatccgcaccggcacggcgcagggcttcgggagccaccacggaagtggcgccgttggcgcagtcggccacgatcttcaggcccttgagcggcttgggctgggttttgtcatcgttcagcggagcgatggtggccaccagatgatcgatgtacaggttggtggcggtggtctggtcgtggctcacgcggcccacgccggcaccggtcgggcggtcccagtcctggccgagcacggcctcgatgtcgtcttccttctggtcgggcagcttgaagccgccgcgtgcgaagaacttgatgccgttgtcgggcatcgggttgtgggaggcggagatcacggcacccatttcgacgttgagcacggaggtcaggtaggccacgccaggagtggggatgatgccggcatcgatcacgtcgaagccgccggcggccatgcccgcggacagggcggaagccagaaaatcaccggacacacgggtgtcacggcccacgagcgcgcggcggcgtccctcaggctgatcgtcttgggtgccggcgtcgccgagcacacgcacggcggcatcgcccaaatccaacgccagacgtgcggtcaaatccctattggccagtcctcgaacaccatcggttccaaacatcttcggcatatgaagttccactccttgtatcgcgttacccgcaccatcgtagtcgttgtgctccaccctaggacccgactcggcaaaaaacgccacggaatctgctctaggaccagacaatggcattcccgatacccgcaatgtgtgagagaatacaagaatacagtagacctttgggagtttattgagaagaggaagcaccctatggcatcgtcgcatcgccacacgcccgccggaccgtccatgatgccggcaccgccgcgcatagcaccacacgttccggcgccaacgcccgtaccttcgattgcgatgggagtgccagccaatcagccctcgccttccgcatcatccccgcgcgtggccatcactgtggtgtatggcaaacgctccgcgaaactcaatgttccgtcgacacttccggtagctgaactgctgcctgatatcgccaagaaactaggtgtgttcgatccgactctggtgtatgccggctaccgactgacccgtgacgacgaaaccgccatcaataatcccgcttcgctggccgatcaggccatccgagacggtgaacgtctcaaactcgaggtcaacgccttgggcgatcaggatatcgtctacgacgatgtggttgaggcggtggccgattcggtggagcgttctcatcgaccgtggaccagtgccaataccacagtgaccacaatggtggtcagttgtgtgctactgggtgtcggagcgatttgtctggcattggccccactatccatcatcaatgctggcgtagcgggcattaccgcagccgctttactggcgattgccacggtactggcttcgcgccatatgcatcggcaggcactggcactgtcgctagtcgcctcgcttttggccggcgtgaccggatatcatctcatgggttcactgttcaatccctcgttctacgggttcccggccgttggtatcggtgctggtttactgctggccggcggcatttcatgtttgctgcttacagtgaacagactgtacgcgttgattcctgtcattatcggcgcagcactggtgattctcggcattgtgtgtgtaacgatgccgcactggtccactcgcgtatggatcgtggcagtggctctgctcggtctggctgccaatgcgctgccgtggctcagcctgtcttccgcacgattgtctgtggacagccccaccagcgaatcggagattttcgcgctgcccaagaacatcgatatcagcgaagtgcgtaataagtaccgtatcggctccacgctgctgttcgacctgcgcgctgccaccagcgcactgatcgtgttcggcacgcctctggctgtttccagtgcaagcccagcaggcgtggcacttaccttggttctgttcgcagccatgctgcttgattccaggcgcatctatgcacaatcggaaatgctgatcaccgttatcaccgcaggtgccggcatctgcctgtcttgtgccgcatgcacggtgtttcaccccacgtgggcttcggtggtggtgggcttgttctcactgggagcgttgctgtgcgtcatcggcacacagctgtccaagcacgattccatcgccatgacccgtctggctgacgcctcgaacgtaatctgtgtggtggccaccctgccgctcgcctacgtggcattgggattgtgaggaggggccatggcgaataagaaggacctgcaggacgcacaaaactattcgcgggccaggctcattactgccttcacttccggtatgccggatggcaaggagctgactcctaagaaaggcctgacgccggtgatggtcagtatcggcctgaccgccatcatggttctgatcagtgtgttctatggcatcatcagccctggcctgccttcagactggagcaataacaaactcattgtgggcaaagacaccgcatctcgattcatcagcgtcaacggtgtgctgcatccggtaatcaacaccaccagcgcacgtctgctcatcccctcagacgaataccgagttatcaccgtagacgacaacgaacttgaaggtattcccatcggctccagcgtaggcattgtgggcgcaccggatattctgcccaaccggtcgaggctcgtatcgaaattcctggtgagttgtcttgacaccgagcgcgcctcgaccaacaatctcatcaccaatgatgccgtgaccaccccggccagtcgtaatgaggcaatgctggtcaacgtagatggcattggatacctcattgtcaacggtctgcgacatcgtctgccgcaggaaggcctgattcgcgatgcggtgcttcgtattctcggcgtcggccaactcacgttggataacgctcccaaggctccggtgcaatggctggacttgtttgccggcggttccgatctcggagtgttggatgtcaggggcaaaggcacggaagtcgcggtgggcggtacatcatacaccgtcggttcgctgattgccgacccctccaacgacaacaccaaatatgtggtgcttgccgatggcacactctcgccattgaatggcatggccttggaaatgtatcagctgagcctcggtgccggtgcgcaaaccattaccatgaccgcacaggaacagcagcaggccgggttccgtaatgccaccggttccatcgttcccgatgattggcccgatggccaattaacgccgatgaattccggcaatggcacttgcgctgcgttggaaccgtccaaattccaaaccgataccacgcataatgccgctgccggcatcaccttggcgaccatcagtgacgacaagaaccgcccgcaacgtactgattccggtaccaccatcatcaatggcagcggtgcgctgctgcgcacggtagacagtgccggcggtaccaccggcgcattgtatgtggtcgatggcaccggtgtggcctacccggttccggacgataccgaagaaacattgaagcgactgggctttaccaaaaatgatgtcaccgcaataccccgctcctggatcaacgtattctccgccggagtggctttgagcagcaatagcgccggactacagatttcagcgcaggatcaggcagcggcaacatcgtcgtcaggacaatcctctgctactagcgcaggcaccgagggcacacccgacgcgaacagctcatccgactcttcggcatccagtcgaaagcaatgatgacgatgacaacacgcacctcacgaacccaccgtattcgcaccggcatcgcagctgccgcatgcactgctctggcatgtggcacgcttgcagccggggcactctcgcctacaccggcatgggccgatcagaacagctgtgaaatcggtaaaaccaactacatcaccagcacaccatggaccgaggatgcgctcggcatgaccacggtgcggtctctggcggatggcgaaggcatcattgtggccgtagtcgattccggcgtggacaccaacaacccgcatctggctggcgacgcagtgctgcctggagtcaatctggcgggagacaacgttcaggatggccgcactgataattacgggcatggcacggttgtggcgggcatcatcgccgccagaaaaatagaaggctcttctctgatgggcattgcccccaaggccacaatcctgccggtgcgcgtgtataactccatcgataattcctccagtcattcgcaaggcggtcccagcccggacgtgctggctgatggcatacggtatgccgccgatcatggtgcgcagatcatcaatatttcgcaaagcaccgtggctcccagtggcaccttgcaacttgccgtgcaatacgcacaagccaaaggttccctcgtggtttccagcgcaggcaaccgcaacacctcgtcgtccacgcaggatgggcttcgctaccctgccgcatggaaggacgtgttgggcgtggcggctgcggacacgtccttccatgcgtcatccgattccatcagtggcgagcaggtagacattcttgcccccggggaatccgtgctgtccacgattccgagaggcgtggattgcgtcttttccgccgaatcagcatcttccagctacgccaccgcatatgccagtggtgtagcggctttggtggcgcagcgtcatcccgatgaaaacgccttgcaatggctgcagcgaatcgaagcttccggcaaccgcccggaccccgacgcacgcgacgataatcgcgggtgggggcaaatcaacccgtatggagccatcaccatcacgctggccaacggcatgcgcggtccaggcagcacacaatatgagccgtacacgcctcctcgcacccagcaggcacaacatcttaaggtcgaggccaccatgcattcggatggcacggtaagtgctgtcttggccgtagtaggtgcggccgcgattctggtgatcatcacgctgattgctttgcgcatcgccaaagacgcgaagcacagcgcagatgaatgacaatccctagacggtaatcaaacattcaggccaatcagttcattggtgccatgggcggcaggctggagggcgcgtaggcgagctgtgccaggaatgtgccgctatctcgactgaccacctgcacacgaccgggcaccaatggcttcggcttggttttgccaataagctgtccctcattcggatcgcccgagaacagcaaaccggtgacggccagatcctggaaggattgcagcaccggatcatacagggatcgactggcaccaccagtgcggcgcgtcaggaatacatgcaggccgatatcggaagcctgtgcaagcaaaggcacgattggttgaatcggattgcctcgtgaagtggagaccagatcgtagtcgtcaatcagcacgtaagcgtcggagccggtccaccacgagcgtcgacgcaactgttccgtggtgacgtccgagcccggaatacgtgtggccaggaaggcggcaagatcgttcatcgcctgactggtttcctcatgattggtcagatactggccaaggtacttgtcattcacctcatcaagcagagcgcggcgatagtcgaccaggaagatcttggccttgccgccggtcacgtcgtaaaagcgctcgatttcctgagcaatcagacgcaggaacgaggacttgccggagcgagagtcgccgaacgcatacatatgcggcgctcgcacggggttgaacaacacaggcttcaagtcggcttcgtccacgccgagtacgaaacgactgttacgagtctgttccggcacggtggtcaggaaggcgttgcgagacagcatggtgggcagaagacgcagctttggtggcttggggcccttccaagcggcattgaccttggcgatgagatccttgatgccgtccgccatggagtcggctttatgatcgccgtcgatgcgcggcaatgccaccagaatatgccgcttgctggaagccagaccacggccaggcatgcccttaggcacggtgatggccactctgcggtcgatttcggaatcagccggatcacctagtctcagttccagacgagtgcccataagatccttgatgttggctcgtagatccatccaacggctcgtggagatgaccacatgcacgccgaacgtcagaccgcgagagacgatatccaataccttggcctgtaggtcttcatattccgtgcggaagttctgccatccatcgatgaacaggaatacctcaccatagccgtcatccgcttggcccttggctcgcatctggcggtaagtgccaatcgaatcgatcttatggttcttgaagtaacgttcacgggcgttgatgatgctcaccacttcagcgagcatacggttgacgcgctcatcgtcaccacgaagagcaacaccagccacatgctgcaggtcttccataccggcgaacgtgccaccgcccagatccagcgcatagcactggacttcagtgggactatgcgccaacgcaagcgaagccaccatggtgcgcatgaacgtgctcttaccggtcaacgggccaccggcgatagccacatggccgcccgctccagacaggtcgaggctcaatacctcgcgtttctgttccttgggcttgtcttccaacgccactggcacggataagtaccccgccttgcgtcgggagggggaaatcagcccatactgcgcggtggcggtcaagtcggggaagaactcgtcgagcgtgttcggcacattcagcggcggcaaccatacctgatgtgcaggcttaccgccagcacgacgcatctgatccacagccacgtcgaagttcgagggattggtgtccggctcgcctttcggagctccggacacataggatgcacggaagcgaatcatggtgcttgggtctggcttgaggtaaccgacaccagggatgctgggcagggtgtaggcgtccggtacaccgagcaccacacgtgattccgaagcggagaacgtgcgcaggccgatacggtatgacaaatgcgaatccaagccacgcagcttgccctcctcaagccgctgggaggcgatgagcaggtggacttccagagaacggcccagtcggccgatgttcacgaaggaatcgacaatgtccggtttggcggccaacagttcagagaactcgtcgcataccacgaacagtgcaggcaacggttccaaatcggtacgcccgttgagacgagccttctcataatcggatacgttggcgaagttgccggccttgcgcagcagttcctgcctgcgtgtcatttcaccggtcaaagcgtcttgcatacgatcgaccaacgaggcttcctcaccaaggttggtgatgatagaggagatatgcggcatgccttccataccggcgaaggtggcaccacccttgaaatcgatgagcacaaagttcagctgatcagggctgtgcgtcaacgccaacgacaacaccagcgtgcgcaacacctccgacttaccggaaccggtggcgccgacaagcacaccgtgcgggcccatgccatactgggcggattccttgatgtcgaggtacgtgatggaggtgtccgcgttgaggccgatgggcacacgcagtcgttccttgccggttttgtatgcccacaggcggttcaagtcgatgtgatggatatccgcgatgcccagcagatcggccaattcggaggacttcttggcgtgggaggcttgttccttgttgtcgccgttctcctcttcgctgggcaactgttccagtctggaggccacggccttggcttcctgaatactcaggctgtccggggcacaggtgtccacgcgctccgatgatgtgatgatctcaatctggttcaccgtggaagtgcgtaccacgttcagacccatttcgatggaggattgggagaagatgacgcgcaacacgtgctcttcttcaagatcgccccactcttcaggaagatcgataagggtgacgccgtcaaatccgtcgcggcgcaccaagccatcatcatcgctgttgttcgcgtcaccctggggcactgaaccatcacgtaccaccagaatgtacggcagagtcgattgcccggtgccggtaaaccggctgcgatgcaaaatgtcttcgccaatcagtcggttcgcttcttccacgctgccagcgagcatcacttcgccatggccaagcgccggatctttggactcgtcgctccatgcgtggggcatctcgccgatccagcgccacgcgtgctgctgttcgggggccgccagcacgatgatcttcagatattcaggcccatgccagaccgccgcctgacatatcaaggtgcgggctaaagattgcgcctgatcagcgtcaccgaggatttcgatacgcttgtacttgggcaggtcgatggtgcaaggcatatcatgcagattttgatgggccatcatgaaccggtgcgccgctgaagcggagaccgggtccagttcggccagcggaggcagctccggcgcctccaaggtaatgcacaatggctcgtctttagaaccgatgcgcacattaagaaaatcatcatccgatgggatgcgctcccagcggcgtacatgttcctgcgcgatggccaccaaggaatccggtgtgggagaattccacagttccgcacgccgttgttttttggccgcggtacgaacggtttttctcagttcagccaaatatgccaagtattcacgccgggacgaagtgagattcgctttgcgctgcgaacgttgacgcacgccgttaaccagtacgaagcccacggaggagagcatgaacatgccgccggtcagaaaaccggtcagaccggaattggacatgaccatcatcacaatggcggagacactgcccaacagcggtaccagcatggtcaacagactgttgacaccgtcgctcggctccaattcaggcggggcctgcaacaccaccttgccgtgcggcactttgggctggtctatgcgggaggatacctgtggcgttatctcactcattattttttctccctgtttctcagcaggctcacacttatggcggtgcttcctaggaatatacgtgtgccaaacgctatttcggtacgcgcgcccgcctcaagatgtttcacggcaccgtcttcggtcagaatttccgtgccgttggtgctttccaagtcagtgacccacatccggccggacgcaatctccaacaatgcgtgtgtacgggatatggtgccggtggtgtctggtactctgaccagcacgtcgtttgggtcgctactggtggggcggcgacccagcagagcacggctgggaatatccagatgcacaccattgccgttttcgaaatacaataccgccacctgtttggcagctgccggttttgccggcacgggacgctggggcacagcctgaggaacggccttgggaacaggcagtggcccagtgggtattggtgccgccgaagatgatggcacgaccgggcttgttccgacggttggcaatgcaggcggcacagcatgcactcgcgctgaagtcgtgcccgccggcgtggggatggcaatcgttgcagcaccactgctgtgccgcggcatggcagtctgggacactgcaggaattacaggttttgctgtattggaagtaacagacggtacagggctgggcactgctggagagatggtgggggccgcaggcaccggttgaacggattcggtttgcacagactgcacctgtatggcggtagacgatgattgcaatgtcccggcatgcacctgggcaggccgtacggacgacggttctatggcagcaggtaccgcgcgcaaagccctgaatgaatccgaacggccggagggtgtgggcgcagtggctggcggaagaataccgccgaccatcgcctccaaatcttcatcctcatcatcaaaagtagagtcaaatctggtgctggtactggtaccggtattatcggtgatggcattacccgtatcagacattgccgtcacatactgcacacgcgtatcaattacggcagtgccggacagccgatcctgcaatccgcgatgacgtacctggtctagtgaagaggtccattccagcataaatgcggcgacaatcgccaccaaacagcccaatgatgtgatcaatacacgcgccaacgcacgccacggaccggcaggtagcagaccagcgcccggctgccccatatccgcagtgttgcgcaccacacataagcccagtattgccttgccgatggtacgaccgcggcaagcctcccacccccagttcagggcgacagcctgtattgcgcacaagacggccaatatggcgttgcggctgagcgccaaagtgacgccgcccaccactgttacaaatgctacgtcaatcagcagcgcgagcatacgtcgcccgaccgtagcataacggtatccctcccccaccatgggatgggtcacggacggaccgggacgtggtgcaggagcttgggaagcaatgggcatgggcgctgcagtcatgacataaacccccgaatcatatccatggcgtttgaggcgaggaacgccgctggtcccatcaatgcaagactaccggtggtgacccagtcgccgacacgagacaacatcagcgacttgaagccgcccgatactgccaatgtggcggcggctatcactatgcccacggctatcagcccgaataccaaccatgtcacgagccaacgccaatcgtcatgattggtcagcgtgatcagggctgctgcaggcaataataccgcgcatgaacgcataagcatacgttccagcgcactgcccgcggtgcgcggccggagcaacagatagcagggcaataacaccgaatatgcgccgaagccgatagtggtgaagagatccggttcggcaggcacagtgaggcatagcacaacatatccggcagcaatatatagatgcccaaccacaagacccatggtgtattcggcagaaaaaatagtcatgtcttcgctgatgtcatgggtatagagcggacgtgaattttccggaaccgcgcctcgaaccgtccaacgctgggacatgtatcgacgccattcgatgaggtaccggtccggcacccgcaaaatcacattcgcttgggcatgcacataccatgcaccgcccacggagcaggccgctgcgattaccggtgcgggaatggcgaatattactactgcgataatgaatagcgcgataataacggctgcggtgatgagcagtcgggcaagggctactgtaatgcggcccgaagccgcgtattggatatatgccgccataacggccacaagggtcgcagagaggaagaccgccagtgccgcagaacgagtaaccgacataatctgcgcaatacgggcaagcgctgggcccgcagctatcgcggcggcaacgaccgtggccaaggagccggcataatcgacgcttcgatgccagtcggtcctcaccgtcacatgtgcggcgtagtaggacagtaatgccaacactgtggcggtgaacgcattaaatacaacggcacttacggtcacggcatctttagcggaggcatccacaccgatgagtccactgactaaaccctggaacacggcagaatcggtggatgcggcacgaccacgcattacaccatcgaaaccgaataccgcgaatgcgacgcataacgaggcggccacagcccatgccacggcaacattcacccgttggcgctcataggcatcctgcgctgccatagccatgcccttctccccgttctcctcatctccgaaacccctcgaaacggctgctcctcctaagaatacgccataccgtttcgtgagggaatcatacggtcagcagcacggacagcccgccatcacacgtaccggcacaactcctgcgccaccggcagcatctgcgactccagttccggggtcatatattgccattccaaaagacgatgaacgctaatcggcgtccacaaatacgccagcccatccgccaccaacaaattgagacgggcaggaga

SEQ ID NO: 342 - DNA, 4269 bp, Unknown
  R42_10m  MAG No. k141_12208
gactgagatgaggccggagtaaggataatgccggctgcgggatgccggttgaaggcccgtcgatgttacgtccgcgtttcagacgcgcgtgttgacgtgttccagcggacgtgtatagtagtacgtggctcaacgaagagagtcttcaatgaaccgaaggaaaaaagaacgctgcggtttgatgttgccagtgcagggactgatgatcaaggcatagtaatccctttacaacggatcgtgaggcacgtacctgcctctgaaaggatgaatatcatggcagaagtcgtattcgaccacgtcactcgtatctacccgggcaacgataagccctctgtggatgatttgaatcttgacattaaggacggcgagttcctggtgctcgttggcccgtctggctgcggtaagtccacgactctgcgcatgctggccggcctggaagaggtcaacaagggccgcatcctcatcggtggcaatgatgtcaccacgatgcagccgaaggaccgcgacatcgcaatggtcttccagaactacgctctgtacccgcacatgaccgtcgccgacaacatgggcttcgccctgaagatcgccggcaccccgaaggaagagattcgcaagcgcgtcgagaaggccgctgagatcctggatctgaccgagtacctcgaccgcaagccgaaggctctgtccggtggtcagcgtcagcgcgtggccatgggccgtgcaatcgttcgtgagccgaaggtcttcctcatggatgagccgctgtcgaacctcgacgccaagctccgtgtgcagacccgtacgcagatcgctgccctgcagcgtcagctcggcgtcaccaccctgtacgtgacccacgatcagaccgaggctctgacgatgggcgaccgcatcgccgtcatcaagctcggcgtcctgcagcaggtcggcgctccgaccgagctgtacgatcgcccggccaacgtcttcgtcgccggcttcatcggctccccgtcgatgaacatcaacactcacccggtcgtcaacggcaaggcgaagatcggtgaggacaccgtcgacctgcccgccgaggccgtcaacaagctgaccgctgaggatggcggcaagattgtcgtcggcttccgtcccgaggatgccaccctggccaccccggacgatccgaacgccttctcgctgaaggttcagaacatcgaggatctgggctccgacggctacatctacggcaccatcatcaccgatggctccgctgccgaggcgtccacgatgatgtccgaccagaacaagctcaccacgattcgtgtgaacccgcgtgcgctgccgaagatcggccagaccgtcaagatcaagatcgacccctccaagatgcacctgttcgctccgtcgaccgagttgcgtctgaactagtagaggaactagcagatacttggtatgacttcggtcatgccaaccattaaacgaggcgattctcttcctctcttatggcctcgttggaaaagccccgcgtagttgcggggcttttctttttgcccagaaagacatacgctaaccggcccccgcaaatgaactttttgttcttttgtccccgttgtctatttggaagtgcaacatccttgtttgtcttgcaagtttagcagctcgtcggcgaatgcctcggcgggcgtgcggtggccgagcacgcgcatgggccggttgtcggtctcgtcgacgatctcctggagccctcttgccataccgggttcgatgatcgtgcgtttgggcaggcaacggcggatgatgccgctgaccggcagcggcgaccagcctctacccggccattcggccacccgcgaccacaggcggtatggcttgcgcggcttcgccctgcgccggtcggccttgcgctgcgcggggccggcgatgtagtagcggcccgtccacgggcccgtcttcagacgcttcggccggtacggccggtaggactcgctctcgttggacgggaaccacgtgttgcgcctgatctccctgctgatgctggacgggccgcgtcccagcaaacgggctatcttcctgacgctcgtgccgttgccgacctcgatctggatgacctggcgttcctcttccgacaggtgcgaatatactttccccataggtgcaacatcccttcggactggttatctggacaatctccaataacgggtgttgcactttcaattagacaacgggccaatttcttgtataattgtatgcagtgacctcccgaaaaagggattgcgaatctatgaggggaaacaatgggctcgaaatcgaagttcgtccgttgcgggtttaacggaggaacagaacaggaatctggaaggcagcgccatgccttgaagcgttgccttgcttcggttattgctgtttccttgtccatcgtgtgcatggtgcctgcagcatatgctcagaatatagacgatgtgagtagctctcctaacgccgtaatttctgggggggggataatactgtcgtagctgctccttctgctcgcaatgtcaacgttgacgataagacgtcagaagaggccaatacatcaaacggtgcgccaacaccttccgaaccctcaaatggcgcgacagacaataaggcggacgactcagcagaagctaccgctggcaattccgctaatgatggagcccaaacgcaggctccaaacgatgcttcttctcaagatgccaagaacgattcctcaaatgcgacggatcaatcaccggcgaaggccaatgtgcaggtcgccgcgacggcgcttggcggccgtgactttgagggtcaggtcaccaaggagatcaacggcaagacctacatcctgattggtaacgagcagcagctgcgtgcgattggttccggcaagaaggttattggccgcatcaacaaggtcaagcagacttgcgcgcgacaaggacccctcaattatcagtgggtggacggcacgccgtcttccgaatacgccggtgacgccgatctctccaattcagatactttgcgcgatgctgatgcctccgaccacgacagtccactgctgtgcagcacgcggttagacgtcggaaagacccgcaccaagtattacggcgtgggtgctgatggcacgcaaacggactactccgctgccaacaccggcctgacctattcctcagacgccaactacctgatcttccgtaacatcgacctgtccaagaacgcggcagataccaacaacaccgagtggactccgctcatgttctccggcactatgctcggtgcggtctccaatgacggcgacaccgcagccagcctgtggaaggctgttggtgccgatggcgcaagcgtggttcacgctaccgcagctcggccggtcatcagccatgtggtcgtcaatcagaaagatatggtctctaatgtcaaaggcgaccagctggatgtcagcaagcagcagggcatcggcttcttcgcctcgatcacgaacaagaccgtgatgaacagcaacagtctgggcagcgccggtacggccgtggtgtcgaacctcaagctgcaggatgtgtcggtgacgaatcatacgagtgaatcgtatattccgccgaccttgctcggtatgctcacttcggcagtgggattactgctcgacacactgttgaaggcgttaaaactattgacattcggacaagtagatcttgacctcaatcttcaaggtctgctcaccctgcacaaagacaatccttccaacctcgccacgggtgcatttgccggccgtatctacggggacaccaaggttacggactgcgaggtagcagatgtttcggtatctagcgtaagccgtatgaccggtggtttcgtgggatatgttgagggcgcaacccgatacgatgcagtctccggcatcgtaggagcgctcaccaagttactctcggggattctgaacatcatcccgttcctcgggctgggcgatttggtggactggttgctgtccggcacgctcgggctgaatgccttgattccggttggctactacaacccggttatctcgaatagttcggtgaacgggttcaaaaataacgtggtgatcggcaacaaggacaacccgcaggccggcggctttgtcggtgcgcagattggtgcaatcattgagaactcttcggtgacgagcacgaatggtttcaccgtgcgggcaaagcaatatgccggtggttttgccggagtaagtcgcaacggcaacgtgggcggtctgattaactcgcttggcgtcgacttgctgtctgcgctgcgtccgcagagcctcatcga

SEQ ID NO: 343 - DNA, 23829 bp, Unknown
  R42_10m  MAG No. k141_13247
acgcccggtcccattccgaacccggaagctaaggcctggcacggcgatggtactgcacccgacagggtgtgggagagtagcacgccgccgcaccacacgtacaggaagccccgatacccctcaaaggtaccggggctttccgcatatcaggacacttgcgcgtggggggtgtatctcgcgtccttgggccccggcaggagtatcccgtcggggcccagtgcgttttgggcggcaacccgctgaatacccggtaagatgtctgaggtatcaacaaacaggtcaggaggtgacgcgcatggtggcgccaagccgtgatgaccgtagcgtagatgcattggtgaaatccaaggcagtacttgatgtattggcggaactgggaccaagcaccgcaaaaaccataagcgaacgtactggtgaacccgtaagctcaacgtatcgtttgctggataatctcgtcgcagtcggttgggtggaacggggcatcaatcgtggcgagtatcggcttggcatcgattgcgtacgtatcggcggccaaatcgaaagcagactggacattcagcagatcgctcgccgtaccttccgtgcccatcacggccagttcggcatctggggtctgttcgttcggaggcgattgcgcacggtgtgcatcgagacacgcacccgtgagacattgcaaagctatgcacagctggtgggcaatagcttgcctctgagcatgagcgctccctctcatgtactgacggcctggcttcccccggctcgctacgagcagctgttggaacactatgcctataccaacgagctcggcggcacattctccacgatgcgtgccacagcaatgggacaggctcgtcatatacgcgaatgcggcttcacctatgacgtcggccagaccatggccggctccgtgactatcagcgtaccggtattcaatcacgccggagagattcaagcggcaatcgccctgagtggcctttcccgctccttggaacctgagctggcctgtctggtagatgggcaaccggcaacggcatcggttcaagacatggtgcgattggtgcggactgccggccgtgaggtgtcgcgaggccttggatacagtggtgatcatcttggcctgaacagttgaatatgatgagtcagggataagtcaggggaaggaacgtcgacgatggcggaagacaaacgtgaaccgacccgcgctttagacaaggcgagtcgtgtgatggacgcattggcggcggagaatggcctgtcgccggcagatatcgccgacgcctgtgatatcccgcgatcctccgtataccgcgtgctggatggactggtcgatgtggggtgggccgtaacggatacggatggtaactactcattatcactggactggctgcgattggctgatgccgctcgcacgtctcgtaccgaatggcagcctgcgattgcggtcatgcatgccatcaccgcgcaaaccggcatgacctcattcctcagtgtggtctccggcactgaattggtatgcgtggaatgtgcgcaaggtcatgccatcgattcgctgatcctgcgcccgggccgcgtgctgcctctgcatgctggcgcggccggccgcgtggccttggcgtatttcgaggatgccgatgtcgaacgctatcttgcaggagtgccgtttccggcatataacgagaacacgctggtcagtgtggaacagttgcgcgaggatattcgcttgactcgcgaacgtggatatgcactgtcggatgaggatgtgacgttgggtgtcggtgccgtcggtgtaccgattgtggacaacgagtccggtcgcgtgatcgccagcctgtccgccggtggattcgtggacgaagtgttagccactcaagaatccttggccgcgttactgcgcgatggcgtacgcgaaattcaggcagcctgattcggcccgctaggctgtcgggctggacggttatgtccggtcagctatggcctttgccggctacggttctgctggttatgcttctgcccgactacgctgcggtccgttacgcttcggccacacgacccaacgcgatggcggtgatcagcacgtacgcctcgcgcgggtcggtggcatcccagccggtggattcggcggcgcgcttcaaacggtagcggatcgtattgggatgtacgttgagctccttggccgtggtctcgagcgaaccgccgaacttcaggaatgtggagacggtgagcagcgtcggatcatccgggcctgctgctgtcaggcttccgtagaccacgcggaccagttcgtcacgggcgtccgcgtcgccgatcaacgcacgttcgggcagggcgtcgtcggtgcgtaacgggcgcggcaatggctgcacggtggcggccagggccggcgcggcctgaagacagtagagcgtggcctgaatcgaacgcatcgcgccatcggcaccggtgcgctgtggacccaaggcgattggccgatcggcggcgaacgacggggcgatggtattgcagatgatttccggcgtggccgcaccgaccggacgaatcaacgccactacggcggtgctgttgccgatcgggcgcttggcggtcagacacacaccgccgaaatcggccacgattttctcgatttccttggccgtacgtgcggcggaccgggcagggtatccggcgatggtgtaacaatcgaagtcatgctcgaaaccgaggatggtgaacagggactccactcgttcgtcggccagatgattgaacaggcactcgaacagcacggtgcgtacgcggttggtcgcggtgatgccgggtgcggccgaatcggatgaatcgggcgcacccggcataccggatgcaccggacgaatcgacaacgtcggcagcaagaagttcgagaaaatctgacatagtcactagtgtagcgtcgctgattggcgttgcctttcagccaaagactctcgccaatacgtcagcaccacgaatccgaatacaaacgcaaccggcaacatgtgccgctcgaaattattggccggcgcggtaatcatcacgcccatcagcagtagcagcggaatatgggtcatgagggtgagccaacgtcggcgaatcacctcggccgcgccgatcagcaatgtcatcaccacgtagaaattgccgtgcgtaggccagccgagcacgggaatactgccccatacgcgagtgaagccggcgatgtgctcacgccagtcatggttgtaatccttgatccatgtggagtttttctgcacgtaatcgctggccacgtaataatccatcgatacgtacggctgatcgttcacattgaagtatccgaagcatttggccagcaacgcatccagcgcgatgatcggattgtccttgacgatttcgaaccatgccttgttgaaattggtcatatcctcgggcgtcaccgtgcgccacttgtagctgaccttcttggcctgaataccggaggatttcaccgggtcggcatcctgctgggagtaagcgtcggccatctgatcgagattgaagacgggcgcgaggttctttttggcttcgtctgaaataccgtccggattgcgctgagccacgcgggcgatcatttgcagctgtacgccgcggctttcgattggatcgccgccgatgatcgcaccagaggagatggcgaaggagatgccgccgtgaatcagtacggtggggatgagcagcgccacgacgtaagtcgcccagcgtttgcggtcggcgatcagagccagcacgatttgcagagcgatgatgtaccacgcatatttcgcggaaatcagcatcaccgacgtggccaggatgaaggcgatgaagctgtggcacggcaagtggacgggcgtggcgatggcaggggtctgaggatgtttgcgggtgccggcggggtgccaggtctggacgagttcataccagacgctgaaccaccagacgaacgagaacgcgaacagcggcgatttggtgatggagatagtggaaaacacggccagcgggcagaccatgaagaacagcagaatcaggaatctggccaatcctccggcctgtgggggaacggcggaatccgttgccgtttttcctatccaaggtcggttcaggaatcgattggcggcggcagcgcagcagaacacggcgaacagcgtctgcagggcagccaacgtcacgatgccggcatcgtttgagccggtcagatgcctcgcaaacgtgactatcgcgccatagaacacagtgagtaccacattgtgctggtcggtcagatacgtgggatcggacggccacatgtagtgcgcggtggggtagatgtccatcggcacgaaggagaagaagccgatatagggctgtttcaggccggtccactggttccaagcccagctgaattcgcggatctgtgagcggaggtccgcgccgaatgcggccagcagagtggtcggcacccagagccagccgacaaaaaacaccagcataagcttccagaaccggttcgtgccgcgtgtgatccagcggtccagaacagtgacggtggacgtgacgatagcgcgaacggtacgacgggtcttggctggttggctggcctgctgatcggcggcgggccgtgatgtttcgctattctgctgatggtggcgtaggcgctcgccgatggtcttcggcagtatgcgctggcctgctgcgaatcgcgccatcagcgtgatgattccgagatatatcaggaacgacacgacgaatattgcgatattggcccagttccaatgggcgagggtgccgttctcctcgtcccggtacagcgggccgaccgccgagcacagtgcaagccacaggcaggccagcacggccagtgtccagcgcgcggcagcgcccacgcgcgcaagatgcgggtgggactggcggctggatacggcggcaagcttcgcggtggctggtgacgtcatgacaatatatggtagccgcacaggtcaacggttgatattcgatgtctgccgggcatcgccattgttcgcaagccaatacgacggccgggtgcatgcgtgggctcggcgaatgcggaatttccgaagttgtgaatgctaacacgggctgtccggcccaaaatggttgattttgtgcgcttttccgtggaatatcgcgggcaaaaaacggcgcaaccgaggtaacgtagtgtccatgatgattgcattgaaagctgcaacgccgcagctacccagaactacagccgtcgcggatcatgtggtcgccgtggacgaaaccgattcgaccaacgcgctggccgcgcagatgatcggcgacgggtcgttgacgctgcccgaccaccaggatggcgaactggcggtggccgtggtggccgccgaccggcagaccgccggccgtggccgcaatggtcacaagtggatcagtcagcccggccgttgctcgacgatgtcctatgccgtgcgcattccgcgcgcgatcgccaccgacgaatccgtcaatggctggctgcagatgatcgccggactggtcacgctggacgccctgaacggcatgatcgaggaatacggtgccgcgccgaaccagccggactgcttgctggaactcaaatggccgaacgacgtgttctgccacgggctcaagctgggcgggctgctctcggaactggtgattccgccgtcgtccggtactgatgctgatgccgatgacgacgtcgtcatcgtgttcggcgtaggcctgaatctggcgctgggtgcctgttggctgcccacgccgcagtcgacttcgctgcagctgcatgtcacgggcttgccgtcgtttggcgagatgcgcgatgcggtggccgaacgtcaggtcgagggcttccgtgaacgactggcgaagttcatcgccgacccgaagggccaggccgagtcgttgcgcgaggaaatgaaggcggtgtgctgggcgcgcggccgtcaggtcgaggcgcatttcacggacggcaccacgctgaccggcgaagccatcggcctcaacgaagacgcctcactgatcctgagaacacaagacggcacggaccatacggtccgcaccgccgatgtgggagtgctgtaatagccggccagtagctagctagtagctcaggtcagcgaccgagcttggacaggccggcggcggccagagaggccaccacggccttgatggcgtcgccgacgacgaagcccatggaggccagggccacggcggcgagcggcgcaccggtcaacgcggactggatgatgaagccgaaggcgtacaccaccacgacgccgccgaccagcgcggccagcaggtagcggcccgcggtgcgcgcggcggccgcgaaggacgaagtgtcggacttgccgcgcagcagggcgatgaccaccacacccggcaggaagccgaagaggaagccggcgctcgggccgaccagggccagcgtggaggtgccgccggcgaacaccggcaggccgaccgcaccggccgccagataggtggcgacggcggcaccggcctgacgccacggcagcatgagaccggcgagcatcaccacgaacgtctgcagcgtgatcggcaccggcgtgcccggaatcggaatctcgccggcggccgcggacagccacatcagcacggcgaacagcaccggcttccaggatgcggcgacgatacgacgggcgagcggcgtggtggccgctgcggatgcggtggtgtgtgaagtctgcatatcaataacccctatgttgtgtgatatcgccgtgaacggcgggcggtatgcgatggatgaggggaggttccggcgggccgtgcggtatccccgacagcccgaaccgtccatatggtggacggtcccaaatgaatccggccctgtgcgggcgaatcgtgcggcgatggaccgatgccggtccggtcgccttccgttcgcccgcagatgagccttcccccgaacttacggttgccatcgtagaggtgttcgatttcgtgcggtttcgtaccaacttacaaaattgtcgatttcgatttgtcataagttgacgaacgcaaccgtaacgtcaacttcttgaaccggcgcgcaaggatgtgcaatcggcggatttgcaacgtttttgatagccggcgccaacggttacgttgccggaacctacgcgcgcgtttgttcgtagcctacaaaagggcgtgaaagcttttgtgcgaacgcggcttgccctctcctctatatggagagcacaatttgacactatggctcatactgtcaaaaaactgctgattgcgaaccgaggtgagatcgctctgcgcgtggtgcgcacggccaaggagatgggtatctccaccgtggccgtctactccgaacaggaccgcaatagccgctatgtggacatggccgacgaggcatacctgctctccggcgacacctacaaggacacgtacctcaacgaggatctgctgatcgacatcctgcacaaaaccggtgcggacgccgtgcaccccggctacggattcctttccgaagtgccgagcttcgcgcagaaggtcgaggatgccggtgccatctgggtgggtccgcaccacaccgcgctggtggatttgggcgacaagatcaccgcccgccgagtggccttgcgcgccaaagtgccgccggtgcctggcctgtccgaaccggtgaccgacgtgcgaacgctgctcgacttcgcacacacccacggctacccgattatgatgaagcgcactgatggcggtggcggccacggcatcaccgtggtgcatgacgacgaggagctgcgccgcttctacatgaaccacgacgcgctgcaaggcggcgatctgaaggaatacttcatcgagaagttcgtggacaaggcacgccacgtcgagacccagtccgggcgcgactcgcacggcaacttcaccgtgtactccacccgtgactgctcgctgcagcgccgcaaccagaaactcgtggaagaggcgcccgcgcccttcctgtccgaggaaatcgtcagcacgctggaggaatactcccgccgcctgttcaccacggtcggctacgtgggcctgggcacctgcgaattcatggtgaccccgaacggcaaagtgtacttcctggaagtcaacccgcgtctgcaggtggagcacaccgtctccgaagaggtcagcggcctcgacctggtgcgcgaacagctcaatatcgccgccggtggcgagctcacccgcgcccccgaaccgcgcggccacagcttcgaactgcgcatcaccagcgaagacccggccaccaacctgacccccggctccggcaccttggagaagatccagtggccggccggccccggcgtgcgcatcgataccggtgtggaacagggcgacaccatctccccgaagttcgattcgatgatgggcaaggtcatcgtcactgcccagaaccgtctcgatgccgtggcccgtgtgcgccgcgtgctcgacgagctcgtgatcgaaggcgtgcccacgccgattccgctgttcaaggagatcttccgcaacgacgacttcaccgccgagcatggccatccgttcgccgtgtccaccaagtggctggagcgcacgtacctgaaccgcacaccggcttccgccgcctccggccagccggcctccttggccaccgccccgggtgccgctgccccggccgcgcccgacaagtccaagtcggagacgttcgtcatcgagatgaacaaccgccgcgtcaagctcaccgtgccactcgacatcgtggagaacatcaccggctcggcccgcgcccgcggtgccaagcgccccacccagccgttgcgcggcgcaggcttgcacaacgtggcctccggtaccgccacggccaacgacggtgccaaatccggcgtcatcgcctccccgatgcaggccgtggtcacgcgcatcaacgtgtccgaaggccagcaagtggccaagggcgaccttctggtggtgctcgaatccatgaagatggagaactacgtgtacgcgccggccgccggcgaagtgaagaagattttcgttggcccggccgatggcgtggaggccggcgacacgctggtcacgctggacgtgaacgccggcaaggccaaggccgccgacgccaagaaggagggcggcaatgactgacatcatggattcgccggccgtgaaggccgcggctgcggcctcggccgccaacgccgcccagccctcggcccaccagccgctgcgcaccgctgtggtcaaggccgccgaactggcccgcgccgccgaagagcgcgcccgcgacaagcagcacgctaaaggcaagaaaaccgcgcgcgaacgcctcgacctgctcttcgacaccggcacgttcgaggagatcggccgcttccagggcggcaacatcgccggcggcaacgccggtgcagctgtcatcaccggcttcggccaggtctacggccgcaaagtggccgtctacgcccaggacttctccgtcaagggcggcaccctcggcaccgccgaaggcgagaagatctgccgactgatggacatggctatcgacctcaaagtgccgatcgtggccatcgtggactccggcggcgcccgcatacaggagggcgtggccgctctgacccagtacggccgcatcttccgcaagacttgcgaggccagcggcttcgtgccccagctgagcctgattctcggcccctgcgccggcggtgccgtctactgcccggctctgacggacctcatcatcatgacccgtgagaactcgaacatgttcgtcaccgggccggacgtggtcaaggcctcgaccggcgagaccatctccatggccgaccttggcggcggcgaagtgcataaccgggtgtccggcgtggcccactacctcggcgaggacgaatccgacgccatcgactatgcgcgcaccgtgctcgcctacctgccgtccaacagcgaaagcaagccgccggtctacgcctacgccgtcacccgcgccgaacgcgagaccgccaagcgactcgccaccatcgtgcccgccaacgaacgtcagccctacgacatgctcgaagtgattcgttgcatcgtcgattacggcgaattcgtgcaggtgcaggaactgttcggcgcctccgcgctcgtcggcttcgcctgcatcgacggcaagccggtcggcatcgtggcgaaccagccgaacgtgctcgccggcatcctggacgtcgactcgtccgagaaggtcgcccgattcgtacgcctgtgcgacgcgttcaacctgcccgtggtcaccctcgtggatgtgcccggctacaagcccggctccgaccaggaacacgccggcatcatccgccgcggcgccaaggtgatctacgcctacgccaacgcacaggtgccgatggtgaccgtggtgttgcgcaaggcgttcggcggcgcgtacatcgtgatgggctccaaagccatcggcgcggacctgaacttcgcgtggccctcctcccagatcgcggtgctcggcgcggccggcgcggtgaacatcatccaccgccacgacctggccaaggccaaagcctccgggcaggacgtcgatgcgctgcgggccaagtacatcaaggagtacgagaccagcaccgtcaacgcgaacctgtcgctggaaatcgggcagatcgacggcatgatcgaccccgaacagacccgtgaggtgatcgtcgaatcgctggccacgctcgccaccaagcggcgcgtcaagcgcaccaccaaacaccacggcaaccagcccctctgatttctgaagacatcaaccaaacacaagtaaggaaagcaatgaccaccttcttcctcaatcgcctggccaccgagccccatgcgctcgccttcgccggccagtccaccccgtggccggtagccctggcagaccagaccaccgatcccagccttgacgaggccctgcgcggccacatcgccgcagccaaccgactgctcaccccggtcgccgccgacctgctgaccaccaccggacgtccggtcgacctgttcggcttcactccgaacccggcccgcctcggcgccgcagccgacgccaccgcgtccgtggaaggcgtggcactgacccagctcggcgccctgctcgacttggaacaccttggctacagtgtggcccaggccaagccgctcgccgtgctcggccactcccagggcgtgctcgccgtgcacatggcccgcgccatcgaggccgccggctccatcgaggccgccggcaagaccctcgacgagattctggccgtggccgccctgatcggcgccgccggaacccgccgcgtgcgcgaactgggcctgaaccccaagtatggcgaagccagtccgatgctctccgtcaagggcgccacccgcgaacaggttgaggctctggtcaagcgcgtgaacaacgcccgaggcccgatctccatcgccgtcaccaactccgacaaccaccacgtgctttccggctacccggaagacctggcagcactcgccctcgaagccgagcgcgagcacaagcaccaggccaagctgcgtgaacagaagctccgcggcggcaccgtgttcaacccgaccctcgaatacctcgaagtcaccctgcccttccactctccgctcatggccgaagctgttgagcggaccgtgtcttgggccggcgcctgcggctttgaccaggatcgcacccgcgcactcgctgcggaagtgctgctcaaccatgtggactggaatgcccgcgtcaaggcgctgttcaacgccgccgacccggccaagctgtggattgtggacctcggccccggcaacacgctcggcaagctgatcggcaacgtggtgcagggcaccggcatcggcgtggtcgaagccaccacgctgtccgaacgctccacgctctccacgctggaaagcgagcctgagcgcacccagaactggaaggcgttcgccccgcgcgtcatcaacaccccggccggcgccaagctggtcaccaagttctccaagctcaccggcaagccgccggtactgctgcccggcatgacccccaccaccgtggaaccggaaatcgtggccgccgcggccaacgccggctactgggccgagctcgccggcggcggccaggtgaccgccgaagtgttcgaccgccacatcgccgccctcgaagacgagctggaggaaggccgcacggtcgaattcaacgcgatgttcatggaccgttacctgtggaacctgcagttcggctcctcccgcatcgtgcccaagaagcgtgcttccggcgcgccgatcgacggcgtggtcgtctccgccggcatccccgagctggacgaagccgtggccctgatcgagtcgctgcaggcggacggtctgccgtacgtgagtttcaagcccggcaccgtggaccagattcgccaggtcgtgcgcatcgccaaggccgtgtcccccaccaccatcatggttcaggtcgagggcggtgaagccggtggccaccacagctgggaagcgctggacgacctgcttgccgccacctacgccgaagtgcgcgcctgtgacaacctcgtgctggtcgccggcggcggcatcggcacccccgaacgcgcggccgactacatttccggccagtgggcccacgcctacggcctgcccgacatgccggtcgacggcgtgcttatcggtaccgccgcgatgaccgccaaggaggctcacaccagccccgaagtcaagcagctgctcgtcaagacgcccggtattccggccgacgccaagtccgacgacgtgttcgccccgcaggccgcccactgggtgccgtccggcaagtccgtcggtggcatgtcctccggcctgagccacctgcacgccgacatttacgagctcgagaacgactccgccgaatgcggccgtctgctcgtgcgcgtcatgaagcaccccgaagagctcgactcccgccgcaaggaaatcatcgaagccctgaacaagaccgccaagccttacttcggcgacctggcctccatgacctaccttgagtgggcgcagcgcttcgccgaactcgccttcccgtgggtcgacccgacttacgccgaccgcttccagcacctgctgcagcgcatcgaagcccgtgtgaacgacacggactccggcgaattcacctccaagttgttcgccgctgatggcgtttctgctgaagaggcagctgccgctggcctgctgacccacgacgacattctcgccgacccggcccccgcgctcgaaaagctcgcactggcctacccgcagaccgccgaactcaaggtggtcccgaccgacgtggcttggttcccggtgctcgtgcgcgaataccccaagcccatgccgttcgtacccgtcatcgacaacgacctgctgcgttggtggggtcaggaccagctctggcagtccgaagaccagcgctactccgccgattccgtgcgtgccatccccggcccgatctccgttgccggcatcaccaccatcgacgagccgatcgccgacatcctcggccgcttcgaaaccgccgccatcaagcgcgtgcaggacgaacagcaagccgccgatgccgctgagaacgacgatttcgccgcacttggcgaggccaccagcgccgaagacttcatccgcaagtccccgaacatctcctgggtcggccacatcaccgacaacccggcctacggcaccgccctgggcgaccagtactacgaaatccgcgcgtttgacgccgcggccggcaagtacgatctggacatccacctcgacacctactgggacaacgacccggacggcggcacctccaagcacgccgtgcgcgatatcgtcatcccgctcatcgtggaaggcaccgagcccggccgtgtgccggtcgtggaccgcgaacgcctgattccggacgtctacgcgatgctcgccgccaccgcaggcatcggcaacaccgccatcaccggcgacaagctcaccgagatgccgaagcttgacgacaagacctctgacgagcgtccgttcggtaccgcaaccgcaacctacaccctatccgccaacctcggcttcgaccacgaagcggccactggcgccgctctgccgaccaccctgcagcccagccgcatcgcccccgatgcgctggtcggccctgcctggccggcaatctacacggcgctcggctccgtgtacgtcaagggctacccggtgattgaaggcctgctcaacgccgtccacctcgaccacctcatcgaacttgaggtgaacgaggaggacctgctcaagcacaccggcgaaaccatcaccctgaagtcttgggccgaggattacttcgagtccgcctccggccgcgtggtcaccatccacgtgacccacaccgccgccgacggcacgccgcttgcccgcgaaaccgagcgtttcgcgatccgcggccgcgtctactccgatgctttgcctgcagacgcccccgagtatggtggtgccctcctgaataaggaagcggatggctccgtcgccggacagtccactggactgtccgcctcctcgcgcggcctgcaagtagtgcaggccactccgcgccgtctgctgcgccgcgtgaaggtcgtcgccccacacgacatgaccgccttcgcccgcacttccggcgacttcaacccgatccacacctccactcgtggcgctcgcatctccggcctggccgccccgctcgtgcacggcatgtggctgtccgccaccgcccagcacgccgtgcaggcgaccgacgagaagggtgcccactacgagattgccggctggacctacaacatgtacggcatggtccagcttgacgacaccgtcgaaatctccgtcgagcgcgtcggcaaagtgcgccacggcggcatgaccctcgaagtcacctgccgtatcgacggccagctcgtctcccgcggcaccgcactggtccgtgcgccgcgcgccgccttcgtctaccccggccagggcatccagaagcagggcatggttctggacgagcgcgccaagtccgccgccgcccgcgacgtgtgggagcgcgccgacaagctcacccgctccaagctcggcttctcgatcctgggcctcgtgcgtgacaacccgaaggaactcaccgccaacggcgtgacctaccgtcaccccgaaggcctgctcaacctgacgcagttcacgcaggtggcgctcgcgacggttgcttttgcccagaccgcccgtctgcgcgaagccggcgccgacatctggcccgcctacttcgccggccactcgctcggcgaatacaacgcgttgtccgcgttcgccgacgtgattccgctggaaaccgtgctggagctcgtgttccaccgtggttccaccatgcaccacctcatcgagcgtgacgcacagggtcgctccaactaccgcatgggtgccctgcgcccgaaccagttcggtgtggacgacgcgcacgtcaaggaatatgtggaatccgtggccaaggcgtccggcgaattcctggagatcgtgaactacaacctcgccggccagcagtacgccatcgccggtacgatcgccggactcaaggccctgaaggccgattccgcccgccgcgtggccgcattcggtggcaagcccgcgttcatgctggtgcccggcatcgatgtgccgttccactccacgctactgcgcaagggcgtgccggaattccgcgacaagctcgacgcgctgcttcctgcttacatcgactaccgtggccgtctggtggaccgctacatcccgaacctggtggccaccccgttcgagatgaccaaggaattcgccgccaagatcctcgaagccgtgccgtccgagcgcatcaaggccgcgctcgacgacccggccgtgtgggattcctacgccgccgacgaccagaagctcggccgtctgctcttgaccgaactgctctcctggcagttcgcctccccggtgcgttggattgaaacccaggcgctgctcttcggtcagcgcgaacagggcggcctcggcgtggaagaatacgtcgaagtcggcctcggcaacgccccgaccctggccaacctcggtaccaagaccctgcgtctgcccgagttcgccggcaacgatacggtcgtctacaacgtcggtcgcgatgaaggccgcgtctacatgaccgacaccgattcgctggttcccgacgacgagccggaagaggctgcggcctcggccccggtcgaaaccgctcctgccggtggttccgccgtcgccaagctcggatcgggtgctgctccggcaaatgccgtgactgaggctgctcagacaacggatggctctgtcgccggacagtccactggactgtccgactcctcgcgcggcctgcaatcagggcaggccgcggctggcacaccgtccggtgccgccgtcgccgacctccccttcaaggcttccgatgccatcggcgtactcatggcctactccgccaaggtgcgcctcgaccagatcggcagcaacgacaccaccgacaccctgaccaacggcgtttcttctcgccgcaaccagctgctcatggacatcagctccgagctgggagtcgccagcgtggacggtgccgccgaagcgacgctcgacaagctcgcccaaatcgtcaacaaggccgccccgaactacaagccgttcggtgccgtgctctccgaggcgctgcgcgatcgtctgcgctcgctgttcggtgccgccggcgtcaagcagcagtacatccgcgaccgtgtgaccaacgtgtggcagctcggcgaaggctgggtggccagcgtgcttgccgccctgctgctcgatacccgcgagggctccagctcccgtggcggtgacctggccaagctgccgaccgttgccgtgcagaacaagccggaagccgacaagctgatcgatgcggccgttgaggtcgtcgcccagcttaagggcgttgccgtggctctgccgtccgccggtggtgccgctggcggtgctgtggtcgattccgccgcgctcgacgccttcgccgagaaggtcaccggttccaacggcgtgcttgccgccaccgcccgcttcgtgctgaacgagctcggcgtggccgctccggctccggaagaatccgaggacgagaacgccgccgtcgtggccgcggtcgaagccgaacttggctccgactggcccaagcaggtcgctccgcgcttcgacgccaacaaggccatcctcttcgatgatcggtgggcctccgcccgcgaagacctcgcccgcgcctactacggcaacgatcccgccgccctgaacggcagcttcatcggccttggcaagaccatcgccgccgaagcccagtggttcgccaacaagtcggagagcgaaaaactcaaggccgccttccagaaggccggctccgaggccctcgaacaggttgcgtccaacaagaacgcctcccgttactcgaacgacatcgccatcgtcaccggcgtgagcccgaactcgatcgctgctcaggtggtcgaaggcctgctcgcgggcggcgccaccgtggtggccacttcgcatagcttcaagccgtccatcaaggcttgggccaagcaggcctaccgcgagcacgccactggcaacgccaagctgtggctggttccggccaatctctccagctaccgcgatgtcgacgcgctggtcgactgggtggggcacgagcagaagaagacctccggtgccaccaccacgattctgaagcccgcgtgggaaccgaccctgttcttcccgttcgcagctccgccggtccatggcacgctcgccgactccggcgacctgttcgaatcgcaggcccgactgatgctgtggggcgtggaacgcgccatcgccggcttcagccacatcggtgccgacaccaacgtgcagcacaagctccacgtggtgctgcccggttccccgaaccgcggcgtattcggcggcgacggtgcctacggcgaagtcaagagcgcctttgacgccatcgtcaaccgtgcccgcgctgaaaaggtgtggtcgagccgcgtcaccttcgctcacccgaagatcggctgggtgcgtggcaccggcctgatgggcggcaacgacccgctggtcgccgtcgttgagcgtcacggcatccacacctactccaccgcacagatcgcggccaagctgctcgacctgtgcaccgacgaatcgcgcgagcaggccctcaaggccccgctcgacgtggacctgaccggtggtctcggctccgagcccatcgacatcaaggccctgcgtgcggaggccatggccgacgccgagaaggaagctgttgcggcctcgtctcgggagacggatggttccgtcgccggacggtccactggactgtccgactcctcgcgtgggcagcaaatcaaggcgctgcccaccccgatcgtcaccaagcaggcttcggtcgacctcaacgactggaccaacgtcaccgccaagccgaaagacgaaatcgtcatcgtttccgtcggtgagctgggcccgtggggctccggtcgtacgcgcacccaggccgagctcggcatccactcggacggcactgtagacctgagcgccggcgcagtgctcgaacttgcgtggaacatgggtctgctgacttgggccgacagcccgaagcccggctggtacgacaccgacggcaacctcgtgcccgaagaggacatcgccgagcgctaccacgacgaggtcgtggcccgctccggcatccgcccgttcgaggaaggcatgggcaacgactacaaggacggtgctgacgaagaagaagccgaggtcttcctcgaccacgacgtcaccttctctgtgcccacccgcgaagtcgccgccgaatacgtcaagttggacgaggctcacaccaccatcgccccggatgaggaatccggcgaatggaatgtgacccgccacgccggctcgatgatccgcgtgccgcgccgcgccaccatgacccgcacagtcggcggccagttcccgaagggcttcgacccgacccgatggggcattcccgcctcgatggtcggcgacgtcgacaagatcgccctgtggaacatcgtcaccactgtggacgcctatctgggcgccggcttcaccccggccgaaatcctcgagtccatccacccctcgctggtggcttcgacccagggcaccggcttcggcggcatgatgtcgatgcgcaagctgtacctcgaccgcttcctcaaccacgagatcccgaccgacatcctgcaggaagccctgccgaacgtggtcgcggctcacgtgatgcagtcctacatcggcggctacggcaacatgatccagcccgtctccgcctgcgccaccgcggccgtctcccttgaagagggcgtcgacaagatcgccctcggcaaggccgacttcgtggtcaccggtgcgatcgacgacatcggtgtggaatccgtgatcggcttcggcaacatgaacgccaccgccaattcggaggaaatgtacggcaagggcatcgacgcgcgcttcttcagccgcgcgaacgatcgtcgccgtggcggcttcctggaatcccagggcggcggcacgatcctcgtgacccgcggtgacatcgccgaaaagctcggcctgccggttgcggccgtggtcggcttcatccactcctacgcggatggtgcccacacctcgatcccggctccgggcctcggtgccctggctgccggcctcggtggcaaggactccaagctcgtgcacgacctggccaagctcggcgtctcagccgacgacatcgccgtggtctccaagcacgacacgtccaccaacgccaacgacccgaacgaatccgagctgcacaacacgctggcccacgccatcggccgctccgacggcaacccgctgttcgtgatttcgcagaagacgcttaccggccacgccaagggtggtgcctgcatcttccaggtcaacggtctgacgcagctgttcaagtccggcgtgattccggcgaacgcggcgcttgattgcgtggatccgaagctccagcgcgacgaccacatggtctgggttaggaagcccctgcgcatcggcggtggcgaggacgagttcggtcgcgagaccgctggtcgcccggtcaaggccggtctggccacctcgctcggcttcggacatgtttccggcttcgtggccctggttcatccgggtgccttcgaagcggccgtggccaaggccgatggcgaggccgcgctggaagcctggcgtgagcgtgccaacgcccgcctggccgccggccagcgtcacctcgaggaaggcatgatgggtcgcgccgcgctctacgagccgatcgacaaccgtcgcttccgcgaggatcaccgtggctacgaccaccacgaggtcgaaaaggcgatgctcctcaacccggacgcccgcctcggtgccgacggctactacgaggcctgattcctctggctcccctcggttgaggggagccagtagcgcaccggatctcggctcccctctttgaggggagctcccgcgaagcgggtgaggggagtttcccctggagctttctcgctggcacaaactcagtgagagaaatatgcagaacatacgaaagcccctccctcggagtgagctttctgcgtttcaaggggctgatttggcattcgccggaggtctacttccgtttcaaggggctgttgcccaagtagacaaggcgtaaaaacggcggaatggcgttggcgttatgctgcggatactcgtggtatggaggatgaccagccccttgaaacggaagtagacctccggaacggtcaaaatccgcccctcgaaacggagatagacctccggggcggggcgcggatgttttttggacggctaggcagccagcccaagatgtttgcggtattgcgcgaggtcatccagcatagtgaatcttttccccctgaaatggaaatcaggccccaattctgatgaggtgtagagattacgcgcgaagcggtacacaataggaagcatgaatacttgtggtttggggcatgacgtggtggatgtggccgcattcgccgaacagttggcggagccggggtctcgcatgcgtgcgctgttctccgtgcgtgaggtgcggcaggcatccgaccgcgcgcgccagaagaatgacggggaggccgtccatctggccgccaaatgggcgggcaaggaggcgttcctcaaagcctggtgcgattatcttggcgatgccccctatccgttcacgcttgataatttcccgtggcctgaaatcgagatcttggacgattcccgtggtgtgccgcatgtgtctctgggtaagggggcggcgtcagtcttccaaactgattacgcgaattcggctgccggcgctcgctattcccctgcttattcccttgcttccgataacgggccttatacagtgatgcaggagcggcggaatgcgcgttcggcgcagcgctcgactagcggtgcggggtcgatgccgcatatccatatttccctgagccacgatggtccgattgcctccgcggtggtgacgatttctgtggaatagcgcccgaggcccccgagtgctacatgctgtacaacgtctccatcatggttaacctgtggagcgcgctcaccggccgcgacgtgcgcctgctcaagaaccagatcgacaagctcgactcgctgcccgaaaactgctggttcgtgattctgaatgcgatgggcgccgacctccaaccatacgagtcccagctcatccatttgtgatttcgacggtttccagctcccctctctgaagggagctgtcgccgtaggcggctgaggggagtcctcggcaaagccacaatccatcaactagattggctggtcctgctgcagccacacgcgtttgccatccccgaagaaatatgtataataactcaagtcgccaaaagcgacgcttaacgcggatgtagctcaatggtagagcctcagtcttccaaactgattacgcgggttcgattcccgtcatccgctccactatttatatgttggtgtatctaattgggaataccggaagggtgagctaccccgagtagtattagtactcatggtgttgagaatcgacgaagctgaactgcgtgccaagctctttgagcacaaagagcagattggtttcgggccgattgccaatggggtcgtcatcatcatcgaaggattgttttacattcctgctgctctcacatctggactcgaccaaatgtttcaaggattgctccttgcattgagcattatcttcatattctatggagtatggagtttgattactgcttgcagaaataagtatgatgccataacactgtatgaggatatcgccaacatggatagaaccgaacgaagaagctcgatcattgcggtgaaagatgctaaccgatatcttctgtatcgtgatttaggttggggatgcgactttttccctaatcatgcaaccgcaagcagtactgatgaggatgttcgtcagctgacgacgtattttgccgatgaattcgaaattcctgctaaagactttactctgtctcacatttgtgtgaaggattctgagaagccatccacggagcatgatggagagattcgttattacgaatacacgctataccgcgctagcgtaacggtaatgcctgacgcctggcgttccactgagttccatgttggtgccaaggactgccgctggatgactcttgatgagatgcttgccgaccccggcatcaacaaaatcaatcatgatgtcgttgcgatggtgcgggataacttgtaattgttgccacttcgggcatatgacgattgagccaaagcatgttctatgtttcgataatcatcaaaagcagagcatagtatgctctacggggatttttctataccctgaaaacaccgaaaatcaggatatagggcagtagcacgaattagccaacagcggcttgtctgcgggcaataatgacgttgctcccgcggattcggataaggagaatcgtagcgaggatcatggtgagggccatggcgagtaatcgatcgtatcggagacttgcccaacacgcacgctaagatgggcatcgcaataatcggcaatgagcaggtaatcggcgaggcggtgcatggagcaggaatccaacgagcaagaacctaacgaggcgacggaaatcgtaggcggcaaagtagagaccgtcgaggtttccaagcaccccgaggcttccatacccgagaccgatttgtctctggcggatatcgagcgccgtcgttcgcatccgttgcgttgggcgctgattattcttgccgtactgtgcgccatcatcgcgccgtactggttcggccgttcgttggcggtaaataatactgactccattgtgaccgtgctcgggggagtgtctccgcaaggcatcgcgctggtcggttgggtgaccgtggtgattgcgtacgtcggattggcgatggcggtggtcgtctcgccgtcctggccgtggttgatcgtgttcgtgatcgggttggccggcgagcagttcatcgcgggactcagtatgctcaatctcaatttctggtattccacgtacgtggtctacggtaagcaggccggcctggcgaatgccgcgaatctgggcattatgggtgcggcgatcggcatcgccgtatatgccctgatgttcgtgggtctgctggtgattatccggaagacctcaccactgaacgtactgaccaaaagctgggcgagcttcattctgtacttcgtgattgaaaccatcgccctgctcgtggtgttgtttggcggattgctcaccactgtgtgagcgcgtgtgccccagtccggcccctgccgtatagttttcatttggcgtaatttcgcccgcggatagagagcgtttcgagcgaacctgcacgaaacaccgcgcaacgacacaataaggaggacgccgtggcactgacggctgacgagaag

SEQ ID NO: 344 - DNA, 10421 bp, Unknown
  R42_10m  MAG No. k141_13461
aacgaggcgcgattctttggctatgtggccgacaacagcgaggagatggaaccggaccgcatacgcccggccatcctgattttgcctggtggcggctacgccatgacctccgaccgcgaagccgagcccgtggagaatacgctaatgctatccaggcctgccgggccgccggcgtgagcatcgaagcacacctgttccccgaaggcagccacggcctgtccctggccaatgtggaaaccgctggcaacggcttctatgcgcacatcgtcgaatgcgtgcagtgttggcctgatttggctgaagcctggttgcgtcgcctgttctaggcaaaacgctattacgctgtgcgccaagtgcgccacgcagttatggaataatagcaatcgtatgcatcggcagcagttgcgccgatgtccataaccgcgcagtcctgtgcgtccagccgggagagaaaacccggcagcggccgcaaggctgactactccgcggcaataccaaggagaacattatggatgatctcaaagatcaatccgcagtgtccgcgaccgcaacgaacgaggtcgtggaatcggaagaagtgcgcgcgcaggaagcgctattgggggaagctgatccaagtctgaccagtgccgacgacgtggccaaagccctgaatgtcgacccatcccagggcctgagcgaggaagaagccaagcgtcgactggccaaattcggcccgaatgagctcaccaccgccccgcccgtaccgaaatggaagaaattcctggcccagttccaggacccgctggtctacctgctgatcgcggccaccatcatctcggtgatcgcatggttcatcgaaaaggccaatgcgcagcccggcgcggaaggcggtgaagtgctgccgttcgacgccatcgtgatcattttgattctgatcgtcaatgccgtgctcggctacatgcaggaggccaaggcggaggccgcggtcgaggcgctcgcccaaatgacggccccgcagacctcggtgctgcgcggcggcaaagtcatgcgcatcaacaccgccgacgtggtccccggcgacatcatcgtccttgcggaaggcgactcagtctccgccgatggccgactggtcaacgcggccagcctgcgcatcgccgaggcctccctgaccggcgaatccgtgccggtcggtaagaagccggacacactcaccgaagccaaggcgctgggcgaccgtgccaacatgatcttcaacggcacttccgtgacgcaaggcaccggccgcgcaatcgtgaccggcaccggtatgaacacgcaggtcggcaagatcgccgacatgctctccgccaccgaagatgagaaaaccccgctgcaaaaggagatggattacgtctccaagatcctcggcatcgcggtgtgcgtcatcgctgtcgtggtgctggtggcgctcgccgtgctggaaggcttcgacgacgtccatgacgtgattgattccttgctgttggccgtctcgctggctgtggccgccgtgccggaaggcttggccgccatcctgaccgtggtgctggcgcttggtgtgcagcgtatggccgcgcacaacgccatcgtcaagaaactgcattcggtggagaccttgggctccgcttccgtgatctgctcggataagaccggtacgctgacccgcaacgagatgaccgtggagcgcgtggtcaccccgtccggcgcagtgcagatcaccggcaccggttacgcgccggaaggccgcatggttatgaccggtggcgtcagtcctgaatccgagcaggcccagattgtggccgatgaagtcgtcgccacgcttgtggccggcacgctcgcgaacgacggcgaactacgcgaggagaacggccgctgggagatcgtgggcgaccccaccgaagtctcgctgatcgtggccgcacgcaaggtcaaggccgatcgcaagatcacgcgatacacgcgcgttggcgagattccgttcacctccgaacgcaagcgcatgtccatcatcgccaaggacagcaccgattcagacaagctcaccgtgttcgccaagggcgcgcccgacgtgctgttgagctactgcacgcgcatccgcgtgggtggtcaggtccgtaagctcaccgaaggcgatcgccagtcgattctcgccaccgtcgaacgtctctcctccgaggcctaccgtacgcttggcgaggcctgccgtccgctggaaaccagttctttggctgatgtgcccggtgtaagcgtcaacgccgcaggccaggtgtccgacatcgccgatcaggccgaagccatcgaaaccgatctcatctggaatggcatggtcggcattatcgatccgccgcgtactgaggtgcgcgactccgtgaccgaggcccatcgtgccggcatccgcacggtgatgatcaccggcgaccacccgctgaccgccgcccgcatcgcctccgaccttggcatcatcgccaaggacggcaaggccctgaccggcgaccagctcgaccagctgcccgatgaggccgcactcgacaaggccacgtccgaagtgtccgtgtacgcgcgcgtggcccccgagcacaagctcaagatcgtcgaatccttgcagcgtcaaggcaacatcgtggccatgaccggcgacggtgtgaacgacgccccggcagtcaagtccgcggacatcggcgtggccatgggcatcaccggcaccgaagtgaccaagcagagcgccaagatgattctggcggacgacaacttctccaccattgtggccgccgtacgcgagggtcgcgtgatcttcgacaacatccgcaagttcctgcgctacctgctgagttccaatgtgggtgaggtgttcaccgtgttcctcggtgtggtgtttgctggcttcctcggcatccgccagccggaaaccgtgggcgtcaccgtgccgctgctcgccacacagttgctgtggatcaacctgctgaccgatgccgcgccggcgttggctatgggcgtggacccgcagaccgacgatgtgatgggtcgtaaaccgcgtaaggtgacggaccgcgtgattgacgcctccatgtggggcgacatcatcttcgtcggcgtcattatggccatcgtcacgctgattggtatggacatgcacctatccggcggcttgttcaccgaccgctcggtggatgccatcggccatgaagcgcagatgaccgaggcccgtacgatgggcttcacgattctggtgtttgcccagctgttcaacgcgctggcctcccgttcgcatctgcagtccgcattcgtgggtctgttctccaacaagtggctatggggcgcgattggtttgtccgtggcgctgcagctcgtggtgatttacgtgccgttccttaacggtccgttcggcaccgtggcattgagcccgatggcttgggtggaatgcatctgcctggccgcaatcgtgctgattgcctccgagctacgcaagattgtgctacgcgcgatagccaagcgttaagccatcgcaatagccctgattgtgggcatatagcagtgggccgggctctggtattcagggcccggcccactgctatatccaaacggctcctcatggggcgctaattatcccatggggcggtaatttcctcatggggcggtcgctgaaaacggcattattccgcgaaaaaggaaaatgcgctaaccgccccatggggaagttaccgccccatgggaaatgggagaacgctgcagacctcagttgtggctgccgtcggggccgtcagtagaggtggacccgtcttgagacttctgctgtgcctgctgcttggccttctgctgtgcctcttggtcggccttccgctgagcctcttcctgagcttgcttggcggcatctgcctgctgcttggcctgcatcgaggcggtgatgtcggactcggccttctgcagtttagaaatcgcattgttgacgtcggattcggacggactggtcccgttcatcaccgtattggcctcggtgatggcgttttgcagcgcggtgcgggtgttttcatcggccacactgcccgcggaattatccagcgtgccctgcgcctgcgaaatagccgagctcaggttcgatttcagtgtgtcggtatcggccgtcgcctttgaagtattaacggccttgatcgcattgttgatggcatccgtcttgtcagccatgtcgctggcgtcattctgcagctctttagtgtgagacttcagctcagtggcgttgaggctggaatcgcacttggcggtgtcggtcggattgtcggcgtcttgcaacgcctgattcagcgtggtgagcgtattggcatcggccacatcactggtggatgtttgcgcgctggtttggccattggatatggcggtggtgagcttcttctgcgcattcgtgtactgcttggccgctaccttgcactcggccagtgccacggcttggctcgccttgctgctgttggaatgccaccagagcaggccagcgacaaccagcgctatcacggcgactactgctacggcaatgccgacgattttgcgggtgttctttttgccgctaccgccgtgacgaggctcggcgccagcggaatcgtcctcatcggagacctgattcaacggaatggagggaggcatcacagcaggctgagcctgtgccgaagcagccagggcggccggttggaacacctgtgtggctgcagcatcatcggcagacgctacttgcgttgccggcatggcaacggtctcaccggatacggtggatgatgcgccgtatgcctgtgtggccgcagctgaattaggctggaatgcctgtgtggccgcggtttcggcattcggcatggcctgagcttcgaaaagctgtgttgccatgacctgatcaggccggaatgcttgtgttgcctcggcatctaccgcaggctgctcggcctgactgggctggaacgcttgtgtcgcggcgtttgaagctgccgaaacaggcgatgtcgccggtgccgctggtgcggctggcgtcaccggcgctgtcggttccaccgggcggaagctttgcgtcgtctgatcccaaacgtattgctgctggccgggcgcagcggcgattggtgtttcggatactactggctgcgtggctgccgccggctgtggtgcttgtgcggcaaccgcagccgggaattgcggcgagaacggttgcgtcatggccggatcgatgggctgtgtgggctgtgcaaactgcgtcggctgtgctgcctgcacagattgcgggaactgcagagccggtgtggcttgcgtcgctggctgcgcgccatatgctgccgtctcttgcccgggaatcggaggaaccgttggcttgaccggcttttcgtgctgctggaagtcgaactggaacccaccatcgctgttggtcatgacatctccttgggattaagcaaatggccggcatccgccggccgaatggtacgtcgcaacgctcagtcgtcgatgtgcgcgcggtagaaattctcgtaggaacggctcggcgtcgggccccgttggccctgataatgcgagccggtgcccttggagccataagggtgctcagcgggcgagctcagctggaagaagcacatctggccgattttcatgccaggccatagtttgaccggcagcgtcgacacattagacaactcaagcgtaatatgcccctcgaaaccggggtcaatgaagcccgcagtcgaatgggtcagaatacccaatcgacccagtgagctcttgccttccaggcgggcggcaatggacgggtccaacttgacgtattcccacgtggaacccagtgcgaactcgccggggtgcaaaatccacggttcgtcgggatccacctcgaactgttcggtgagcgcgccctggttttccgccggatcgacataggtgtaggcgtggttattgaacaaacggaagtaccgatccaatcgcacgtcgatggaagcgggctgcaccatttcgggggtccacggatcaagtgagatatgacctgcggactgtgcggcgagaatgtcgcgatcggacagcagcatgtgaaaaactccttgggcaaataaatactgccttcaagtctagcgccttgggcggaaacgtgagaggctcctcacgcttccgcggtccatcaatcgcaagtattctcaggtttttctcagagaaacttagaggtagacccagaaagcagtggttatataaatgatgtcagcggaaagctgatcaggagccgcagcagttcccgacaattgaaccccctttcttcttctctctcctttctctccccggcgggcaaccgccggggttcttttttgccctgaatcattcccccgaatgaccgccattcccaagccatagcggtacactggctgtgtaatcggcaggaagggggcaccgatggcccgcaacgatgaggactacgatttcttcggcgatggtcagtatgacgattcgcgcagctcacgtcgtgcacagaatcgacgcccatccaggcggaatgccggccggcgattcgccgctacaaaagccagcagcccaacgtcgatattgtgccgcagacttgccgttgtcagcggactgctagccgtcgtggtatcggtcacctcggcggttcatgaaatcgcgccttacgccatttcctttatgacggcagtgccaggacgatacattgcgttgacggcggcggtgcttatcagcatcaccctgattctggtcatcgctgcgcgagtcaccatgcctcggtacgccactcacgggggagtgggcgcgggcggcatcatcgcactggtgtgcgccatagtttgcttggttatcggcgtggccatgggcgtattgttcccggaaggactgattcagcagtcgaacgacaaggcacccgtcgaagataccgcacagatggagcaaggcatagaacaagctgccggcgcgtgcaaagaaggatggcaggggcttgatgcgggcggtttgccaggcatcaccaccgtacagatgtgcactgatccgagagtggccttcgtgtcctttgaatcggaatcgtccgcagccatcagccgggcacctatcgaaagcaagatttccgaactgctgagccaatacgctgataatgagcaaacgaaaggtgattggcgattgctgaacggcaaacgctggatggtgttcggcgagggcagcaagatgaccgcactgcagcagcagtggggcggtgaacttgagacaatcaccgcagccgcagacaccgcagccgcaaacagcggtaatgcctgacagattgccggtatcccctggaaagtcccaaggcgattcggcgcggattacccaatgtgactgaaatcatggtccatcgttttccgcacagcgcgcaagacctctatattggattggtatgagcaaagaagcgaatgccagccagcctctgatcggccgcgaatccaccactgtgcctggacgttttggcgagccactcaccgtggaacacagcgtcacctcgcgcggcggcttcgaccagcatgccacgcatccgctgttcctgtgcctgcatggatggggatccagcgaagaagacatggcggccatcatgcgcctcatcgctccatataacgacttcgtggcattgcgcgggccgctgacacttgcgccggcccgtgaaggcagtcccgaccccggcaactacgcgtggttccacgatgccctgcctatcggcgatgatcgtgactacgacgcgtatgccgccgccacagcagtcgaccgatgggtggccgacaacattcccgccgaccgtgacgtggtgccgcttgggttttcgcaaggtggactggtcgccgtgcatttgttgcgcatcaaccccgagcggtaccgggccgtcgtctccctgtccggcttcaacacacccggtcaggtgcccggcacggcccccgccgactctcgcctggccgattacgatatccccgtgttctatacgtacggcaagaacgatggcgtaatcccgaaatacgaactgttcgccaccgccgcttggctggaagagcatacgtggctgaaaaccaagagctaccacggtctggatcacaatgtgagtcttgaggagttcgccgatttgcgccagtggctacttgacaacgacattacttctggcgtgctgtagtcagccgccatcactggaattggcgcggccgtcgcagcaatcggacatcgagggcgcttgtggctgactcggtcatagactgttctcccatgggcgaagtgagcactgcaagcactactgcacatactgaagagaatcacacggaaatagcaatccccaacttggctcccctcagagaagggagccaaggaaactagatgccggaatcggcatcgacctgcataacgtagatgttgcgcctcagggagcgggcttgggctcggttgatgtcgccggcttcgtacatgtcctgaatcacaccgagttcgataccgtagctctcgcgctttacgtcctcgacctgcgtgatggtttccgtagtgccgctcatattcggacgtgcctgcaatgaagcctcagcgcgacgataatccagcaacagcgccgaacaatgctcggtgttgtacgtatcctggcccatctcgtcaataagccggccgataacatgatgaatcgcctcgacctgcagttcgcgggtgcgcgcgaaaatctgatcctcgctcaccaatggtgtggtatggcgaatcttggacaccgtgcgtttggcgtaattgctcatctgccgctggaacatgcgtaagcgaccgcgaatctgcgataccgcatgccccgaagtcggatcagtggaagtgtgacgcagcgtattcataatctggtcaagcatgcgctcgcaggcttcgacgttcagctcttgcgtggccgtatccgccgccggatgcgccttggtgtcggcaagtcggtcgcgcacgaattccttttcccaatgcagcgcttcgatctgcaattgctcgaatccctgaggatcggtatcgccgatgcgctgctgcaatcgtccgatgcgcttggtgtattggtcgattaccatcagaatcgcacggcgattctctggcgtgatgcgtccggtcaattcctccaccgtggcgcgtaacacatcgatggtcaccggaatcatttccgcgctgggatccttgccacggttcggggccaatagcggtaacaggaagttggccagcagcaaggtcacgataatcacgcctgacgcaatgaaaatcagctcgtcacgcatcgggaacggcgcaccgccggcaatgtaatacgggatggtaaacatcaatgacagcgtgatggttcccttggggccgccaaaggtcatcactgcggccgagcgccagcgttcgggtgtcattttgcggcgctggccggtgattgtatctcgcgcaacgcgcagcatggccgcaatccagaagaatcgaagcgcgattaccaccagagtgaccagcagaataatgccgatcagcacggtattgctgatatacgggtcagaccagctggccctcatggcgcgcggcagctgcatgcccagaagaatgaacaccgcaccgttgagcgagaaactcagcacaccccatactgaagtggaaacgatattcgtacgtgccacattcggccccacgccggtacggtcgaatcggatgaacaggccagcggccaccaccgacagaatgccggacacattgaattcctccgcgcccaaatacagcaggaagggcaggaacagttccatcagaatacgtgtggtggtggtttcccaaccgagggatcgcacggtctcgaatagccagttggccgctgctgctatcaccaggccaaataaggtgccgccaaagaaggagatcacgaattcgccggcggcctgccccacggcgaattcgccagtgaaggcggcggccagagcgaactggaagccgacgatgccggaagcgtcattgaagagtgattcgcctttcagcacgctgcgctgacgctgcgtcagcgaggcttctttacctagggagctgacggccaccgcatcggtcgggccgagtgccgcgccgagtgctaaggctgaggctaaggtgatggacggccagacggcatgcaaagtgaatccgaccgccgccatcgtgacgatagccagtccgatagccagcgataggctcagatccagcgttttcagcaacgccgacttatcgatttcgtgcgcttccagatacagcagcggcgcgataaacagcaccatgaacagttccgggtcgagctttgcatccgggaaaaacggcagatacgtaaccagcacgcccagcacaatctggaccagcggtgtggaaaccttcggtacgaagcgactggcaaacgagctcaccaccaccgccgcaatgatgcataggatgagctcaaataccgccatgttgccgccttctcgtat

SEQ ID NO: 345 - DNA, 8612 bp, Unknown
  R42_10m  MAG No. k141_14143
aaacgccaccgataagcgcggtatgccgcgaatcgtcaagccggtaatcatgcagcatgcggcctgacgattcgctgctgtcgcattgtctctcccctcggccatgctgggcttgttttccgtttgttggagagaacggggaatgccatcagcactacggaaagagaaggattatccgtgaagcggttcgtaggtctagacggtattaaaggactggcgctgatagccattgtgctgtaccactgcatgcagcaactgctgccaggcggattctacggagtcgacgtgttcttcaccgtctctggattcctgattgccgtcagtttgattcgttctctggcgaaaaccggatcgctgaatctcgtgcgatatatccccaagcgtgcagtacgtctctatccggcgctgtttctgctgattccggtcaccgtctccgtcggctggctgctcgatcacgacattctggtttccatccgcgatcaggtcatcaccgtgctgctgggctgctacaactggtacgccattgccggaggccaaagctatttcgaccaaatgaacccgcaggtgtttcgccatctgtggttcattggcgtgctcatgcagttctacgtcatcgtgccgttcatcgtctggctgatgtggaagctccgccagacgaaactgccctcactcatcccactgggactcgcggcgttcagcagtatcgccatgtgggtgatgtacgtgcccaagggcgaccccacccgcgtctacttcggtactgatacccacagcatgggcctgatgctgggtgtggctctcgcctggtgggtcaccgctcctcagttgggccacgctcgtcagggagctgtgccgatgccccgcaccattagatcgagcgcttcggccgccacgtaccgggctccgttacctcagattcctgtaaagcatcgcatctggaatgcgacggcaccggtattggcattcctcagcctgattgccttggtcaccatgacggttatcggcaaacaggatgcattcgccttccgcggcggcatcatattgtccagcctgttgtccgtgctgctgattgccggtaccatctccgacgattcctggatgcaaagcctcatggtgttcaagccattggccgccctcggcaagtattcgtacggcatttacctgtggcactggccgttgtggattctttccagcgcccttgccccgaagatcttcaaggcagcagggccttggcctctcatcatgaccgcgttgctcaccgccattgcggtgatgatttcctggctgatggtggagaaaccggcggcaatgcactcggtgatatccgtcgtggtgccccttcgcacgaacaagaagaatcatgcggcccgggttattgccgttgacgttatcctggcgctgtcgttggtcggctgcgcgcagggcattactcatgcacctgcgaaaaccgccatgcagatccagctggagcaacaggccgcacaactggaacgcatacagaaaaccgaacacgtgctgctgcgccatgccgtgccggcaccgcccaagcccaagcatgagatgcccaccggcgatcagattaccgccataggcgattcggtgatgctggcctcatcacagggcctttcggaagtcttccccggcattcagaccgacgcgagcgtttcccgctccatcatggtcgcccccgaactcatcggcaatgatctgtccgccggcagtctgcggcaatgggtgctgatcggccttggcaccaattcggcaatcacccctgatcagctggaccagattcgtaatatgatcggccccgaccgcgtgctggtactggtcaatgcccacggagaccgtacgtggattccacctaccaaccaggtgcttgccgactatgcggccgcacatccggacaatgtggtgctggtggattggaatgccacagccaacgcgaacgcgcaggtgctcggctccgacggcatccacccgagcatggatagcgatatctatgcaaaggcggtcaaacaggccatcgaacaatggatcgcaagcggcaggtgaacggcaggcaacgctgagttgtccaaccggtcgtgaagaacggctatgctgaagactgcatcaacgagaccacacgttgggagacatggtgagcgcaatccttgaagggaagcccgataagaatcttattctcgttacgggaaggattcatccgaaattggctgaggatgtcgccgagcagctcggcatcgacgtccttgaaaccaccgcatacgatttcgccaacggcgagatgtacgtgcgctacaccgaatcggtgcgtggcgccgatgtgttcgtgctgcaaagccactacaaacccatcaacaaggcgattatggagcagctcatcatgatcgacgcattgaagcgcgcctcggcccgttccattactgcggtctgcccgttgctcggctactcccgtcaggacaagaagcaccgcggccgcgagcccatctcctgccgtctggtgttcgacctgctgaagaccgccggtgccgaccgcatcatgtcggtcgatctgcatgccgcgcagtcccaaggcttcttcgacggcccggtcgatcatctggtggccatgccggtgctggtcgactacatccgtgatcgtttccaaggccatctcgacaacgtcgccgtcgtctcccccgacgccggccgcattcgcgtggccgagcagtgggcgcagcgtctcggcggcggtccgctcgctttcgtgcacaagactcgcgacatcacccgcccgaaccaggcggtcgccaaccgtgtggtcggcgacgtcgccggcaaggactgcgtgcttgtcgatgacctgatcgacaccgccggtaccatcgcgggcgcatgccacgtgctgcaggacgcgggagccaagtcggtgaccgtggtcgccacgcatggcgtgctctccggcccggccatcgagcggctcaagaactgcggtgcgcgcgaggtcgtgctgaccgacaccgtgccgattcccgaggaaaagcgctgggatggcttgaccgtcctgtcgatcgccccgctgctggccagcgccatccgcgccgtattcgaggacggctcggtcgccgaactgttcgacacctaccccgagcaccacggtcaaggcttcctgttcgcctgatcacgtgcgtgtttgttcaaggaaagcacacgatgcgagacgcgacatggcgtagtctttcggtaaataccgacagtatggtataaatgaacacttgtgggccgaaagcccacgactcccccatggtgtaatggcagcacacgggtctttggaaccctttgtcttggttcgagtccaggtgggggaacggctgacggccgctcgacatccgggcggccgtctattgttttgaggtgtttccaccctcaatagacattccaatcgaagggaatacgtcagttatggcattatccgcagccatcgtcctcgccgccggcgagggtacccgcatgcgttccaacaagccgaaggtgctgcatacttttgcaggcaagaccttcctgaacagggtcatggattcggtgaccgccctgaaccccgacacgctggccgtggtcgtgcacttccaggccgagcgcgtcgccgaagccgcccgctcctatgacgagcaggtcaccatcgtgaaccaggacgacattcccggtaccggtcgcgccgtgcagtgcgcaatggcacagctcaccgaggctggcaaggtcgatggcccggtgctgatcgccgcctccgacatgccgctgctcgacagcgagacgctgcaccgcctggtcgaattccacaccgcctccggcaacggcgccaccgtgctcaccaccatcctcgatgacccgaccggctacggccgcatcatccgcgatcgcgaaggcaacgtgctgcgcatcgtcgagcagaaggacgccaaccgcagcgaactcgccgtgcaggaagtgaacacctcggtctacgtgttcgaggcttccgtgcttaccgaggcaatcgccggactgaagtcgaacaacgcgcagggtgagttctatctgaccgacgcgctggaaaccgccaaggccgctggcaaggtcggcgcgttcgccgctccggatccgctcaccgtcgaaggcgtgaacgaccgcgtgcagctggccgcgctgtccaagacctacaaccgccgcgtctgcgagcgctggatgcgcgacggcgtgaccattcttgacccggaaaccacttggatcgaggacgatgtccagatcggccgcgacgccaccatcctgcccggttccttcctgcaaggccacacggtggtcggcgaggacgccatcgtcggcccgtacaccaccctcattgacgcaaccgtggacgaaggtgccgtggtcgagcgttcccgcgtgcaggaatcgcacatcggcgcacgcacgaacatcggcccgtggacctacctgcgcccgggcaacgagttcggcgaggatgccaaggccggcgcgttcgtcgaaatgaagaaggcgcacatcggcaacggcaccaaggtgccgcacctgagctacgtgggcgacgcccagctcggcgaccacaccaacatcggcggcggcaccatcaccgccaactatgacggtgtgcacaagaatcgcaccaccatcggctccggctgccatgtgggcgccggcaacctgttcgtggccccggtcgaggtcggcgacaacgtgaccaccggtgccggctccgtggtgcgccacgccgtgccgagcgacacaatggtctactccgagaacacgcagcacaacgtcgagggctggaagcccgcctgggagcgctgaaccatgcccgcacttcaggattccatcaacgccgtccgcgtggccgccgaggccgcagaccgtatcaaggccaccgacatcgtggccttcgacgtagccgacctgctcggcatcaccgacatcatgatgatcgccggcgcctccaacgagcgtcaggtactggccgtggccgaggaaatcgaaaaggacctgttccttaagtgctccggccgtcagccgcgctctcgcgagggcctgaccgagggccagtgggtgctgcttgactacggtgatttcgtgattcatgtcatgcacgaagaatcgcgcgaattctacgggctcgaacgactctggcgcgactgcccggccatcgatcttgaactcgcacacccggaaacggcggagcatgcggacgctgctgccgtcaccaccgcgtaacgtgcgaatcacataacgctgatattcgctgatactcgctgatattcgtgtgtcgggctgcctgttgccgaacgtcattgacggcaccaggcagccctcccttttccctgtttcctcactggaatcgaaaggatcgtcactatggccaatcatgttcgttccattttccttatccgtcatggacgcacttcctataacgccgctcacaagctccaaggccaggtcgacattccgctggacgccgtgggtgaatggcaggtcaagcagaccgccgcggccttgaaaagcctgtacgtcgatcgtcggccggaaatcaaccaccggttcattgtctgctccgatttgaagcgtgcgcacgccaccgcgcaggctttcgccgacgtattgggtggaatcgagcccgtcgatgatcatcgcgtccgtgaacgcagcttcggcgactgggatggccatgccgtggctgaactggccgaacgctaccctgaggacttccgttcctggatggagtctcggggcggtgaactgaagtatggtgccgaacccaaggaagccgtaggcaaacgcggtgtggaggctcttgaggactggtccacgcgtgccggagacgacacggacctgttcgtgttctcgcacggcgcatggatcgcgcagacattgcagaccctgttgggcatttccgcgatcgatccgaccttctccacggtggtctcattgcgcaatgcgcactgggtgcgcttggtgccgatggacaatcccgatggcactgtgcgctggcgtctgctggactacaatcacggtccggccatcgccgacaccgacgaatgggaacgcgaacgctgatcatgttcccgactcccctgctaatccaataggtccggtgcattcggaaccgttcaagcaataactgaatggctcaatgcctgaataatggcggaaacaagccaaaaagtgtcgccaaatcacacttttgtcatttggcgacacgccggattttgccagaatcgacatctcgtcgtaatgtatacgaggtccgaacaacgggctaacaattgaaaacggggctatagcgcagctggtagcgcatctccatggcatggagagggtcgggggttcgaatccccctagctccacgacgaagccatcaaatcggatgatatggtggtttctccgctggttcgtggcgggtcttgtgactcccatgaatcggatagcttcactcggggctatagcgcagctggtagcgcatctccatggcatggagagggtcgggggttcgaatccccctagctccacaatcaaggccggtgcttcacacaccggcctttttcgttttctatcctatcgggcgacttttgtgcaacattcccgggaatacgtcgcaaaacagggactggaatgcatgcagtgcgatactttccccggaaagtatcgccaaggggacgctcttccgattggcgcgacaccggcgtgagagataacagtaatcgccactacaatgaggtgtggtccctatcgtgttgatcatcaaaggagacaaaaacatcgtgaccgtcacccgtgtatatatcgccagccctgaaggcgccaatggccgcaacgtcgtcgcttacggcgtgctcaacgcattgacttccaagtacaagaccatggtgttccgccctgctgtgtccaaccatgacgaattcaccccgatcctgctcgccgcttccaatgccggactcggcgtggccctgtccaccggcctcgacgtgcataaggtgcgcgccgacaaggacaccgcccgcggagacatcgtcggcgagttcaactacgccatggaggtctcccgcgcgaacgccgccctgatcgtcggcaccgacaaatcccacgtcaacgacccgaccacctacgagttcaacgcggacgtcgccgccgatctgaaggccggggtgttcctggccgtgtgcaccatggaccgatggccgcacgagctcgacgagaccgtcaagctgtccatcgagggcatgcgcgccgcgggcaatacggtgctcggcatcttcgtgaccggctgcgagccgcgtcacgccttctccgtcaaggagaccctcgccaaatacggcctgccggtctggactttgccgcaggtgcccttcaccgacgaatctaccaaggacctggcccttgagaccttccgcaagcacgctcccatcgacgaggtgctcgccgcgctcgatgtggacgtcaccgcgccggtcacgccgtacgccttccaattcgacctgctcggcaaggccaagagcaacaagaagaccatcgtgctgcccgaaggcgaggaggaccgcatcatcaaggcggccgattacctgctcgaacgtgagaccgtgaacctcatcatcgtgggcgacaaggacgccatcctggcccgcggcagggaactggggctgaacagtctggggcgcgcccgattccaggccatggacgacgagaacgtgttgaagcccatggtcgccaaactgtgcgagttgcgcgccaagaagggcatgaccgaggagcaggcccgcaagcaactgaccgacgccagctacttcggcaccatgctggtggtgctcggctatgccgacggactggtttcgggttccgtgcattccaccgccaacaccgtgcgccccgccctgcaggtcatcaagaccaagccgggccagaaactggtctcgggcgcgttcctcatgtgcttcaaggaccatgtggccgtgttcgccgactgcgccatcaacctcaacccggacgccgagcagctttccgaaatcgcgttgcagtccgccgagaccgcacgtgccttcggcatcgacccgaaggtcggtatgctctcctactccaccctcggctccggcaagggcccggacgtggacgtggtcgaggaagccaccaagctgctcaaggagaaggctccggatctgccggtggtcggttccatccagttcgacgccgcctggtcccccaccgtggccgccaccaaggccaagggcaacgatgtggccggacacgtcaacgtgttcgtcttcccggacctgtgcgccggcaacatcggctacaaagccgtgcagcgctcctccggcgccttggccatcggcccggtgctgcagggtctcaacaggccggtaaacgacctgtcccgtggtgcgatggtgcaggacatcatcaacaccatcgccctcaccgccatcgaagcgcagtgagcccggcttagctcccgccagcgggagccactgtaatgcttattttgtagcaagcaacgagtaatctaatcaacggtaacccgtgtctcacgggaacattcaatcacaatggaggatgcccacaatggcgaaaaccgtccttgtcatcaattccgg

SEQ ID NO: 346 - DNA, 7345 bp, Unknown
  R42_10m  MAG No. k141_14159
actgatcgaacgcgcgtgttccgcctacacgcaagcaatccgagatggacataccgatccattgcttgccatcgccatgttcattctcgatttcacctgcatacatccgttcaatgacggcaacggccgcatgagtcggctactcacgctcctgatgctgtaccgcaatggctatatggtcggcaaatacatcagtatcgaacaccttatcgagcaaagtaaaagcacttattatgaggcgctggccgcaagcacccaaggatgggacgacaacgccaatgattatgcgccattcacgaactacctgcttggcatcatactgtccgcgtgcaaggaattcgacgaacgcatcaatctcacggcaggcggcagagcgcagggagcaccgcgagtagccaccaagggaatgcggattgaagcactgcttgatcaatccctagtgccactctccaaggccgatattctcgctcgcatgcccgataccagcaccaccaccattgagcgcacgctgaaatcactgttggactccggtacgatcatcaaaatcggtgccggtcgcagcacccgctatgtgaaacgccgctaaacgcatccttgtgcgcaacatctcgtcactcttccggcgctccgctggccacgcgaatcatcgcgtactgggactcgtagaggcggtagtacgcgcccttggcggcgagcagctgcgcgtgcgagccgtgctcgacgatctggccgtgatcgatgtagaagatctcgtccgcgttctcgatcgtcgacaggcggtgcgcgatgatgaagctcgtgcgccccttgagcagatgctgcaggccggcctgcatcgcctcctcggtgcgcgtgtcgatgttgctcgtcgcctcgtccaggatcaggatacgcgggtcggcgagcagcacgcgcgcgaaggcgatgagctggcgctggccggccgacagggtcgatccgcgctcctccaccaccgtgtcgtacccgtcgggcagttccatgatgaactcgtgcgcgtgcacggccttcgccgccgcctcgatttcctcgtcggtggcgtcgagcttgccgtagcggatgttctcgcgcacgttgccggagaagatgaaggtgtcctgtagcatcacgcccatctgccggcgcagcgatgcgagcgtcacgtcgcgcacgtcgtggccgtcgatcgtcaccgagccctcggacacgtcgtagaagcgcgacagcaggttgatgatcgtcgtcttgccggcgcccgtcgggccgaccagcgcgatcgtgcgccccggttcgacgtggaagtccacgaggttgaggatgttacggccgtccttctcgtagcggaacaccacgtcgttgaagtcgacgcgcccgcgaatctgcggcaggtccgccgcgtcgggcttgttgcggatctccggcgtgacgtcgagcgtctcgaagatgcgctcgaggtacgccgagcaggtgatgagctggttgtagaagttgccgatgttgatcaccggattccagaagttgttcgcgtagccgacaaacgcgatgagcacgccggtggtcacgttcacgcccccgaagcccatcacgccgacgaagtagatgaacgagatggtcatcacggagatggtctgcacgcccggccacatgaggaactggatgtgcacggcgtgcatccacgcggaacgcacctcgccctgctgctcctggaaggtcctgaactgggcctgctcctgcgcgaaggtctgcgtggtcttcacgccggcgatcgactcgtggatgtaggcgttcaggttgctctgcttgttggagagcttctggaaggcgcgccgctggaagatctgcagcacgcgcacccagatgatgagcaccgggaacaggatcaagctccacagggccagctgccagtcgatcacgaacatcacgatcagagtgatcacgaaggtgaacacgtcggagatcacgttgatcagaccggagctcagcgtgtccgaaagcgtgttcacatagttgaccacgcggatcaggatcttgccgtgcgggcgcgaatcgaagtagctgaagggcagcgtctggatatgcgtgaagatatcgcggcgcatgtccttgagcatgagctggccgacgcgcgtgatcgccaccgtgcggtagcgcagcccgaactcgtacagcacgatcagcgcggcgaggattacggcgaggatgccgagcttgccgaggtccttgttcgggatcgcctcgtcgatcatgatcttggtcaggtacggcacggcgacgacgatgcagctcatcgagatgacgacgacgagaatgcgcgccacctgtgccatatacggtttgatatatttgccgacgcgagcgatgtcgtggaggttgatggactcctccagctcctcatcctcgcggaatgtattgcgttgtgccataagtcctcttctaaaacccctgtgcggcgccggactggagtccgagctgcttgtggtagatgtcccagtagcggccgtgtgcggccacgagttcggcgtgggtgccgcgttcgacgatacgtccgtgctcgagcaccagaatcaggtcggaatccttgaccgacgagatgcggtgggcgatggcgacgatggtcttgccgccgtccatctccttgaggtgcttctggatctccgcctcggtctccatatcgacggccgaggtcgtatcgtccataatcaggatcgacggattgtccgcgagcgcgcgggccagcgacaggcgctgcttctgcccgccggacaggcccacgccgcgttcgcccacgacggtgtcataaccctgcggcatcgacctgatgaaattgtccgcgccggcgatctgggccattttctggatatatcggtcgtcgctatcatcgctggcaccaaaaccgatgttgccgccgatggtgtcggagaacaggaacgtatcctgcgccacgatgcacacctgcgagcgcaaggtggtcagcggccagtcgcgtgcgtcgatgccgtcgatgagcacatggcccacggtcgggtcgtagaagcgggagataaggctgacgagcgtggacttgcccgcgccggtttcgccgaggatgccgagcttggagccggcgggcacggtgaagtcgaggtccttgaggatcggggtctccgggtcgtccgggaaggcgaagctgacgtggtcgaagcggatgtcgcccttgatgtgcagcgggcaggacttgcgttcggcggactgctgggcaccggatgttccggaagccccgggcgctccggtagcctcatcatcgtgcttgacctgctcgacgatcgtgaccgcctgcttgacggcttcggccgcgtcgggcttctccacgatgcgcggctgttcggtgagcagcttacgaatcttgatgcagctggcgttgaatcgctgccagtcgttgatgagccagccggactggcgcaccgggccgtcgatcatccacaggaaggagttgaaactcaccagattgccgagggtcatgtagcccttgatgacaagaaagccgccgaggccgagcgtgatgagctgcagcgagaagccgaggccgtccagccaaggcatgtacttgcgcgagttgtaggccagggccatgttgcgatgcatgtaatcgtcgttgtgctcgtcgaacttttcggtctcgtacggttcgcgcacgaatgccttgaccacacggttgccctcgatgttctcttcgaccatggagttgagggaggccagcgagttgcggatggagaagaacagcgggtgagcgtgcgtggacaggccgcgcgtgagcacaaaaatgaacggcgtgacgcaggccaggacgagcgcgagtcgccagtcgatggcgaacatcacgcacagggcgcccacgaacatgaccacgcagtcggcgatctgatagctcacccaactcaggcagtggcggatcgcgtcggtgtcggaggtcaggcggctcatgatgtcgccggtgcgtgtgtggttgaagtacgtgaagtcgagctcgtgcagcttctcgtattcgtcggagacgaggcggtagaccgagttctggccgaaacgctccatccacatctggtagccgtatcgcgcgcccacgcggatgatggtcatgaggatcatcagtccgcacagacgtggcagttcgtcggcatgtccgccgacgatgacgcggtccacgatgataccggacagaatcggaatggtcagggccatcgtgttgttggcgatgaacagtaggagcgcgcctgccacgcggggcaggtctggtttgcagtatggcagcacccatttgagattgcttgcgctggtatcgattcccggatcgacgtacatgtgaggagatcaccgtttcttggggattgtttgcttgtggtatggtgcggcatgctcctgcgccgcacgcggcaatcgctgccgccgcgattcacgatcagccgtgcttcgcactgcgcctgtcattggccgcatgaccggagctctccttcatcggtcgaagcacgttcgactttcgcaaacgcgtattagtctagacggcctgcgtccaatcgcaacagcccacaactctgcgtgttccccgccttagcaacgcggcacggcccgctaagcgcaacattccccggaatgtgtcgctgcgcccccaaacaggcccaattcgcgacacattccccggaatgtgtcgcgcgaaacgttgcgcatgcggcaatgcacgctcgagacctgttgcataccagtcgaccaaattatagaatcataattaagtaaattacgattctataatttgcgcgtgtgtgccagggcagacagcaaagcaaggagacaagggccatgttcgtcgggcgagataaggagctttcggcactggaacgccgctggagctcacagcagttcgagtgcgtcgtggtctacggccgtcgccgcgtgggcaagaccacactcatcaaccgcttcctcgaagatcgccccacgattttcttttcggcaatcgaatccagcgcttccaagaatctcgaatcgttaagccgcagcattgctctgtatgaaaagggctcagaggcgttcgagacaacgcccgtataccgcagctttgaatccgcactggaagcggtgttcgcgctggccgcaaagcaacgcatcgccttcgtcatcgacgagtacccatatctggctaaagcagaccggaccatcaattcggtcctgcagcatgccatcgaccgccataaggatgacagccagctcatgatggtgttatgcggctcttccatgtcgttcatggagcgccaggtgcttgggtatgagagccccctgtacggcagacgcaccgctcaaatcaaagtggagccattcggctacgccgatgtccgcaagttcttgccaagatacagcaacgaggacgccgccactgcttacggacttaccgacggtatcccgcagtatcttcggcaactggacgacggcatcagcatccgagacaacatccgttggaacatcctcgacccaagctgctatctgtttgaggagccagacaacttgctgaagcaggagctgcgcagtccggccgagtacaacgccgtaatccagaccattgcctccggggcatctcggtcgaacaccatcgccaccgcatgccatatggaatcgtcctcatgcgccacctatttgcgcaatctcatcgatctgggaatcgttcgcaaggagacacctttcggcgaggacgctcctcgcaagacgatctaccgtatcgaggactcgttcttccgattctggtaccgatatgtgccgaacaacatgtccctcattcaatccggtcatgccgatctcgccgccgaccgtgttatgcgcactatctccgactttatggggcaggtgttcgaagacatctgcgttcagtggatatggtcccataacggtaccgaggcattgcctttcctcatgcttgatgccggacgttggtggggcgccaatccgaccacccgcagtcaggaggaaattgacatcgtggcttcaggagaaaaaccgaaaactctcctattctgcgaatgcaaatggcgcagcgtgccatccggtctgcagcagttggaagtgctgcgcaatcgcgccagactgctgcaccccgaaaccagccattacatgctgttctccaaatcaggcttcgacgagcatgtcgccgcccgcgcggcgcaagacggtacagtgacgcttgtcgattttgcggatatggattagtcggttcactccattgcggacggtaagggtgaagtaacaggctgggtcaatggaccgaaccgctagaccgggcaacagacccaatccgtgacacattcccgggaaagtggcgcatgtcatatcacgctcaaacaacccagcatgtatatgggcaggtattcggctcgtccaacagtctccgcgttgccatcatggaacacgtaggcatgtcctcacacgcttgtatctcgtcaagaaacagcagagtcttgcccggcgtaatttccgcgccggaaagtaccgataaccgcagtatcaggtcttcggtgtccttggccttgcttaccgtttcgaccgcctgaggcatttcgatgaaattcacctcagccacatgctcataatggtctgcaccgaactgcccaatcagcgtggtcttgcccacctgccgggcacccgtgaccaataagccctacttggttttacggttcttccaattcagcaactggccgaaccatatctcgcggcttcagtcatcctttatcatcagtattcggtagcggccctaaatcagctccgccatccggctcataatcactcgccaaccacgggcggaagtagctcccgactatccacagtgggacattggtcagccaatcctgctccttgtaattccgcatcgacgtacggtaaccgcaaatcccgtatttgtcgcacagccacttcaagctacgcttatgacgctcggtaccagcttcggcctccaacggaatgattgcgccattacctgcaaagacaaaatcaacttctcccgtactgttcgcattcgaccagtacatcggtgtgatgccggcggccactaattgctggcaaacatactgttccgttaacgcaccacggaattcggtcagcccgtcatcaccaaggatcacgcttgcgggagtcagatccagggccgctgccagcagcccaacatcatggagatacagtttgaacgcggaatcatcacggtatgacggcaatggtgccgcaggtttttcgacgcgatacacccgcaacgcaagaccagaatcgacaatctgctgaatcgcggattcatattgcgccgcccgagcgccacgagcgatgtggccaaaaataaatttat

SEQ ID NO: 347 - DNA, 4136 bp, Unknown
  R42_10m  MAG No. k141_15597
cgctatcgctgccgttccgcggatttccgccgactcggatacgtgtcgcagccacgcctgccagcaggtacatgaccgcagccaacaggaacggcaaccacggggcgatgccgtacagcaggccgccgactgggctgccggccatgttgatggtcgcgtcacggccttcgttgagactgcgcgctttcggatatgagcgaatatcgacgatggatttgagcatcgcatccgaggcggggccgagaaacccgttgaccgcagactcgaacaccgcgatggcaagcagcacggggaagaccagcttgccggccatgagcagcgcagcgactgacccccaacagatgacgcccgctgtcgcgttcacgatgatcagtgtcttgcgatcgtgacggtcggcgaatgtcccgccgaacacggcggccgcctgctgtgcgatcgcggccagcgagcccaaccaacccgctgctgtggtcgatccggtgagcttgtatccgatcagagagaccgccagataccgcagggccacgccgatggccgtcgcgctgtccgccgtgaaccatggcacgtaacctgggatatcccacaacctgctttcgcgcacaggagcagaaacgagctttaacgaattactcatctaataatttatccttaccctaccagtactggaatcctacagaagattaggcggcactggttctttacaaacttgctcagtatgccaagcataatcatatatatatcgaagtaacccttttctccataatgagcaggacagcaatgacatcgataatcttcaacctgttccgctaccaacgatcccaatgttgaacataatcgatagctaagcttaccggactcatggtgcagcaatagcttgcctttgattgccaagtgtgaagaaatatagtcatatttattgttcggataatagaattcaggcaaacttaccgaattaccaaaatagcctggattaacaatgaacgctatatctttcttatcacatgagtagttaatcatccttgcgacttcggtggtgcttggaacgtctgccgcttgaattactaagttgattttctctcggtcaattaattcatcaagttcactatgacaagttatcattttatcaatgctatctatagaaagacatcttgacgccctggatttcagcacatcaacctttttcttcccaatgtctgttcgcacgtaatcctgacggtaaatgttgtctacagtgacaacatcatgatcgaccaaagtaatatgttccaaagcaagcattgaaatgtgccgataaatatgacttccaatagacccgcatccgagcagcaggcatctaatttgtcgcggctcagcgtgttcgacacgcaatacgtccaaactgacaagtttgtcaatagccgctggggccggtaacgttttgttggactcgtggcataatcaaaccatagaaacaaagaaatccaataaagcgacaccgtatccaagtgcccacctctatttgacggaatgcaccatattccggcaccgacgaacatcaggatcgagccccatcaccaatcggcaccaagccgcccatatcccatgattagctaaagatatctctgaatcacagcgttcagaaaggaggcgccatggaaaagccactgcttctgctggccttggtgccgctggccgtcggattggtcctgatatccgtcgtgatcggatccaaaaaccgggaagagaacgcaaaaggactcttttgcgttctcttctcagcgctcatggtcgttgccggcgcgttggccatcgcgagacaactcgtatgacgcttcacgctgcggcatgttgtcccggctattgcccacgcccattcccagctctccgcgccattcccgcaatcacgtctcttccccggtctcaagcccatgagacacttggagccatgactaccatcatcatgcgcacctctgagggcgatatcaccatcaacctgttcgacgacaaggccccgaacaccgtggccaacttcctgggcctcgccaccggcgagaaggaatgggcggacccgtacaccggccagccttcccatggcaagttctacaacggcctgaccttccaccgtatcatcaagcagttcatgattcagggcggttgcccgctgggcaccggtaccggcggccctggctacgagttcgacgatgagatcgacccgagcctgaagttcgacaagccatacctgctggctatggccaacgccggtctgcgtcgcggcatggacggcaaggtccatggcaccaatggctcccagttcttcatcaccaccgtgccgaccccgtggctggacggtcaccacaccatcttcggcgaggtcgccgatgacgactccaagaaggtcgtcgataagctcgaagcactggacaccgatccgatggatcgcccgctcgagccggccgtaattctgtccgtgaacgtggccgagtaagaccgacacatatacagcaaaggtcctgattggtattccagtcaggaccttttcgtattcttggctccctctctgaggggagctggcgccgcagacgtctgagaggagttccgcaagcccgcgctgctccactcagtcagcttcgctgacagcccctcccggaggggagccaagcaacggcctacttcatcttgcgcagtcgaggttcggcggattccttggcaccggtgatgcggtacacgtcgaacacgccatcaatcttgcgcacggctgccagcaacgagttgagatgctgcggatcggccatttcgaagctgaactggctggtggccacgcgatcggaaccggtggcgatcgtaccggaaatgatgttcacgccatggtcggaaagcacacgtgtcacatccgacagcaggttgcggcgatccaatgcctcgacctgaatcttgaccatgaacagacccttggtgctggtccattcgacttcgaccacacgctcaggctgcttgtttttcagatcgatcatgttctggcagtcggtgcggtgcacggatacgccctgattacgggtgatgaagccgatgatattgtcaccgggcaccggcatgcagcaacgggccagcttgatccacacatcgcccacgcccttgacggacacgccggtggagctgctggaggccttgcgttccacgggcttcagcggcaggacttcctgctcgacttcctcatcgacctcgtcggcacccgcatccttgaccagatgcgagatgacgttctgcgtggagacctgtccgtcgccaatggcggcgaacacggcgtccgcgttcgggaagttaaggtcgtcggccacacccaccaacgcttccggggtcaacagcgtgttgaccggcagattgcgcttgcgcatcgcgcgggtcagttcgtcgcggccctcctcgatggcttcggtacgacgctccttggagaaccattgacgaatcttgttgcgcgccttcggactcttgacgaaactcagccagtcgcgcgaaggcccggccgtatcggacttggatgtcagaatctcgacggtgtccccattatcgagcgtggtgtcgagcggcaccagacgtccgttgacacgtgcgcccatcgtacggtggcccacttcggtgtgcacggcatacgcgaagtcgacgggcgtggcatgagcgggcagggatacgatcttgcctttcggcgtgaacacgtagacttcggacgagccgagatcctccttgagcgaacccagaaactcgttggaatcaggggtttcgctggtccaatcggcaagctgctgaatccatttgagattgtcggcttcggaaagctcctggttcttctcgtcacgcctgcggtcggacttgtccggcgagctcagggcgcggccggcctggccgttttccttgtatttccagtgcgcggcgatgccgaactcggcgcggcggtgcatgtcccaggtgcgaatctggatttcgaccggcttgccaccggggcccaccaccgtggtatgcagcgactggtacatgttgagcttcggcatggcgatgtaatccttgaaccggccgggaaccgggttccaccgcgcatgcacggcaccaagcgccgcatagcagtcctgaatggtgtcgacgatgatgcgcacaccgaccaaatc

SEQ ID NO: 348 - DNA, 23604 bp, Unknown
  R42_10m  MAG No. k141_16203
gcccgcggcgacgccggagacggtgcacaggatgaggtagatgaatcctgcctgttggctttgcgagagctcttccttgtccaccttcttgcgcagcgacttgagcgccagcacctgggtgacggacagcgcgtccacgtatggggagcggatgcggatggcctggccgagcacgtggcggtgctgcaacggccacttgtcgcccacgatggccagaacccacttgcgggtgagctccatctcgttgagcaccttctcattgaggtcctcgcggtcgccgagggcgaggtacatcctggcgatgcgctcatccgtcttggcgatggacatctcgatgttgtcgatgaaggtggagaacagcggccattcctcgtaagcctgacgcatggtctccagatcgccgaacttctcgcatgcagtgccgagaccgtaccaagcggccaggttgatgcgggcctgggcccaggagaagatccacggaatcgtgcgcaggtcgtcgagcgacttggcgccgaggccacgcttggccgggcgggagccgatcggcagcaggccgatttcggtcagcggcgtaacgatcgagaaccacggggcaaagccgtcggtgttcaacaggtcgaggaagcggttgtgcgcggcctcgtcgagctgagcggccatgtcggcgtacttctcggtcatctcggtgttgcgcttctccacgctcggcgcggactgcagcaaggtcgccgcagccacggactcgacgtggcggatggccagcaccgggttgccgtaacgggcgaagatgacctcgccctgctcggtgagcttgaagcggcacttgacggaaccgaccggctgggcgagcaccgcgcggttggcggggccgccaccacgaccgacggcaccgccgcggccatggaacagggtcaggtcgatgtcgtgcgactcagcccatttggcgatgcgctcctgagcggagtgcagggccagcgtggcggaggtcgggccggcgtccttcgaggagtcggagtaaccgagcatgacctcgagcttgttgccggtggccttcagacgagcctgaacctcggggatcttgatcatttcctcgagcacgtccaccgagttctgcagatcctcaagctgctcgaacagcgggatcacgtcgatggtgggcacgtcctccgggtgggagaaggccaagcggttgagctcgtagacatccttgatgttctgggcgctcttggtgaaggagatgatgtagcggcgggcggccttgaggccgttgcgcttctggatggcaccgagggcgcggaaggtgtcgagcacctcgtgcgtcatcggctgcagttcgccgcgctcgccgtgcagaccgtgctcgcggatatccgcaagggcgcgggcgtgcaccacggagtgctgacggaactccatctccaccatgtggaagccgaaggtctcggtctgccagatcagatcctgcagcgggccgtaagcggaacgcttggcgccggcggcggccagcgaacgctggaccaccttgaggtcggcgaggaagtcgtcgcaggagtggtacatgaggtcggcatcgcgctcgatggtgtagtgcagacgatcggccatcaccagcatgaccgcgcggtgcatctccttggtggagatcagggcggccttgtcggtcagacgctcgctcatttccttctggtggctccagaggctcttgagctcggcgctcggcggcgtggtctcggcttccatcgtgaggttgcggcccacggtgcgggtggcttcctcaagggcggcgatcacgtgatcggagaacttgcgggccacggcgcggctcaccttggcggtgacgttcgggttaccgtcgcggtcggagccgatccagctgcccgggtggaagaacgcggggcaagcgggctcgacgagaccggccttatcgcccaggacccagtcgtcgaagcgacggtagaccttggggatggtgttgaacagcgtgttgtcgaagatgtcgagaatcgtgtccgcttcctcaaccggggtcggcttcttcagcgcgatcggagaggtgcggaacagggcgtcgatctcgttgtagagacggcgcaggcattccttcttatccgagccgccgaggcgcttgtactcctcaagcaattcggaaacgcggcggatcttgccttccacggccttacgacgggcctcagtggggtgcgccgtgaagacggggtggaattcgagctggttgagcagttccttggccttggccgggccagtctcattgatgagctggtggtaggcgacggtgagctcgttgatcgggtcgaccgcctggtcaacggacacgttgttctcgcgctcgtggagcacggaaacacggtagttctcctcggacaggtttgccagatggaaatacgtggcgaatgcgcgggccagcagctgggcgtcgtgcagcgtcatgttgtcgatgacgttcacggcctccttcaggccatcctggtcggggttcggatccttcagctcggcgaaatgctcggcgctggcctccaccgcgtaatgacgcacggtgtcgaacgtagacagcagttcggggttgtattcgcccagtacgttacgcaggatctcaagacacagatccatgtcgtacttcaggctttcgggaagatcatgctcctccgggccctttcggccggtcccggtagtgacgatggcggcgtcagcgggagtgatctgttcttcaggtgttgccatataacctcctttgccgaataacaggttgctcggtctaccggtcgtctgcggctcctccgcagttgttgaggccagtcgttgcgagcccacagcccatattcaacgtggttgttgtgtgggcaatagtgtatccccgcgaaatcgctatttgcgttacggagtccatatagtgcgccaagttgtccacctatagagaccgaatatcggacagcatatgagacactgtccgattcgcggaagatttgagcaccttacgattgctggcgggggaggcagggagtagtaatgagggatgtgagcgaacagaagaaaaaaagtgcgcccgaagcgaaaggcgcaacggctgtacgtaaattccacacccactccattccgctggacatggaagatattgcgcgcgattgggaaaaaccggtggtggacgccggtatcgccgccaaagccagcgtgattgtacgggtcggcatgctggacctgggagccggcaccggctccttccgcgtgcgtgaaatgatgcaccgcatcgcctacccgctgggcgtgcacgtacgcgccgacgtgaacctgacggatatcgaggccacctgcacggatggtcgtaaccgcatcaccgaagtcgtggatttgccgaccaccggcgtgaacaccgaacgtatctggctgctggaacatttcgccgactggttctccgtgaatctcggcaaggggtcgatgtatcacgtcgattcgcaactgtccgatggcgtggtcaagcatttggacgaacgtgacgcttcgcagtattcggccgatctggccaagcgcctgcgcgaacgtgccaaggccgaggctgaggcggccaacggcagcgtggacgagacgctggatcttgcgttgaaaaccaaggtactcgtgacctccgtggccaagtccttggatgatgacaatggagaagcccaccgacttttggcggacagcgcggaaatcactccggtcgaagacaaagcggccgaagagaaggcctacgacgatgccgaagtgtttaccggtgactccaatgagtcggttgaatcggcgaacgcagcgaatgccgaggcgggcgctgagggcgcggcggcgaacggcgcaaccgccgaaagccctgctgcaagcagtacgaagcgcaagaatcgcgtgcccaaggaatacgccgaacacttcaacgagcgctccgacgaagagaaggccaagggcggtatcaccgtgcggcaggcgcacgagcgactcgatctgattgagcgccgcaagccgctgtacaagccgtggttctccggtctggcctccgccctggcctgcgcggccttcgtgttcctgctcggcggcggcccatacgacatgatcggtgcgttcgtgggcgcgggccttggccagtggatgcgtcgccggctgtttgcataccatctgaaccagttcttcgtcacctttgtgtgcgtggccgcggcggcgctcgcctgcaccggcaccttgcgactcatcggcattttcgacccagtcgcgctctcgcacgatacggcctacattggcgccatgctgttcgtgatccccggtttcccgctcatcaccggcggactcgacatggcgaaaatcgacttcccctcgggcatccagcgcgtggcgtacgtgctgtgcatcatcctgatggccacgctggcaggctgggccgtggccgtgatggtgcacctgcacccggaaggctttgaaccgctggggcttgacccgtgggtcaacggattgctgcggttcgtggcggcgttcgtcggcgtgtggggcttctccgtgctgttcaattcgccgcagcgcatgtgcctggccgccgccctgatcggtgcgatcacggacacgctgcgcttggaattgcaagacttcaacgtggcacccgagatggctaccttcatcggcgcgtttctggcgggcattctggcatcggcgtggcgttcatccgtgcgacgtggctggctgccgccgcacctcggctacccgcgcatctgcctgaccgtgccgtcgatcgtgatcatggtgcccggtctgtatatgtaccgtgccatgtggtacctcggcagcttccagaccatgaatgcgctggactgggcgttccgtgcgttcatggtgattatctgtctgccgatcggcttggcgatggcccgcgtggtgaccgacaagtcctggcgctacgacatctgaccgtcatcttggctcccctcaggtggggagctcggataaaacagcgtctcagtatggaaacggtggaaggtgcttgagcccttgtatccactaccatcaggcgaagtgcgttgcggccgtattcacggctgtgacggtctgtatgacgccgctccggcgtcaatcgcatatcagcacgcatatcagcacatagttctgccatggcggtagccgcttggcgtcatgattggggaggtgtcgcagttggccaacgatttctggattctgctggccatggtcatctattttgcggccatgctgtccatcggattcatctactccaaacgctccaactcctcttccaaggaatactttgcgggcgggcgcggcgtggggccgtggctcacggccctgagcgccgaagcctccgacatgagcggctggctgctgatgggcttgccgggcctggcctacttcaccggcgcggccgacccgatgtggaccgccatcggcctggcgctcggcacctatctcaactggaagcttgtggcccggcgactgcgccgctactcggtagtggccggcgatgccatcaccattcctgacttcttcgccaagcgtttccatgacaagaagggcgtgatctccaccatcgcggccgtgatcatcctggtgttcttcagcgtgtacgtgggcagctgcttcgtgaccgtgggcaagctgttcgccacgttgttcggtttcgactaccacgtcatgatgatcatcggcgcggtggtcgtgttcgtctacaccgtggtgggcggctacttgtccgtggtgatgaccgacttcattcagggcatgctcatgttcttcgcgctcgcggtggtgttcatcggcaccgtggccagcgcgggcggcgtcgacaacaccgtggaattcctgcgtgccatccccggctacctgtccggcacgcaggtggccgcgcccaagctggacccggccaccggccagcagctcgtcgaggcgggcaaggccgtgttcggcgcgccctccgactacggcatcatcaccatcatttccatgctggcgtggggcctgggttacttcggtatgccgcaggtgctggtgcgcttcctgtccatccgcagcgtggaagaagtgcgcaagtcccgaatcatcgccacctcctggtgcgtgatttcgctgggttgcgcagtgtgcatcggcttggtgggacgtgcgatgatgcccaccgaactgctgacctccaccgatgcggagaccatcttcatcgtgctggcgcagaccctgctgccgagcttcatgtgcggcgtggtggtctccggcattttcgcggcctcgatgagctccagctcctcgtatctgatcatcggcgcttcggccatgggcgagaacatcttccgcgggctgctgcaccgcaaggccaccgacaagcaggtcatgatcgtggccagggtcacgctggtggtcatgttcctgttcggcattctggtggcatacgaccagaactcgtcgatcttccaggtggtgtcctacgcgtgggccgggcttggcgcctcattcggcccgttgatgctgtgctcgctatactggcgtcgcgccaacaaggccggcgccgtggccggcatgctgtccggcacggcggccgtgctgatctggcacaacctcgtcaagcccttgggtggcgtattcgccatctatgagctgctgccggcgttcatcatttcgctgctgttcatcgtggtggtttcgttgctgaccgccaagccgaacgagcgtatgctctacgaattcgaccactacatggacgatccgctgcccggcaccctgccgtccggcaccgtgctcgtcgacgagcccatggaagccatggagtccgaggtccgcagcggcaaatgacacgtgcctgctgtgcggtcggctcgtatggtagaggagtggcttttttgtggttcggcaggaaccattgaggccaaaacggacttcgaggggctgatttgacgttctggagaggtctacttccgtttcaaggggctgatgcctgagtagacgcggctccaaaacggcggaatggcgttggcgtaagggcattgatacacgtgatctagcggatgatcagccccttgaaacggaagtagacctccggcggaggccaaatcagccccttgaaatgggttttgaataccgtagcgcggtgcggacggtgcggactgactctaccgggcttattattcctgcgtcgtcggaataattggcagcagaggctcgaatttcagccgtttgtacagcggaatacggcgtagctttcggacatcgctaatttgctgggtggtttgccgcatcgtgagctggaccgttttgcccgtaacctcctgtatcctctcggcaactcttcgggcaagggcctcttctcccgcttcgtcgccaatatctaatttggtgacttgaatgtacttccagccagcgtcttcgatcatctggcggcgtctcgcgtcattcagccattgcccggcatgatgagagccttcgtattcgatgcataccttgaattcagggtatgcaagatcgagatatatgggtctggtgttgtttcctacgaatattggataattcacctgcgggcaatccagaccgtatttcaagagaaccaaacgagttcgtgtttccatggaggaatctgtgcccgcgcgcgccaaaagcagggcgcgacggcatttgttatacccgcggaacaaatacgaattggtgccattctctttgtcggctcgcacctgggcctcggcctcatcgagatacagagaaagggcgtcgatggttgttctgcagagccttcgatctcgtcgcatcatggaatcagcgagaacgatgagttcttcaagttcgagatacgcggagaacatggcccatgtgcaagctggtgaagtgcatgtgaattgtccctcgattatgaccgtgtctagtgggaaaggccatacaaccactttgacccccacaatgtgccgtttgtcattggcgtgtggaaccgcaacaatggttgtagttgcaaggcctctgtgtttgcttgatatgcggggtacttcaattgacaaaagctccaatgctgttgtcagggcatagggtgggtgccatgcgcttcgtcgttgaacatctgcgcacgtctgcattcgttgatacttctgcattgtcagctcggtcaatgccgttgagctacccatgatgatcaccccttcgtgatgttcgctttgtcctcgcagtgtagggtccggctaccggccttgtctaccgccccaatttttcggtggataaatgtggataagtcggtggataaactatgggtgttcatcgcagttgcaggccatcccgcaattacatggaacgtaggggtttgcaggcagccagcgggaatcgccgccgacggcgcgattcagcttgaacgaatctccatggcgttcatgcaaaggtggcatgatggcgggtatgagtagcttggtgcgtattgtcaatgccggtgttccggggtctcaggatcgcgtggatgtggtgcttcgcgatggggttgttgcgtctgtcggccctgctggaacggtctcggcttcggacggcacgatgcagactaaggcgcatacgacatcgttggcatacgcgacgaatgccattgcttctggcagcgtctcaatcccaacgtcggccgccgcacccaccgacgaaaccaccatcgacgccgacggcctgtgggttattcccggcctgtgggactgccatacgcacttcacgcaatgggctaagacgctgggccgactggacctcatcaatgcccgttccgccgccgaagcgatggacatgttgcgccgtcatctggatgagcgccgcgccgccggcacgcttgacccagatgccttcgtggtgggcatgcgattccgtcactcgctgtgggccgacgacgagcagcccacactggccgcaattgacgccgtgaccggcgaacagccggtggccctctccagcgcggacatgcactgtggatgggtgaactccgccgcggcccgcaggcttggcgtacatgtggacggatccggtctggtcggcgaactcgaatggttcaacgcctacaccgccttcgacaaggcgccgggcgctgctgaagagactgaccgtctgctgcgcgaggccgaacaggacgccgcaagcaagggcgtggtgggcatccgcgattatgaaatggccgaaaacatcgatacatggaccaatcgtttcgcggccggcattaacggtttgcgcgtggacgctggtgtataccccgagcggttgcaagccgccattgacgcgggttggcataccggcaacccactgccgggcagcgccgggctcggccatgtgggcgccatgaagctcatctcggacggatcgctcaacacccgctccgcctactgctccacgccgtattcgggcatcgagccgccgacgtatggcacgctgagctacacgccgcagcaaatcgaagactatatgcgcctagccaccgagcatggcttcgacatcgcctgccacgctattggcgacgaagcgaacaccattgcgctcaacgcagtcgccgccacgcacgcacatggatcgatcgagcacgcacagatgctcaaacccatcgatatcccgcgtttcgccgagctggggctcacggccagcatccagccgcagcacgccatggatgaccgcgacgtcatcacccgtttctgggccaacccggccggtatcccttatccgttcagggccctccacgacgccggtaccacgctgcgcatgggctcggatgcgcccgtggccccgctggacccgtggctggccatttccgccgccgtgttcggctccgaaagctctgaccgcgagccgttccagcccgagcagtgcctcgatgtgcgcacctcgctggcagcctcgaccgccactggccgtgaccgccttgcatccggcgacccggccgatatggtgttgttggacgccgacccatacgccgccgatactccggaagccatgcgcgctatgccgcaacacgtcgtaatgacattgctgtgcggggagcgtacgtattgatgcaagccatcggcatgaagtgaccagaggtccgtcttgatagccgcgttgcacggaaaacatgttgtgttttttgaattgagagttactaacgcttgattctccgtttcaaggggcggatttgagcctttccggaggtctatctccgtttcaaggggctggtcatgcgctcaatctcagataaaatcccattcacgccaacgtcattccgccgtttttgtgcctcgcctacttgagcaacagcccctcgaagcggagatagacctccggaaaacaagaaatccgcccctcgaagtgaagataggacacagcagacgccgcaatacaaaaaacgccgtgtcagttgcccagttggggctgacacggcgtcttgctacgagcggcgggaaaatcagtacttcatgcccatggcctcgcgcacctggtcgagggtctcctcggcgatggcgttggcacgcttgttgccgtcgtgcaggatgtcacgaatggagtccatgtccttggccagctcggcgcggcgctcgcggtgcggggccaggaactcgttgactgattcgatgacgtatgccttgagtgcgccggcgccggaatcaccgatctcctcggcgatgtccttcgggtcgcggccggtcaccaggccggcggtggtcagcagggcggagacctgcgggcgggcaaccgggtcgaaagtgatgcggcgctcggaatcggtcgggctcttcttgatgagcttggcggtttcctcggcggtggcgcccagcatgatggagttgccgtacgacttgctcatcttgcggccgtcgagacctggaatctccggtgcctcagacagaatggcggccggctccgggaacactgggttcttcttggcgtaacgctcgttgaaacggcgggcgatggtgcgcgtgatttccacgtgcggcaggttgtccttgccgatcggcacgacattggccttgcagaagaggatgtcgcacgcctgatgcaccgggtaggtgagcagcagaccggtcagcgcgtggccggacgcctccatctcggacttcacggtcgggttgcggtgcagctcagcctcggtgaccagggacaggaacggcagcagcagctggttctcggccggcacggcggagtgggtgaacatcatggtcttgttcggatcgatgccggcggccatgtagtcgagcaccaggttcagcacgttgtcttggatgtgctcggtggtgtcgcggtcggtgatcacctggtagtcggcgatgatgatgttcgtgttgacgccgcgctcctgcatggcgacacgctcacggatcgagccgaagtagtggccgaggtgcagccggccggtcgggcggtcgccggtcaacatggtgaaggacgacggcttggcctccagcttggcgagcgtttcgtccgaacgctttttggccgcgaggaagctcgcgcttatctcattgcctgccgctgtcagttgctgctcgtcggtcatgcgaaaatcctttaaatagggctcagataaacgctttttatggtaaaagtgtgagccgacaacgaacaagccactattagtggtactctctattgttgatgaatcgaacagcacagtaatcgcagggggtcagatgggccgcggacgtcaaaaagcaaaacagcagaaaattgcccgaaagctcaagtacctgaccaccgataccgattacgatgagctggcaaaagagctgagcgagcaggagccgggaacgggctctcctgacccgttcgccgatattgatgatcagtatgcggacaaggatgtggattctgctgctgacgccgacgccgccaaggtctcgcccgccgcgcaggaggacgacctcgacgagtacgccaagtgggcagccgaagccgccgcaaaggcgaccagcggcgagttcccggcctccgcgccggccgcgcccaagccgaagccggccccacgcaagccgattccgatgcccatgccctcagcgctgaagccgaagaagagctaagcgcacgtaggcatatgccggatatcagcgggcaggatgggccaaggcccaccatgctcatcatggacaacgaccgcatggccctgatggcattacagtcgattttgtcgaaggccctgccagacttcgaattgtttccgccggtgagcgaaggcagcaaagccattcagctgtgcacggccaccaaacacccgcctgctgtgctattggccgatatcgcgatgaacgacatcaatggtccggatgtggtgcgtgcaatccgcagggaaaacgcgaccacggcgatactggccattaccgcctcgattgtgggccgacatgcccaggagatggcccgggccggcgcacagggcatcatgagcaagaacgatgatgtgcgattgcaggccgtggctatccgccaggtgcagaccgtcaaaatatggggcgatggtggcgacgtgcggttcgagaccgcggccgttgcgtccgcgcgcatcaaggccgagaaggacaaccggctgagcgcgcgtgagatggaggttgcggaactgtggtcccgcggccggactatgccgcagatcgccgccgaactgtccatcaccgaaaccaccgtgcgcacgcatctgatgcgtgcggccgacaagctcggcgccggcaatctcaaggaacttatcggcgcatggattcgcatgaacctgcactgatgaaggcgccgatgggtgtgtggggacacggtagaagaagcgcaaggcgcataaggggagcgggccggtgaaacgtccgattatcatttcgcggcattcgtcgtattcgtatggtcacgccgacggcaagaagcatcatcagattgatatcgatatagaactcaatcatccgctggcgatgttcggcccgatcggtgtgcttgcggtggcggccatcgtctatgcggtgaccgggtcgtggctggtcacggcgtcggcggcgctgacggcaagcgtgctgctggtattactgggcattgcgttgcgctggcgcaagcgcgtggtgaatcaggagaacgaaaacgagcagatggaatcggcgctggccgatctgcgccacggcaaccagctcgcgatcgaactgcacgacacgctgtccaacgatctgacgtatatctcgaccatcgcccggaataatctggccgcgccagccggcatcgatggtggcgactggcagcgcgtgctggatcgcagccaacgtgcctttgcggaagtgcatggcatcatcgattttctgaccgagcagagcggaatggacgccggcttccgggacgagtccttgccggtcggtggcaccgggacatctgaggtggcgactgcagaatcagggcaggttgattcgccgacgaaagaatccgccctggctcgtgacccggtaggtgccgggagctgtccagcgattgcgaatgaggtggttgacaatgccgtgcccgagaacgccggtggcgatgaccgtacgcaatccacagcgggcatgccgcaatccttcgtcacgcgtgtgaaggcgcagatcaccgataccgaggagtttctggaggcgcagggctatcgggggacggccgcggtcaacggcatcgtcatggtcgtggaccccgaggcggcggccgaggcgctgtcgctgatgacggagatcggcacgaatatccgccgccatgcaccggcgggagatgattcctacctgctgttcgtcaccctgtctcccgaatggattgagattcgcgagaccaacgatatccgtgacgatgccgacgcgcagagtggcctgtccgcgcaggagcggtcggggcgtgggctggccatgcatcgcacccgtgtgcaggagttgggcggtgagttgaccgcccgttcggatgatggcacgtggatgatttacgtgcgcattccatgcgtgcggggctgatggggcagaagctgcgatgtccggcgtccggcgctgattgtgccctgtcctcacaaatgaggacgacgaccgcagccatgtccccataaccgaggattgcgggtgttcggctcggcggcggctccctatggtggcgtccataaggaccaatcccagggagggcaacgatggcaagtgatacggatttatggcggggaactgattacggatggtggctggctgcggacacgtccggcgcggtcggtgccagcctgatcgcgttcgcggtgccgctgatcatgctcgccacgacaggatcctctgccgccgccaccacgacggaaagcatctgcgtggtggtgcagacggtgctgggccttgccggcggcgtgattcaggaccggtatgatcgccgtacgctcatgctgatctggggtgcgtccggtgtggtgctctcggcggtggcggcggcagcggtgatgctgttcggcaatgcgccgaagacgagcggccatggggttaacggggcaaacgctccggcattcggcggaccgtatgcccacgtgcttccgatcgcgctgctgtgtatcgtcgtgctgttttcggtgcgcgatgggctgttggagaatacgtcgaatgccatgctgcgtggcgtggtgccggatgagcagctgcctcacgcgatggcgttgaacgacgccagggattcgacggtcacgctggcaggcgggccgttgggcggtctgctgatgaccgtgggacatgcggtgccgttcctgaccagcgcggtgctgagcgtgctgggcatggtgtccgcatggcgtatccgccgctattggaaacgtgcgactgtgagcgatagcggccgtccgggcaatgttgataccggttcggaggtcggggccgtctcggacgccgatgatgccgatgactccgccccacgctggcgcgacgcactggacggcatgatctggctgctgcgcgaccggttccaacgccatctcatcatcgcagcggccatggtgaccggtgccagcaatgccttcctactgctgaccgcgctggacatctcccaaggtggcagccagctgatatccgccggatccatcaacgccgcctccgccgttggcatgttgctgggcgcactgatggcctcgcaactggtcaaccgtgtgcccggcggcgtactggtgggtgtgatgttcgtcttgctggctgtaggattcaccggtgccgcgttggtgccctccatggttggcaaggccatatttgtggcctgctcggtactggcattgcccgcgggcaacgcggtgcttggaggcctcagcaataccttggtgggcaaggacaagctcggccgcgttggagcgggcagcatggtgttgcagtacggtgcctatggcgtggccgtggcactcgccggctggggtatgcagaccatcggctacggtccgacctgcctgattctggccaccgtactggtagctgccgccgcttacgcgctgacgatgcgcagcctcatcaccctacccacgccggaccgctgggccgagcacatccagcgttggagcatcgcacagttctgataaagggcatccgataccgggcatccgacgatttacagcggcagcaggtcgctcagatcgtcgcgctctccgaccgcgctgatgtggccggcgtccttttcctctgcccacgtggtgatgccgcaggccagccgtagccagacctcgggctccagttcgatgacgtccggtggagtgaggttgtgcgggtccgattccgggccgtccaggattttgaccgcaccccacggcgcaacgcgcacctccacgccagggccgggcgcgcgccgctccagcaggaacagcgagtagcgcacagccatcgcccacaccgggcgcggcagaacgggggaggtggtcaggcgatgtggtgtgttgtcggccagttccagggctgcggcacgccattgcatcagtgcgtcgtgccctcgtttcaagtctttttcgagaattactgccatatgctccatcatggcaccggcacgcgaaaccgcaaggtatgcaaacgatggcatactgtaggatgcggaaccgtgagatatgtgatacgctctcaatgagaacgtatgcaagaacgctccgccatcgtcgttacggagagttcatgcttacgtctatgcgacgatacctatcgcgcggcataataaacacgggcacttatcccggaaggaaagtcagaatgaccgaaatcaccgcaccgaagtctcctgtcacggcggaacaattcgccgacgagattcgtgaacaactgaaatacactcaaaacgtcaccgccgagcaggccacccctgctgacgtgtatgtcgccgcatccaaggccgtgcgcaaccaccttgccgactcctggttcaagacccaggccgacaccgtcaacggcaacaccaaggccgtcggctacctgtccgccgagttcttgatgggtaagcagctggagaacgcactgctgaacgctggcctgaccgaccagttcgacaaggctgtggaagcccttggcttcaagccgaaggacatcgtggacgtcgaatacgagccgggcctcggcaacggtggcctcggccgtctggccgcctgcttcatcgactccctcgcctccctcggcgtgccggccttcggctacggcatccagtacaagtacggcatcttcaagcagaagttcgacgagaacggcaagcaggtcgaaaccccggactactggctggccaacgaagagccgtggggccacaccgactacaaccgtgatcagaaggtctccttcggtggcaaggtcgtcgaaaacgccgacggcaccaagacctgggaaccggcctggtccgtgcgcgccgtgccggtggactacatggttcccggctacaagtcccagcgtgtgaacactctgcgcctgtggaccgccaagagctacgacgagttcgatctgctcgccttcaaccgttccgagtacatggacgccgtggccccgcaggtcaaggccgagaacatctccaagattctctacccggaagactccaccaaggtcggtaaggaactgcgcctcgagcagcagtacttcttcgtctccgcatccctgcacgacgccatccgcgtcttctacccgggccaggacaaaccggacctgacgaccttcccgaacaagatcgtcttccagctcaacgacacccatccggtgatcggcatccccgagctcatgcgcatcctcatcgatgagtacggctacgactgggataccgcgtggtccatcaccaccaagaccttcaactacacctgccacaccctgctgccggaggcccttgaggtctggccggccagcctgatcggcgagctgctgccccgtcacctcgagatcatcgagaagatcaacgagcagttcgaggccgagctcaaggccaagggcgttgccgccgacaccatcaaggacatggccatctacactggcgacgccgtgcgcatggcctacctggccacctacggcggctcccacgtcaacggcgttgccgagctgcactcccagctgctgaaggacgtcaccctgaagaacttctccgacgtctacccggacaagttcaccaacgtgaccaacggcgtgaccccgcgtcgcttcgtcaagctcgccaacccgcgcctgtccgacctcatcaccgagggcctgggcaccgacaagtgggtcgccgatctggaactgctcaagggcctcgagccgctggccaaggacgatgagttcgtcaagaagttcgccgccgtcaagaaggccaacaagcacgcattcgtgggcttcgccaaggaccactacggcatcgatatcgacgagaacaccctgttcaacaccatggtcaagcgtctgcacgagtacaagcgccagtctctgaagattctcgccgtgatctccaactacgccgacatcaagtccggcaaggtcaaggccgaggacatcactccgcgcaccgtgttcttcggtgccaaggccgctccgggctactacctggccaagatgaccatcgagctgatcaacaacgtttcccgcgtgatcagcagcgatccggccgtcaagggcaagctcgccgtccacatgctgccgaactacaacgtcgagatggctcagaacctcatcccggccaccgagcttgacgagcagatctcccaagccggcaaggaagcttccggtaccggcaacatgaagttcgctctgaacggcgccctgaccgtgggtacgctggacggcgcgaacgtcgagattcgtgagcgcgtcggcgccgagaacttcttcctgttcggcatgaccgtcgacgaggtcgagaagaagtacgccgagggctacaatcccgcctcctactacgaggccgatccgcgcctgaagcaggccatcgatctggtggccgacggcaccttctccaacggcgaccgcaacgcctactccccgctcgtggccgactggctgaccaaggactggttcatgaccctggccgacttctccgcctacatgggcatccagtctgagatcgaggccctctacgccgatgagctcgaatggaaccgcaaggccctgctcaacgtggccaactccggctacttcagctccgaccgctccatggaagactatttggaacgtatctggcacactgctcctctggcctgacggccgccggagcagcgcgccggctacgtgctggtttctacctcgcggctgtcgccgctcggcgtcgcctacgggaagcccaccgggcttcccgcttaacggctccgcacatctggcacactgctcctctggctgactgagtcggtggggcggctcccctcggagaggggaaccagaacataagaagccccgcaaccgacatccatcggttgcggggcttcttgcgttgaaaaaccgccctatcaggcttcggccggggcggcttccgcctcgccatcggcctcatcctcggccttgttcagacccaggtcgaccggcgaggagctgttctcccacggctcctcccacggatcgtaatctgggttctgctgcttgtagatgtacaagccaacaagcgcggcgagcaatccgccgaacagcagcgcgaagaacttccaaccgttagaagacttgttctccatgacggctcctttccctagggatcgtctggtcggtatgcccattcagaccgactctgctccctattctaggccgctgtttgtgacgattgggtggaatgacattcgtgggcgattcatccacgcccgcatgccctcggtcggctcagcatcttcgcggcgcgtggaacgcatccgagaccttcgatacagtggactgcatgcatattcctacacagcgggagattcgataccagtgggagcgcggtggtccggtgatgacctgggcgctgattggtgcgtgcgtggcagtgtggctactggaggtattgctgggatttattgccccgggcctgagggcttggttgatgtacctcggcatggcggctccggtcagactggtggctgagccgtggacgctcatcacctcgatgttcctgcatgcgccgaactcgctattgcatatcctgttcaacatgatcgccctgtattccgtgggcccagtgctggaacgaatgatcggccactggcggttcttgggactgtatgtgatttccggccttggcggctctctgggacttatggtgtgggctgcggtggctccgggaggcatcggctggcagatggcagcctatggggcttctggagccttatttggcctgtttgcatcattgctggtggtatatcgccgtatcggcgccgatatccgctccatgttgatctggatggcggtgaacttcgccttgccgttcgtggtcgggggcgtggcgtggcaggcgcatgtcggcggctttgtagtgggtggaatactcacatggctgctggtgggtggtgtgccggcgtggcgaggtaaaagcctgaaatggcgtatgcaggtttacggctgggccatggtggtgctggtcgttgtgttgattctgttgtgcaatatggccaatccttacgggtggatgagtttcggctccctgcactgatatggcttgatatggctgtaaaaaacgattgatgccgggtattgcggaacatgcagtgcccggcatcagtgtatgtacggaaagcggcgatgtggatattagcgatgtggatatcgtcattcggtgagtgggcatgcgctgtatgaaggtatccacagtaatgaagatatccacagtaatgagatgcgcgcaatgacgagttatccacgataacgagttatccacaatggtgacttgtgcacaagtgtgtagaaaagtgcataagactgtggataacttatgtggataagttaggaatgccgcggtattactgggtttgttgcagtggataactcgggtgtataactgttccctcgctgtggcgatgtatgccaagccaaagttatgcacgagatatacaccgagaaacgccgcttatccaccacttatccacatggttttccacattcggtggaaaactacatgggtgtgattcatccacaggctgtggataacgtagtggataagtcgtggataagtcgtggataagtggtggatagctgtggatgaacaggtgaaggcacgaaaaaggccggcctccgcatacgggaggtcggcctttcgcataagaactaagaacaacctaacgatagaaaaaacgatctaccgatagataagcgcaacgagtcggaactcagcgccatcccatcgtcatcaggaatccgatcatgatcagggcgaagccgatgcccaggttccacgcgccgatgttcggaatcggccaggagccggacggggagaggtagtacaccacacaccaaatcaggccgatgatcataaacgcgcagaacagcggcacgaaccaacgcgggttcgacttggtgcccttaatggtttcttcaacacgcttggtgttctccgcctgacggttcatcatgcgctgcatctgcggggtcagcgtggccttatcggcagtggcgttgagcacggcctgcacctgctccatattcacgccgtaagccgcgtcttcctcggcagaagcgttctctgcgttctgctcggtgtctttgttggcggtctcgtcagcagcggtgctggatgaggtctcgctctgccagtccttctggttgttcgagtcggtctcgtgcagctcttcgtcagccatcagcatagtctccattcaataggctaaaagtcataatagtggctacactcgaaagcggcgaccagagtcggcaagaagacaggaaattcatggccagacatgtaggtaagcacggcgcacggcactccctatggggtggtgtcgcggtattcgtcgtcattgccttgaccggttttctgctgagcaccaacgtgagggtcaatcgtacggttgccgccaccaacgatacggccgatctggtggagcaaggcgtgggcgaggccaaccagctgcagcaggacgtcagcgatctgaccaaacaggtcgccaatcttacggacgcgctcaaggccgatggcaccgacggtactgacagcacgcagaaccaaggcaaggactccagcaatgtggattccagcctgatgctgcccgcgctcagcggcagcggcgtaacggtaacgctggatgattctccgttatgggagaacgccgtcaacaacaatggcacgaccgccaatatcaacgattacgtgattcatcagcaggacgtcgaatcggtggtgaatgccttgtgggccggcggtgccgatgcgctgatgattatggatcagcgggtgctgttcaattcggcggtcatctgttccggcaacgtgctgtcgttgcacggtaagaaatactcgccgccattcaccatttccgcgattggtgacccgcaaagacttcgcgcagcgttgaacgactccgaagccattaccattcttaagcaatatgtgaccgcgtttggcattggctacaaggtggagaatgccgagggccttcagttccccggtaccgccgccttgctgcagcagttgaaatatgccacggtcgatacgtcaaagaccacagatgaggagcagactcagcaatgagacacggcaggcacaacagcggcgcaccggcgcccattgatctcgcgtccgtgtcggacgtacagcccttccccgaggacgacgccgcacgaatggcggcagacccggccaatgccagcagggcaaggtcccgtcgtgccgcagtacgcggcgcgtcttcgccccagcggagcctgatctggcaggcactcggcatctgcgccgaactgctgattaccgctgccgtgatttgcgccctgtacatcgtctggcagatgtggtggaccggtgtcgaggcggagcgagcccagaacgaaaccacccagtccgtcgactggagcgaccccagcaacaacgggggaacggtcaccatcgccaaagcccaggagggcgatgctccagtacagccgaaagacgcgaaatatggcgacttgattgcgcagatctacattccgcgcttcggctcccaatggcatcgcaacatcgtggaaggcaccacgctcgagcagctcaatcgccacggtctgggccattacgacaccacccagatgccggggcaggtcggcaacttcgccgtcgccggccaccgcaacggctacgggcagccgttgggcgatgtggacaagttgcaggaaggcgatcccatcatcgttcgtaccaaggattactggtacgtctaccactacacccggtacgagattgtgctgcccacggacgtgtatgtgatcgcgcccaatccggaagactccactgccaatcccaccaaacgcatgatcacactgaccacctgtgagccgaaatactccacccccacccatcgatggatcagctatggtgagttggcgtactgggccaaagtgtctgatggcgtgcccaaagagctggctactactgattcgtccggtgcagtgaagttctccaccaccgaaaccccctcgatcgcttcccgcattggctcgctggacaaggtggtattcggcgcgctggtagtgtggctggttctgttcatcgccgctgcggtggcatggcgctggccggtgctgcgcgagattcgcgcgggtgagcgtcgccgcccggatgccagcatctatggcggactgttgcgtctgcagcccggcgtggcaccgattcgatggctgctgctggctctgctgctgttcgcagccgccgcggcgctgttccagtggggattcccttgggccgccgccaatattccattcctacagcagatgtcgaacttcgtggcagtgagctgacggcagcctagtactatggcttgcagtacacgtccctcaaggagagccctatgaccgattccgcgcatattttggtggtggataactacgattccttcgtctacacgatcgtaggctatctgcaaacccttggcgccactgttgatgtggtgcgtaacgacgctatcgacccagccgcgccgggtgtactggacggttacgatggcgtgctgatttctcccggccctggcgctccggccgaatccggtgccagtgaggatatgattcgcctgtgcgcggccagcggcgtgccgatgtttggtgtgtgcctgggcttgcaggcgctcgccgaggtgta

SEQ ID NO: 349 - DNA, 43656 bp, Unknown
  R42_10m  MAG No. k141_16496
atggccgcttgaacttcccaccagtcaggctggcgcgcgctccaagggtcatagggaagtactcgcacaccctcccacatcatcagctcatggttcatcgcctcaccctcgatacggccgaggggcgcgtcgacttggctgaaccgcaagcccggctctcgttctacaccaagcagcaggtcaaggcatccggccacgaaatcagcgtctatgagaacgcagctgtgttcacgtctcaccaatgtccatgcaagcatggaagccatgacgctcaaccccacgcctccatgacctgacgtcatcgttacaatgttatggaagctggtgtctgtagttagggcgagtgccggagcctcgcccgatctctgccgttcgcatgaggccaacggcctgggcggcggagtgtagtagcgatacgctggaattggcgcatcgtccgtgggcagcggaatgcccggaggtgctaccgctggcgaggtgatcctacgcgccacgcggggtgtggtgttgctattcataagccgattgaaacgtgtccgagttcaatgctcaacacgaatcgaccattgtggttctagcttgctgagttatccacaccccggcatgtcgtccacgacaaatgtggataaccacgctgctgtttcacgcccatctcatgcagaaaaagccctgacctcacatgcacagtcagggccttcattttcacgacgattccttatgcggtaatctacatttcttgcttacttatcgaggttcttaatgccgtcttccatagcatccaactgagcatcggtcaccttggccggcttcttcttgccgaacttggccttgagcagaccgatgatggtcggggcgagcgagaccagcagaatcagcacgatcaccagctcgaagtggtcctgtactgccggaatgttaccgaagaagtagcccagcagcgtgaacaacgtggaccagcacaggccgccgagcactgagaacggcgtgaaacggctccaacgcataccggaaataccggagatgaacggcatgaacgtacgaatgaacgggaagaaacggcccaggaacacggccagcgggccccacttctcaatcatgtgctcggttttggccaaacgctccggggtcaaggccttcaccttgccggactggatgatgcgacggccgaagaaatgaccaatgaagtaattgcactggtcgccgataatcggggcgcaccagaccaccggcagcagccagaacagcggcagcgcggccttgccggtcgcggcatcgggagcggcgaacacaccggcggcgaacagcagggagtcgcccggcaggaatgggaagaacaccacacccgtttcgataaatacgatgaggaagatgaagccgagggtcggcgccacgcccatggcaatccaaccggcaatcgcggcacgcggatccttcagcagttcgaggatgaaattaacgaagcccatgtgtttcctatgagtcctaaatcttgtattgagctgccagcccaatgaaccagacattcgtctgaaaaccgtcaaccactctaccagtcgccccgatacaagagggggccaccggaacctcatagcagccattactgccatcttctttacaaatatggcgtgcttcgctggtatatcgtcaacacattccaccgctcatgaggagaactgcatgcgcggtgatgtaatcaattactcaccaagacgctggcgcacgaaaccgtccagcgcggccgcatcgataccgtcatacgattcgatggacgcgaactggcccaggccggaagtatccgtgcgaatccagccagtctgcgcgatcagagtcgcgcccgatgccgcaccggcctgaagtccaaccgaggaatcctcgagcaccacgcacttggccatgtcttcacgggcgatgccaagcttgtcggctgcggccagatagggcgcagggttcggcttgtgttcgtacggatcgtcgccacagacgtagccggcgaacagtccctcggactgcttcatgatgttctccgccatacggcgcggcgacgtggtgaccagcatggacggaatgccggcctccttgagcgagtgcagcacgtccaatacgccgggaatccacggcagacgttcgacctccgccttgaacacataatccttgagctgtttgtcgatttcgggaacgctcaatgtgcagccatgcgcaatcatgacctctgccacgtatggcaccggagtgccggagcactcccaaccgaggtcctcgttccactcgccgccattgttgtgcgcgatctcgatttcaccgtcatgccaaagcggctccgaatcgataagcgttccgtccaaatcccaaaacacggccttgagcagcatggttacctccgtacgtcgcagtgaatcctcaactattcgtattcgatatacctatctcaccaactccgcacgacagccgaacagcaaatcaccaaccccacaggaccatggatttggaatcggcgggggtggagtcggattcgcgcgtggtgtcggcagcggtatcgcggccgggcagttcgcgggtttcgcggcggatggcgttgcgccagaggcgggcgcggttggagcgttgtacctccacgatattgccgtcacggcctgcggcgaaaacgctctcctggtcgccggtttgcatgcgtttgacttcgcggcgcagttggcgattctcttcttcgagggccaaaatgcgtgcgatgccggaaagattgatgccctcatcctgacttaggcgctgagctcgagtcaggcgggcgatgtcgcgcaggcagtagcggcgtgcgccgccatcggtgcgctgcggacggaccagacccagccggtcgtactggcggagggtctgggggtggatgttgcccagttcggctgcctggccgacggtgaagatgggcagttcgatgtcgaagccgacgtcatcggctccgtcgagatcggccctgcccatcaccagcgcggttgcgcacatcgcgtacaactgcttcatttggttggctaaccgcgccattgttcacctcctgattacaggctgagatagtcgccggctttttcgtcgaattctttggcggcgtgcttgacggccagacccggcttggcggggaccatgatctgcacgcggccgatcaggtcgcccggctggttgccgcactggacgccaagtcccgcgagcttgacctcggcaccggagctggagcctgccggcaccttgaaggtgacgggattgccgtcgatatccttggcctcgaccttgccaccggccacggcctggcccacggtgacgggcaggtccatgacgatgtcgtggccgcgcatcgagaacgcggcatcgggcttgacggtgacgtgcaggtacaaatcgccggccttgccgccgttgatgcccggcttgcccttgccggccagcttgatcttctgaccgtccttgacgccggcgggcacatgagccttgaacttcttgccgtccacggacagggacacggtagcgcccttgaccgcctgacgcagggtcaggctgatcttggagttgcggtcctcgccgttttcggggcgcggggcctcctcatagccgtagccaccggcattgccgtacggcgattggccgtagccgccatacgactggccgccctgacctgcagcaccgccgaacatcgagaagatgtcgttgatgttgttggggccgccgcccgaagtggagaagcggatacgcgaaccgttgccaccggcaccctggccaaacatggagccgaagatatcagagaaaccggaagcgtcgaagccgccggcgccggaaccgcctgcgaagcgggcgccgcccatgccgaactggcgaatcgcgtcgtacttttggcgatcttccttcttgctcagcacgtcgtaggcttcggagatgtccttgaacttctcctcggcttccttggtcttgttgacgtcagggtggtacttgcgggcgagcttgcggtacgcctttttgatgtcgtcgtccgaagcgtccttggagacaccaaggactttgtagaagtctttactgagccattcgttttcagccattcatgtctcctttcttgaaaagtctttatggttggctcccgctggatgaacagcccagtgggctgttcatagcagtgcgcaattgcgcacgtcgcataaaacatcgggagctgtcgaacgaagcgagactgagggtggtttatattcagtgtttgaccaccctcagtcagccttcggctgccagctcccgccagcgggagccaaggtaatgtcagctcgttaacgagctggccgttatcagttttgcggggaggctactactactcgggcggcgcggattacgcggtcgccgatacggtagccggcttccaccacggtgtcgacggtttccttgtcggcatcggcatccggcttgtgcaggattgcctcatgcttggtggggtcgaagtcctcgcccttttcgccgaacttctcgacgccgaacttctcgaaagccttgtcgatcttggcggcaacggccttgaacgagtcgtccatctcgctgtgttcgcgaatgcggtcgatgtcgtcgagggcgggcagcagcgcggtcagcacgtcgatgatgccgtgctggcggaagcgctcctgctccttctgcgtgcgattgcggtagttgatgaactccgcacgttcgcgttgcagggcttcgaggtagtctgcggcttccttcttggccttgccgaggggggtgagggtgtcttcggaatcggactggccttcgccggtcttctctccggcatccgacttctctccctcagctgcggcaggagccgcgtcggctccttcattggaaggagcctgggcagccgaatcctgcgcagagtcggactcggcggaggcgtcagcccctgaagaggcctgagcggcctggccggcagcctcagcatctgagggatccggcaggtcgttcaggtagtcgtccttgttgaactcggacatcacttgttgtccttgtcgtcatcgtcgtccacgacctcggcctcgacggtgtcgtcgtcggaaccggaggcggagccagcggaagcgccggcgccggcagcgccagccgcaccggcaccggccgcggcaccctcggcaccctgctgggcgtagaggacctggccgatcttctgggcggcggtcatcagctcagtctgagcagtcttgaccttctcggtgtcgtcacccttcagggcttccttcagagcgttgaccttgtcggtgacttccttgacgatgtcgtcggagagcttgtccttgttgtcgttgacgagcttctcggtggagtaggcgaaggcctcagcctggttgcgggtctcggcgtcttccttgcgctgcttatcctcagcctcgtgagcctcggcttccttgaccatgcggtcgatctcgtccttcggcaggccggaaccaccggtgatggtcatggactgctccttgccggtgcccttgtccttagcggacacgtgcacgatgccgttggcgtcgatgtcgaaggtgacctcaatctgcgggacgccacgcggagccggagcgatgccggtcagctcgaaggtgcccagcggcttgttgtcgcgagcgaactcacgttcaccctggtagacctgaatcagcacggacggctggttgtcttcagcggtggagaagacctcggagcgcttggtcgggatggcggtgttgcgatcgatgagcttggtcatgatgccacccttggtctcgataccgagggacagaggggtcacgtcgataagcaggacgtccttacggtcgcccttgatgacgccggactgcacggcggcaccgacagccacaacctcatccgggttcacggactggttcgcttccttaccgccggtgagttccttgaccaggtccttgacggcgggcatacgagtggaaccaccgacgagcaccacgtggtcgatgtcgctcaccgagatgccggcatcgtgcagcacgttgttgaacggcgtgcggcagcggcccagcaggtcggaggtcatttcctcgaagtgcgcgcgggtcagggtctcgtccaggtgcaccggggtgccgtcgggggtcatggccaggtactgcatggagatgctggtggaggtggaggaggagagctccttcttcgcctgctcggcggcttccttcaggcgctgcagcgcgatcttgtccttggacaggtcgacgccgtacttgttcttgacttcggagaccagccaatcgatgatcttctgatcccagtcatcgccaccgaggtggttgtcgccgttggtggcctggacctggatggtggagaagccgtcgtcatccttgccgatctccagcagggaaacgtcgaaggtgccgccgccgaggtcgaagaccaagatgcgctcgtcttccttgcctttctcaaggccgtaggccagagcggctgcggtcggctcgttgatgatacgcaggacgttcaggccggcgatcttgccggcgtccttggtggcctgacgctgggcatcgttgaagtatgccgggcaggtgatgacggcgtcggtgacgggctcgccgaggtatgcctcggcgtccctcttcagcttcatcaggatctgcgcggaaatctcctgcggggtccacttcttgccgtcgatgtcgacggtccaatcggtgcccatgtggcgcttgacggaggagatggtgcggtcaacgttggtcacggcctgacgcttggccacttcgccgacgaggatctcgccggacttggagaaagccaccacggacggcgtggtacgggcgccttcggcgttgacgataacggtgggctcgccaccttcaagagttgcgatgcaggaattggtcgtaccaagatcgatgccaactgcgcgtgccataatgtgtgctcctttgtgggacttgcgattgcccggccggcgccgccgttcgccacgacctgttcgggttgtgacgcgcggtgtgcgcgagccgtctcgcacgtgttcgttctttcgttcttcgcccgggtttcggtcggttccttgtgcggttcctctcggttgtggggtttgcgttcgcaaccgcccattcccgtgcttccgaaacttgagcctacaccactcaactttaaaccgcaagtgcatattcccggattcggcaaaaaacttgagcgattctcactcaggtttctgcgaagcgtggcacacggcacgtatcgcatcacagccaaaagccgccggaaaaccatcgcccgccgggcatcggctcggcgggcgatcgttttccggcggctggacgactcgggattaccggtcggccaaggccgaatcaattgttcctggcgttacgcgcggccttgatgagcatcgcgatcgcaaccagcatcacagccgcgatggcgatggccatgacggcggtaccggtggcgcccagggcgccgaacggaccggagaccgcggaatcgttcggcaccttgcccgaagcgatcacgccgttcttgtcggcgcccggcttcttgtcggcggagccggcggccggcgcctggatggcgacggtcgcgaccttaccggactggcgaccggtgacggtgagcgtgtactcggcgccttccgacatcttgtcgagcgcgatcgaagtggtctgcgcgggcttgacgcgcacgccggacagcggggtgctggaatcggacttggacaccacggcgccgtccttgtccttcagctcgtagctgagcagcgcgtcgccgttgaaaccgtcgacattggcgacgtacttgccggcctgcgtgcgggcgaccttcacggtgccgtccttggagagcgcgttctgctcgtcgggggaggtggccaggcccagggcgccggcgatggtgtagaagttatcggtctgatcggtcaggccgatgacgcgctgggcgccggggccggaagcggcgatgcgcagctgggtgccggtgtgctccatgtcgccgccgttgtagccgccttcggcgtcggtggaggcttcctgggcggtgccgtaggagacgaccatgttgttgccgtcggcggacttgagcacggtggacagcgcgtaagccggctgggcgttgaggacctgggaggtgtgcgcatgatcggcggtgacgatcaccagcgtgttcgtgaggtccacgttcttgatggcgtaggcgatggcctggtcgaagtcgtcggtctcgccgatctggccgcaggcgttggcggcgtggtcctgcttatcgatcgaagcgccttcgacctgcaggaggaagccgttcttctggccgttcgggttggcgttgagcagatcgagcgccttcttggtcatgtccttgagcgaggcgccacggttgccgagccaggcgtcattcggggtgcacacggtcgggttggcgtccttggccggatccttggcggtggccttggacgggttgaacttggtcggcatgttgccgtcgctcatcagggcgagcaccggctggccatccttgtactgcagggcgttcatcgcggccgggtcgttctcaacggtctggaagcccatgtccttggcctgttcccacacggtcttgcccttgtattcgccgccctgcacggtctggcggaagtacttggaaccaccgccgatggtcacatcggcgcgggtgtcgagcagctgctcggagatggagccgatgccgccgttctccttgagctggttggcgaggcactgcttggaggcgttgttggaagtgccgtcggtcttgccctgcgggccgtagcaggcacgctcggtggagtgcgattccagcacggccggggtggcgtcctggatttccgcggtggacacgttgccggtggccttgccggcggccttggcaagctcgaagagattcagctgcgggttgccgtagatgtcgacatccacggcgttgttgtaggtcttggtaccggtcgcccatgcggaaccggacgcggaggaatcggtgacgggggtgagcttgcccgggttggggttggcgaccagcttgccggtgccatccttgccgacggcgctgtccttgctgccgtcgccgagcgagaaggtcgtgtactggccggtgcccgcctgcacgtcgtcaagcgcgccgggctgaccgaccgcgtccagaccatcgaagtggccgttggcgcccttcagatagtcgcgggcgatggtgatttccgaatcgcccatgccgtcgccgatgaacagcacgacgttcttcgcgctcttgttgccgatggcggcgatgcgctgcgcggcgccgtgcttggcgagctcggcgaccgacttgccgttggggctgtaggtgccgtttgcggcatcgacagcaaacgccggagcggcgagcgcgccgagcgtcgcgatggaggcgaccgccgcgacggcgctcttcaaagccttgtgattgcccattgttcttccttcttccatgcagtgtcatctgcgccgtccggcccgcacttctccggccgcacccgtttggccacgtccgtcgtcgtcatgccttccagcttcgcggaaccgttccgcacctgcattgcttggatctttcgattccggatttcacggtaggcctcacaagccaacgtccggataccgccggaagaacgccgggtgaacattcttcgtcgaatcggccgaggcatcatcgccgcatgaaccggcaagccatacacgatccgcacctggcagtacatgttctcgaaaatccgccccgaattccccgaggcggcgttcgtcgccgaatgtgggccgaccgaacgaatcgatgcaggccggattcgacatggacttctacctcgactggcgctgggacggccacccgacgctctccccgcagtcgttcgtcgtgctcggataacccgctaattgcccaactcaccgaatgtattgcaatcgttgtcaatatgagttacggtaaagatagaacagctcgaacattggtctgtcagattgccggaacctcaacgcagagcggccctcgaacagcaatgcaaacgactagcagtacccgatctgtaagcaaggagtcatcatgactgacgcgtacggcaacgacgcagcgaccagcaccggcaccatcgcagacaccaccaacgacgccgcttccggtgccccgcagcgcgcggaaagcgcggaacgactcgcccgtccgctggtcaagctggccaaagcatgcgggctttccacctcgttcatcgaccagctcggcacctacaccgaaatcagcgacgcggccttggtcgccgtactcaatgccctcgacgtggacgcatccagcgacgaggccatcgcacgctccatgacccaacttgaggtggaaaacagcaaacgtttgctcccctccaccatcgtcgccaccaccggcaaaccgaccggcatcaccctgaactgttcgtcggacgcggacatcaccgtctccatcgagctggaggacggcaccgcgtttggccactttgccctgctgccgcacctcaattccggcaagccggacttgaccatcgctcccgatctgccgatgggctaccacacactgaccgtcacggtggacgggcgcgagggcaaggcggccatcatcgccgcccccgcgcgcattcccgtgccggaggcggtcgccgagcaccagcggtggggctggatgacgcagatgtattccgtgcggtcccgcgaatcgtggggcatcggcgattacggcgatctgaagctgctgctggcggacgcggccgacaagtccaaggccgacttcatgctcatcaacccgattcacgccggcgcgccgattccgccgcttgagccatcgccgtatctaccggaatcgcgccgattcctcaacgtgacgtacatccgcccgcaggacatccccgaatacggcacgctgccggccgatatccgagcgcaggtggatgcgctgcatgattcagtggccgcacgcaacgacgaatcgaacccgatggacatcaacgcggcgtgggcggccaaacgcccggcgctgcgtctgatcttcgacgcgggccgcaacaacaagcgcgagctcgaattcgagcatttcaagaccaccgccggcccagacctcgattccttcgccacctggtgcctgtgcttcgaggtatggggcgcgccgtggggcgagaaccgttggttcttcgagaagaccatcgacgacccggccgtgtgccagctcgtcgaggagcaccacgacctgttcgagttcaaccgctggctgcagtggattgccgccgagcaggtgaacgccgcgcagcaggaggcgctggaccacggcatgacactgggtctgatgcaagacatggccgtgggcgtgcacgggctcggcgcggatgcctgggccaatccggaacgcttcgcctccggcggcgtcacggtcggctgcccgccggacttctataaccagcagggccaggattggggccagccgccgttcagcccacgctatctggaggccaccggctaccaggtgtaccgcgagatggtgcattcgatgtacgagcacgcgggcgcggtgcgcatcgaccatgtgctgggcctgttccgcctgtggtggattccgcaggggctcggcgccctcaacggcgcatacgtgacgtacaaccacgaggcgatgctgggagtactggccatcgaggccacgcgcgccggaggcatggtggttggcgaggatctgggcaccgtaccggattacgtgcgccgcattctgtccgatcacggcgtgctcggcactgacgtggaatggttcaaccgcgtggacgattcgccgaacgccggcgacccgtaccgtgcacccaaggactatcgcaaacaggcattggcctcggtgaccacgcacgatctgccacccaccgccggctacctgaacttcgaacacgtcaagctgcgcgaggagctgcatctcctgagcgagccggtggaggcgttcgccgcctcggcgatggccgaacgcacggccatgatgaaccgtctggtggagaacggctatatctcgcagaccgtggcggatgatgtggaaggccatgtgcaggagatcgtggaggcgatgcacgccatgctcaccgatacgccgtcgctgctgctgcaggcagcgctggtggacggcgtgggcgaatgccgttcccagaatcagccgggcacttccagcgagtattcgaactggcgcgtgccgctggcggacagctcaggccacgtggtgcataccgacgaggtcttcgacctgccacgcgtgcagtccctagccgccgtgatgcgccgagagaagcggtgatcgattccgcaatgggaaattggtctaaatcggcttcgaggggctgatttggcctttcccggacatccacttccgcttcaaggggctggcgcccaagtagacccagcgcgagaacggcggaatgacgttggcacaaagtcgtttgcacttgtggtttcaccggcaaggagccccttgaaacggaagtagatgtccggaatgccctaaatcagcccctcgtaatcgagatagccgaagacgacgacttgttatgggcatgttatcgttgtcatgacaatgattgttcgcgacggtaaaggagcgacggcatatgaccaaggcaagcattcaggcagtggcccgcgaggccggcgtttccgtatccacggtgtcccggaccttcgccaagccggatctggtgcttcccgagactcgagaccgagtgatggccgcggccgaaaagctcgactactcagtctcacgctcggccgccgccctaaaatccggccaatcgttccgtatcgcactacttgccagcgagaccatcgccagttggttcaattcgaacatcttcgccggtcttgactcggcgctgcgcccctccggctacgacactgtgccctaccccatgcgcaacgccgccgagcgccacgacttctttgcggatttgcccgtgcggcgcaatgcggatgcggtgattgtcagctccttcgacatcgaaccggctgaagtggagcgactgaagcatatgcacgtgccgattgtcggcatcaacatcccctccaccgatgggttcgacgcaggcgtgagcattgatgattacgccgccacacgttcggctatcgagcacctgattgcactcggccaccggcatatcgcgttcgtcggcagcgcaccgaccgaaaccaatatgcgctacagtaccgaggctcgtttgcagggcgtcattgatgccgctgccgcccatccggggatcgagctaacgcccctgagcattcaacgcggtcttggcgaaagcaacgcggcattgaacgccgtactgaacgcctcccccagcatcaccgccttctgttttgaggatgatgaaatggccgcgcccgtgctgtatcgcctgcgtcaatacgggcggcgggtacctcaggacatttccatcatcggcttcgacgattccaccctgtccgccgccgtgggactgaccacgctgcatcaggacccgttcgcaatgggcgcgactgccgggcacatggtattggatgccattgccggcaagtcaatcgaaccggcattcgtacggccggacactccgctaatactgcgcgaaaccaccgcgccgcctgccgcgacagcagcgcccgcgcaggcgtgaccacgttaccaccgcaaaacgccgataaatcgatttttgcatgtgtgattcatatgatatcgttgtcatcatcaatacaacggttgggccttcacacagcagttcgggcgcgaccggaacaacccaaccacaacgcacccggaacaggagggaatcggcatgaccgcaaataacctcaatgacgactggtggaagcaggccgtcgtctaccagatctacccgcgcagcttcaaggacgtcaccggcgacggactcggcgacatcgccggcgtcaccgagaagatggactacctgaagaacctcggcgtcgacgcaatctggctctccccgttctacccctccgatctggcggacggcggctacgacgtaatcgactaccgcaacgtcgacccgcgcctaggcaccatggaagacttcgacgcgatggccaaggccgcgcatgaggccggcatcaaggtaatcgtggacatcgtgcccaatcacaccgccgacaagcacgtgttcttccaggaggccctcgccgccgagcccggctccccggcgcgcgaccgctacatcttccgcgacggccgcggcgagcatggcgaactgcccccgaacgactggcaatccttcttcggcggcccggcctgggcgcgcgtggccgacggccagtggtatctgcacctgttcgataaggcgcagccggacgtcaactggaagaatccggacatccacgaggagttcaagaagaccctgcgtttctggtccgaccacggcaccgacggcttccgcatcgacgtggcgcacggcctggccaaggacctcgaatccaagccgttggaagagctcggccgagaatacagcgtggtcggcgtgctgaatcatgacttcagccacccactgttcgaccgtcgcgaggtgcacgatatctaccgcgaatggcgcaaggtgttcaacgagtacaacccgccgcgctttgccgtggccgaggcgtgggtggtgcccgagcaccagcacctgtacgcttcgatggacgagctgggccagtccttcaacttcgacttcgcgcaagccaactggtatgccgacgagttccgcgaggccatcgccgccggactcaaggcggcggccgaaaccggcggttccaccaccacgtgggtcatgaacaatcacgacgtgccgcgcagcccctcccgttacggcctgccgcagatcaagggcgcgccctaccaccagctgccgcacgactggctgctgcgcaacggcactacctatcccgaggatcgcgagcttggcactcgccgcgcccgcgccgccgctttgatggagctcggcctgcccggcgccgcctatatctatcagggcgaggagctgggcctgtttgaggtggccgatattccgtgggatcacttggaggatccgaccgctttccacactgctcaggccacgatggacaagggccgcgacggctgccgcgtgccgctgccgtggaccgccgccgatgagccggccttggccgacttcagccgtccgactccggccgatgacggtaccggcgagaaccatgtgccgctgtgcgccgccggccagttcggcacgggcgcttccttcggcttctcgccggctacgcgcgctgagggcgtgacgccggccgccgacccgcacctgccgcaaccgctgtggttcaaggattacgcggtggacgtggagcaagccgacccggactcgatgctcgcgctgtatcgcgccgcactggcgattcgccaggagtcgctgaccgccacgcgcgacaccacggccgagcaggtggacatgggcgacgatgtggtggcgtacacccgcgcggcggttggcgggcgggtgttcacctcaatcaccaacttcggcaatgccccggtcgcgctgcccgatggctccgtggtgctggcgtccggcccgctgacccccgaaggccagctccccaccgacacttctgcgtgggttatcaagtagagcttttgcgagcttacccgacgccagtcatccatcttctccggatgctggcgtcgtcctttttcccggctaagctgtctccatttcggggatgactgccctttctttccattcgcgacatgccaaccccgaaatacttaataatattctatatacttaacaagagatgtgaatcttacagattttcgttaaggattgaggtcgacatggatgccgagcattacattcgcgagacacttggtctgccctgccaaatcacttcttgggatggcactgcctcactgccgctatttctgaccaacggacggacattcagcaaactcaccatcgacaacacgagcatgctaatcgcgagcggagaggctcacccattcagcatcacacgcgtcaccgccgacgccagcaggcttgagcagcggacggatctgcccattgtctttcagtttccccggctttctgcataccagcgaaaagccttgattcagaatcacgttcctttcatcgtgcccggtacccaactgtatatcccttcactgggcatggtgttcacccagcgcatctcctcacggccgctggagaacgcacaggatatcgaggtgcgacccttctcccccgcaacacagctggtctggctgtatttgctctactccaacgagagcaaagtccaatcagatattgcccgagcgcttcagtttaccgaagctcaggtcagcgttgccgtgacgctgttagaacagctggcattcgtgcaccgcaccaagcaaggccgcagcaatagcgtcgaactactgacttcaaggcagaccagccgacttgatttactgaaatcatcttggcatctcctgaagtcaccaatattcagcaaatataccgtcacgaatcgcaatcgccagatgattgccgacgagctgattccggccggcgaatttgctctttcgcgcaggacgcaactggccaccccaaaactgcgaatctatgccgttgaacgtcattggctcaagcagcacaacaaggaactatgcattatcgaccccgctttggaaaaggtgccagataatgcatatattctggagctgtggaggtacgatccccgcctacttgctcaatatacgcaggaagactaccttgccgaccccatttccacggccctgactcttggcgagattgccgacgaacgtttggaagacgccatacaagaatccatccgcaatactttctcaggagtgacaatatgacacaaggcctgcagctcatcagaacggcctttgccggctacgaagattcttacgtaatcatcggcggcaccgcttgtgacatcatcatgaccgacaacgacctggacttccgagccaccaaagatattgacatggtgctgattgccgagggacatcttcgcgagtttgcacaacgattgtggtctttcattcgcgatggcggatacacctctatcacgaagaactccgcacagcctcacctgtaccgtttcatgcaccccagtacgtacgggtatcccactatgatcgagctattttcacgtcaccctgacttccctattgtgccgaactcgttcctgacgccattgcatattgcaaacgacgtttccagcctgtcagccatcatgctgaacgacagctactatcggctactgcagcaaggccgcgaatcaatacaaggcatcagcgtgcttaacgagaaatatctcattcctttcaaggcgaaagcatggttggatctcaacgcccgagaacaacatggcgagcacgtagacggaaaagatctcaagaagcataaatatgatgtattccgtttggctcaactacttgctccagaggatcgcgtgtctctcaacgacgaggcctaccatgatctcgctgattttcttggggaaatatcccatgaaacgcttccgatgaagcagctcggcatacggggaacacagcaaggcatcattgatttgatagccggcgtatatcaactgtctatcccaccacgcgatgaatcttctaccacgatgtcagcgtaattttgtattccgcggaataaagccgttttgcgtcaccacgtggtgggtagtttgctacgtcgtggggattttactacgtggtggaggtttgactatatggtgggaccatgcgaaaggccgccgctccgaatgaatcggagcggcggccttttggtacgtgctgggtactctcctcaggcgcttacgcgccagcgggagctacaggggctcactgaacctgggcgcgggcgatcttgccggtgaaggagttggcctcgtcggcatccttgacgccatccttgttccaggagaacatggcgcgcagcttcgggccgacggtctcgatgcgctcgttggagtacttctcctgcagttccttgaagtgcggggcgccggcatcctgatcgtcgatgaactccttggcgaaggagccgtcctggatgcgcttcaggtggtattccatgcgcttgcggcagtcctcgttgatgacggtgttgacgtagtcgccgtactgggcggtgtcggagcaggaccaacgagccttgttcaggccgccctcgttcatcagatcgacgagcatcttgagctcgtggcagacctcgaagtaggcgatctccggctggtagccggcgtcggtcaggacttcgaagcccatctcgacgagcttgttcacgccacccatgagcacgttctgctcgccgaagagatcggtctcggtctcttccttgaaggtggtcttgatggcaccggcgcgcagagcaccaagggccttggcgtaggccagggtcagagcccaaccatcgccacgcggatcctgctcgacggccacgacgaccggcacgccacggccagcggcgtactcacgacgaacgatgtgacccgggcccttcggggcgaccatgaacaccgggtgatcctcagacggcttgatgtagccgtagtgaatgttgaagccatgagcgaacgcgacggcggcacccggcttgatgttgggctcgatgtcgttggcccagatggtgcgctggtactggtcgggggccaggatcatgatcacgtcggcctcggcggaagcctcggccacggacttgacctcgaggccctgctccttggcgaagtcgaccgacttggaggtcggacgcaggccgacgaccacgtcgacaccggaatcgcgcaggttcagcgcgtgggcgtggccctgggagccgtagccgatgattgcgaccttcttgccttcgagaacagaaagatcaccgtcgttctcataccagatctgtgctgccattattggcactccttttcagtagtggggtgtggcgccgctgggcgccggggtatctacggtgtgcagataagtcctgtgttgcgaggattgtgtccttcaaaccgaaatcaatcctaccgagaacgccgtcgcagccccgctggagtccacaacgtgagctaggtcactattggagtatggacagccgtgtgcagagaacgattctcgataacaactctgcacccttttgaacagaatcgcacaatcccacatatggggaaaggctgagatatcaacgatcttgcatattcggtgttcgtttgcctgcaagaaatcagcgcatagttgttattgagaatgattcgctgcgcgcaacaacacaaaaccgccgctcccgtatgggcgggaacggcggtttgctagcttaaatccccttcaggggcggcaatcactgaacctgggtacgagcgatcttgccgttgaaggactcggcctcgtccttgtccttggcctcggcgttgttccaggagaacatggcgcgcagcttcgggccgacggtctcgaggtgcgggtgagagtactcttcctgcagcttcttgaacttcggggcgccagcggcctggtcgtccatgaactccttggcgaaggagccgtcctgaatgcgcttgagctggtactgcatgcgcttcttggtctcctcggtgatgacggtggaggtgtagtcgccgtactgagcggtgtcggagcaggaccagcgagccttgttcaggccaccctcgttagccaggtcgaccagcatcttcagctcgtggaagacctcgaagtaggcgatctccggctggtagccagcctcggtcagcacgtcgaaaccgaggtcgcacaggtggttgatgccacccatgaggacgtcctgctcaccgaacagatcggtctcggtctcctcggtgaaggtggtcttgatggcacccgcacgcagagcgcccagagccttggcgtaagccaggcacagcggccaggtcttgccgtccgggtcctgctcgacggcaacgacgaccgggacgccacggccagcggcgtactcacgacgaacgatgtggcccgggcccttcggggcaaccatgaacaccgggtgatcctcggacggcttgatgtagccgtagtggatgttgaagccgtgggcgaaggccagggcagcgcccggcttcaggttcggctcaacttcttccttgtagaccttggcctggtactggtcaggcagaaggatcatcacaacgtcagcctcagcgacggcctcgccaaccggcttgacctcgaggccctgctccttggcgaactcgacagacttggaggtcggacgcaggccgacgaccacgtcgacaccggagtcacgcaggttcagcgcgtgagcgtgaccctgagagccgtagcccaagatggcgaccttcttgccatcgaacacggacagatcggcgtccttctcgtaccagatagttgctgccatttttggcgctccttttatttatttgtttatgggggtgaaatctttaattgttattgtgctctgctggttctgcagaaactgtttttagttttggctttccttgtgggcttttccgatatgcaggtttagtcctgttgcaccggaaaagcctcgcaggggttcacttcgtggaattgagatttttcacgttgtgaacttggcgatatttagttatggaggatttcacttggtaaagtcagcgtccttcgtctcacggcaggtcaggaccgacaccaggcagcacacggccatcacggcgaggtagaggcccacggagtggacgccccagtgggagctcagccaagtggcgatggtcggcacgaacgccgcgccgacgatggcggccaggttgtagccgatgccggagccggagtagcgcacgttcgcctcgaacagttcaggcaggaacgcgccgatcgggccgaaggcgacgcccatcagggcaaagccgacgcacaggaacaccatgttggcgaggaagttcttctggccgaccagaccaccgtccagcaggaacgggaagagcgcggcgaacacgacgagtgcgcaggaggagaaggtcagcacgcgcttgcggccgatcttgtccgcgtacaggcaggacagcacgatgaacagggcgaacacgcagatggagatcatgagcatgagcaggtattcctggttggtgaagccaaggccgccgccgccttcgccctgctccttggtgccccaagcgagggaccaggtggcgagcgtgtagaacagcgtgtaggtcacggccacgaggaaggtggcctgcagcacctgacgccaagacttgcggaagacctcggtcagcggggacttgacgaccttcttctgctcctgagccatacggaagatcggggtctcctccatgtgaacgcgaaccacgaggccgacgatcaccaggatggcggacagcaggaacggcacacgccagccccaagccagcatcgcgtcctgattgttgaaggattcgagcacgaagtaggtgccgttggacaggaagaagccgatcggggcaccgagctccgggaaggagccgtacagtgcgcgcttgtcttcaggcgcgttctcggtggcgaccagtgccgcaccggaccattcgccgcccaggccgatgccctggatgaagcgcagcaggcagaggatggcgactgcgccaacgccgacctgatcgtaggtgggcaggcagccaatcaggaaggtgccgacacccatggtcatgaggctcacgaccagcgtggtcttgcggcccatgcggtcaccgaagtggccgaagatcagcgagcccagcgggcgggcgatgaaggcgatggcgaaggtcagcaagctcatcagcagtgcgacggtggggttgtccttcgcggagaagaaggtgtgcgggaagtagtttgccgcggcggtgccgtaggcgtagaagtcatagaattcgatggcggtaccgaccatcgatgcggcgatcacggtcttgaccgaatcgcgtaccaaggtagcggctttacctgccgcctgccctaagccagtctcttcgactgctgcagtcattgttactcctgttttgctctcgttcactctcattggcgggcgattatttcgtctcacagggaggttgttgttctgttgctgtgttgttgccgtgtactgtccgctaccgtttccgtctgcgggattctgccgtaagccttgtgagcgcaacaaaaaaagccccgcaacttgcagggccttaccgattgtgtcagcttgattggccctgccttcgttgacggggcttcaagcatcaatgccgaattagtccgccagcgaagacgggctaataattcgtgcggatacaaacgcagaagcattgaatccagtcatcgcgtggcctcctttcggtatttcctcaggccgttcgacctgaactgaaatgtaaacataggtttggctgtcttgccaatccagcaagggttcacattgtggacgccacgtcgccgagacgaacgcccccgccgcggggaggaacgccgccggcggccggggagccggatcggcccgtcattgcgcggactcggcggtgagggtgacgattccggccagcagcaccatgacgatggcggacgggaagagcaggtaatagccgaagctgtgctcgaaggcgttcaccagtagcgcgccgatgatggcggcgagcgccagaccggccgagttggcgagcgcataaatgccgaggtcgtggccggctcggcgcgggtcgggcaaagagtccattaccagttcaaggcctaacgcatcgtagacgccgaaggcgaatccggagatcagcgcgaagagcagcatgccgttttcgcgtgccgtgccggtggaccagacgccgagcccccatgccaccgccacgccgatggcatacagcaggcaggatgccgccaccactgcagtggtggcgatgttccgttcctcgatcttctcggagatcggcccagcggcccaggacgcgagcgcagcaccgatgagcgttgccgcggccatgccggcgatgaggaggcccgcgggaatggtcaatggcgcggaagtgaacaccacagccttgccatacacccaaaagcgcacgagataccacagaaagaccccggtcagcccaacgcccgtcatcatgcacacgcgagcggcgaacacacgggcgaatgcaggcgcatgtgccggcggacgcagctggtcaaacacctggctcgactcgaatcgttgatgtggctgctcctggctggaaggctccttgggcagcatgatcacggtcaggatgccggaaaccgcaaacagcacggcggtgtaggcaaacggcgtgaaggagtcgaacatcacgccgagcgcacccatgcatacaccaagcgcttggccaagcatcacgccgataccgtgccagcgctcaatgcgcggacggaatttgtccggaacccgttcgctgatggcgctggccaacggcacggaaatcatcgcataggcaaactgcatgagcgcccagaagaaacacagcactacgaggcctgtgttccgccccagaaccagcgtgatcagcgcgcacagcacgccacccgccaccatccacggggtacggcggcccagaggaatacgtgtgcggtcggacagcgcggagaccaagggcatcgcgaacatggaggccaccacgccaacgactaccagcacggccagaggcaccaccaagtcagtggcgacgggcagcggacggctggtggacggattgatggtgaccgatatggcagaagcggtgtcgtagtcgaacaatcgcgccacggcgttgggcatggcgatggtgttcaacgccgcccaaggcgcgccgaccagaatcgaagccacgaaaaagccccaattaagacgggaaatctgaacagcggtgggtcgctgaccattggcggcgaccatcggatcgcgcatatcgagatatgcagacgacagatcaggcgcaggggcatccacgctggccgcggcagcggcagcagccgacgaaccggcggccgccagacgcacggcctgggcctcgggctgatcggcggatgcctcgggaggacgccgacgatctttgatggccagtcgggccacggcatccttgtcttcgggactcaatgccttgtcgagatccgggcggtcgtcaatacccgggcgcacgtacggttccaacatgttgctgctctttctttgctctcatcaccggcgggaggtaccggccagctccgactgagcatgacccgcaaccccgccacatgcaaaaccgcccgagcgcactagcttcagtgcactgcgggcggtttgttttccatggacccagcttacgccggacgcactacttggagcgcgcacagcggagtggcgtttatgggccaacggttagtcgatatcggcaatcggcgggttgctcagcagatcatcagtctcgtggtcaccggcggcatcggtccaggcgaggctggcgaccggagtggtgttatccgtgccgagtccgcggccgggctcgaagatgagggcggccttggtcttgccgtcggcagcgatccagcggaaggtgatggatgtgtcgccgtcggcttcgtagctgaactcgccattgaatgcaggcagttcgttgcggaacttggccagggcgttcagggccttcaccaccgggcgctcgaggttttcgtcgatttcggcggtggagtagtaatggcgattgatgtcacggccgttgttggtcttgcgcagcagttccatgtcgttgcggccggcgagcgcgcccacgtagtagacctgcggcactccgggcaggaagaactggactgcgcgggcggccagatagtgctggtcgttgcagccgagcgcggagtagtacgtgctgttgacctgatagaggtcgaggttgctggcggcggcaccggtggcggcctgggattcgccgtgggtgttggcgtggatggtgttgaccagattatcgacgtcctcgtcgggcacgaggcccttgaggctgcggtcgagctgatcggagccgatgtcgatcacgccgatgccgtcgtgcgtatcgagcacggtgacggcgttgtccgggcggatttcggtccagtggaccacgggttccacgtgaccggtgaacagcgagtgcaggagcagcggcggcagggcgaagtcgtagacgcggtccaccttggaggcgatttcaacctgcttcttgtagtagctatgcacctcaatgagaatttcgaggcctcgcttgacgccttcctcgcgtaggcgggagatgagcttgaacgtcttcggagtcatgaagcagctggtgccggcctccttggcgccgtagcccacggcgtcgagacggatgtagctgacgtgggatgcggccatctgatcgaagatggacatgaggtattcccagcccttgtcggaatcggtgtcaatatcaacctgctgcggagtgaagctgacccagaccaggcgggtcttgccggcgaacttgtagtgggtgaacggcaggcccgggcgcgggcggtagatgccggccagttcctcttcggtggcgccgttcgggaagacggagctcatggtcagaaacatcgggtaatactcggattcctcacctttttcaagcacgtcttggaactgcttggactcccagctcatgtggttgacgatggcatcgaccatgatgccgtgggtcttggaaagttcagcgacgtcgtcccagctgccgagacgcgggtcgactttggtgtggtcgatcgggtcaaagcctgcatccgcaccatcgaacggagtgaagaacggcaggatatgcacgccgtcatacacgccgtcgaagcgggtgcgcaggatgtcggtcatcgagctaagagtgccatcgccgagacgatcggcgtaagcgatgagctgcactttgtttttcatgggacctcccttggttcatggatgcaggtgcaatgtgtacgcagtgtatgcgtgcttttacatacttatacgtatcgaaccggtttgatattacctcgaaagggacgttgatgtccagtaataccgcaaaatgcgcgtgtcgaaccggtttgatgcggtgttctatgcagcttagcctgtccgactccaatgtgtccgattcgggcacaaccttctataattgagcattatgacctccacaccttctgttcacgacgtcgcgattcgtgcgaatgtctccgcgtccacggtttcgcgcgccttcacacggccggagcttgtctccgaaaaaactcgaaacagagtgttgcaagccgcctccgagctcaatttctccatttccagatcatcgatggcgctcaagtccgggcagagcttccgtatcgcgctactgctgagcaccccggtcacgacatggttcggaggcaacatcttcgaagggctcgacatggtctttcatcccgccggctatgatatctccatctaccccatcaacaatgtaaaaagcagggcggatttctttgacgttctgccggcgcgacgcaatgcggacgcagtgatagtcccctcgttcaacgtggattccagagaggtcgcgcgcctgaaaacgatgaatgtgcccattgcgggcatcaacaccgtctccaacgaaaacatgtcggtatgggcggccatcgacgatgcgcatggactgcggcttatcgtccggcatctggtgtccctgaggcatcgccgcatcacatacgtgtgcagggacccgcaatcgttgctgacactcagtgcggctcagcgcatcaggggattcaaggaggcctgcgcgcaggcccatatcaaagacgacgttctggttattccggacggagacgattcgttgcagtcgaccttcaacacattgatcaatatgcagcccatgcccaccgcgatctgctgccaagaggacggcatcgccataccattgatgtgccgtttacgggaattcgggttgaagattcccggcgacatctcgatcaccggtttcgatgacggaacctactcgcaggaattgggactgaccaccatacgccagcagccgcgattgatggggcacgacgtcgcggaaaaactgctcgatcttatcaatcataagacgatttccgaaccgtaccgaacctatccggccgagctgatcatccgatccaccaccgcgactccgcgggacgtcgacgaataggcgccgaataggggaagcggggccgtagagaggatacggccccgcttcggggatggggaggaggaacgatttactgctcgtcgccattcaacgtggtggcctccggcagcacaccgttggtgtcctcgaaggtcttccactccttggcccagccattggtgtatgcgtcggcgacggcgtcccacttcccggtttggttggcgtactccacaagagcgtcctgcacgtctgcaccccaggcgtcaagcgtggagaagctcctcaccatcggaacgccattcgtctcgtacttacgggcggcggcggtcagcgggttgtcgggctgatcctcatctccgtacgcggtgctcggcacggcgaagcccatatcctgagacatgaccttcttgccttcgtcgctgctgaacagccactcgatgaagtcgaaggtcgcctgcttgtccttctcgctggcgttcttgttcacggcccaggacgcgtcgtagatgccagcggggccgtactcctcctcgccggggatacccatgaaatacggcagcatgcccagatcctcatcggcgacctcgttgtccttgacctgcgtgtaggcccatacgccgttcgggtagaaggccacctctcccagcgagaactccgcggtcacgtcctcatacgtcttggaggtcaacagcgtgcgcgaggtcggacagttgttcatctccaagtcgaacagggccttgtagttgtccacgtacgtgcccttgatctcaggcatgaacgtggtgttgttgtccttatattcgtagaacagcggaatacgcgtcatatgggatgcgaaccggtacaggtccgaagattcgagtccgggggtcgccatggcgccttcgatgccgagatcgtccttatgggcctgcatgtcctccaccacggccttgaacgtatcccagtccttgatatcgtcggcggagtcgatgaccgcatagtccttcgaggcgtagtcgttgacgatcttcttgttatagatgatgccgtaccattccgcggcgtacggcaacgtgtagtggttgccgtcggtttgatacgagttggccttgccctcgtcggtcagcagcttgaaggcggcggagtcctggaccggctccatgtagtccttccacttgatgaaattggggtagccggtgatgctccacatcgtcggggcttcggtcttggccaactcggaggccagcgtattgtcgtagccgtcggcggccgtgagcaccttgacctgcacgcccgtctccttggtgtactgatcggcgagatcctccaactggtcgacgatctccttcttgttgttcacgaagtagaccttgcctttgtccggatcggccgccgacgaggatccgcaccccgccatcgcgcccatcgccatgacggccgcggcgacgatcgccatcattttcttggttttcatggttctttcctttccttgatgaaccgattggttcttgaaatgattggggctcagcccttgaccgccccagcggtgacgcccttgatgatgtacttctgtccgcacaggtagaacaccaggatgggcagcagcgccagtaccagagcgcccatcatcgcgcccatgtccacggatccgtatccgcccttcaggtactggatggcgatggacagcgtcttgaaccgttgaagatccaggcacagataggccatcaggaagtcgttccacacccacatcgtctccaggatcgccacggagataagagccggacgcatcatcggcaggacgatggtgaagaacgtgcggatggagccggcgccatcgatcatggccgcctcctcgatctccgagggaatcgacttaatcacgccggtgaagatgaacaccggcaatcccgcgccgaatcccagatacaccagccacatgccccacggcgtgttgaggtccaatgtgtcggtgagcttgctgagggggaacatgaccatctggaagggcaccaccacgcttgcgataaacgcgagatacataagcttggcgacccagttgttgaccctgacgatccaccatgcgcacatggagcagcacagcaggatcagcgccacggacccaagcgtaagtatgatcgtccatccgaagctcggaaggatatccgtcttttctatgccgcgctcgtaattctccaacccgacgaatgtgtcgccggtcggcaggctgaacacgtccttggagatgtagacgcgctttttgaaggagttgatgaagaccagcgcgatcggatagatccatatcagcgagatgatggcgaaaatggtcgtccacagcggcccgtgcctgagtttgtcggtcatgcctcgacctccttgctggtcgtaatgcggttctggatgaatgcgaccacagccacgatgatgaagaagatgacggccttcgcctgcgcgacgccctcgaatccggtgcggccgtacatggtgcggtagatgttgaacgcgagcatttcggatgcgtttgacggcgcgccgttggtcagggccaagttctggtcgaacatcttgaatccgttggccaccgtcaggaagctgcacaccgtcaccgacggcatcatcagcgggatgatgatcctgcgcataatctgaccgttcgatgcgccatcgacctgcgcggcctcgatcagatcagtcggcaggctttggaagcctgcaacgtagatgaccatcatatagccaatctgctgccagcacatcagaatgaccatgccccagaagccatagaccgccgacgtggtcagggaacggtcccacagcgcgaggacgccgttcaacagcagctgccagatatagcccagcacgatgccgccgatgaggttcggcatgaagaacaccgagcggaacagattcgccccgcgcatcgccttggtgaacatataggccagcaggaacgagacgacattgacgacgatggtcgtcgcgatggtgaacagcaccgaccgccacagcgcggctccgaattcgggatccgaaagcgcatccacataattcttcagccccacccacttggcatcggtcaccgtcctgaacgaggtaaagctcaggtagatacccatggcaagcggcacgacgaagaacaccgcgaaacacaacactgtaggtagtgcgaagagcgcccaccctctgcgcaccacttttccgacagtggtcattgtctgcatctcctctccgagatcgatatctgcagaagattcattcttgaatccatgcgcagcgtcatattgcaacgaagaccaaaatcttcttgtcttgaaaatagcatattttgcacacggttgcaaactctctttgaaaaatgctatgttattagcacagaatcactgaaaacacaggagtacatccgtatgaatacccaacctttcacgaacagcaaaggcgtcatttcagggaactgctggagaatcggagtcctctccgattcgctgctacgactggaatggtcagacaccggcgagttcaacgatgatgcgacgctcatggccgtcaaccgcgatttcggcacacccccggaatattccacctcgatcgccgacggtctgctgaccgtggaaacgaccgcgctacgtctgacctacgacatgcggcccttcagcaaggagggactcagcatcgtggtcaaaggcgtgaaagacaccaaaaccaatacctggcatttcggcgatgcgcaggagggcaacatgaaaggcacggcccgcacgctcgattgggccgacggcgccattcccctgaacgatggcgtggtctcccgcgacggctggtcggttctcgacgattcgaacacctgcctattcgccgacaatggtgacatcaagccccggaagaacgccgggattgacctgtacttcttcgggcacggccaccgttatgccgatgcggtggccgatttctgccgtctttcgggaaggtcgccgctactcccccgatacgccttgggcaactggtggagtcgtttccaccgctacacaagcgaagagtatgtagcattgatggatcggttcaagtccgagggcatcccgttcaccacctcggtgatcgacatggactggcatctggtggacgacgtcgaccccaagtacggctccggctggaccggctacacctggaaccgcaagctgatccccgatccgcaacgttttctgggggatctgcacgagcgcggctgccacgtctccctgaacgtgcatccgcgcgacggcatccgcgcgttcgaggactgctatccttcagcggcgaaaacgatggggattcccccggacagcggcgagccggtcgagttcgacctgaccgacccgcgcttcgtcagggcctacttcgacatacaccacgacctggaggccgacggcatcgacttctggtggatcgactggcagcagggcggcgtgacccgccagcccggcctggacccgctgtgggtgctcaaccacatgcactactgcgattccgcgcgcgacggccgctggccgctgatcctctcccggttcgccggccccggctcgcagcggtatccggtcggcttctccggcgacacgatcgtgacctgggagtcgttgagattccagccgtatttcacggccaccgcgtcgaacatcggttacggctggtggagccatgacatcggcggccacatgttcggctaccgcgacgaggagctggaagcccgctggtaccagctgggcgtgttcagcccgatcaaccgcctgcattccagctgctcgccgttctccggcaaggaaccatggaacttccgcccggagatccgtgcgatcatggacgatgcgctccgcctgcgccatcgcatgattccgtacctccacaccatgaactggcgcgcatcccggacaggccttcccctggtggagcccatgtattggggatcgcccgacatcgacgccgcataccacgttcccaacgaatacatgttcggcaccgaactgctggccgcgcccatcacggaaccgatggataaatcctcccgacggggcaaggccgacgtatggctgccgcagggcgactggttcgacttcttcaccgggcgccggtatagcgcgtcttcgcccaacggacggcgcatgaccgtctggcgtccgctcgacggaattcccgtgttcgcgaaggccggcggcatcgtgccgatgcagcccctgtccgagggggattccatcaactccgtcgacaacccgcagcatctggagatcatcgtcttccccggagcggacggcgacttcacgctgatggaggattcgggacattactctcggcagatcaccccggcgaccaccgcgatcacctatcgatggcgcaaggacggcgccacatccgcactcacggtatcgccagcccagggagacgttcacgctctgccggcccggagaacatgggatttcctgttccgaggcattaccgacagcgacatatccgtacaggccgacggcgcatccgtcgattcggatcgccggtatgatgccgaaaccctcacattgcaggtaacggtcgccgacgtatccacccgcagcgagatacgtgtcaccatcggcgacacgacgatggcccccgatccccgcatggaagacgtcttcgacatccttcggcatgccgaaatgcgatatctgaccaaggaacaggcttatgccgccatagcggagaacggcatcgacgcattggccacgatggattcactcgagcacgtcagcgggccggacatggaagattgctccgattcgcatatgccgagcgccgtccgtcaagcgctgacggaggtgctgctccgatcctagcccgcatgtcgcctctcccggaatacgccacgggagaggcgacagcagcccgtcacagacccatgtccaggcgaacgccgggccgtcaacacgtcgaggcacgacgcaccagatcgtaggaggtcacatacgtgcggaacggatccgccgacccctcgatgcgcgcgatcagcatatccacggcatgtcgcgcgtaatcatccacatgcgggtcgatcgtcgtcaatccgggcatgcagtactcggcatccggcacgttgtcgaacccaatgacctgcatatcctgcggcacgcgcacgccgcgccgctgcagctcatgaatcaccccgatggcgagcgcgtcgttcaggcacatgaccgcatccggacgcggcgcatccggatcgtccaacagccccgccaccgcatcgcggccgccggactgcacccaatccgcgttacggaccagccgccaatcgacctgcaggccacgctcctcatgggccaacacatagccgcgggtacgcatcgtgctggtggtttcgggccgcgactcgcggtcggcatccgggcatgcgttctccgcggtgccgccgatcaacgcgatcctacggcatcccgaatccagcagcgcccccaccgcggtgcgtacggcctccacgttcggcatcgtgacccaatcggccagtccctgcgtatcgtaatcgcccacaatcaccaacggatacggctggtgcagtatcgtgcgatccgtgatcggcgagcccatgaagaaaatccagccgtccgcggccagcttcttcgtctccgggatcgcctgcgccaagccgccggcgctgttgtaggtatcggtgatcaccgcgtacccgcgggaacgtgccgccgccacgatgctgtcggcgagatagggcatgaacggctggcagaaatcggtgatggccagtccgatgagcttcgtgccgccggttttcatggcgcgggcggacacgttaacgcggtatccgaggcgttcgatggcatcctggacacgctggcgcgtctccgggcgcatactgccggtgttgttcagcacattcgacaccgttttgatggagacgcccgtctcgcgcgccacgtcggtgatggtcacccgtttcgccacagcacccctctcgtcgcaccatcgggcatgttccgcacggttcaggcggaacgcccgtctgattccagcataacgcgttttccccggccggtccggtcccctccgcccggcccgggaagcaagggccgtgcgatccgtccttctccggaacggaccgcgcggcccatcgcgtcacttgatgtgcagggcggtccaactcaccggcggcagggagacgcggaccacgccggactcggcatcgtacatggccgacccattggcgtgcggggtcacacggttctggtcgtagagcgtattcgcggcgaacagatcgtcgtcgtgcagcgtctgcgcctcgacggatgccggctgcgcgccgtcctgcagcctgatctcgaactcggcggtcgcctcgagcgaacggttcaccgcaaacacggcgagcgagccgtcggcgcagcgcacggccacggcgttcacgccgtcgacctcgccatagcgcggcgtatccacggtgccggcggacagcttcggctccagcacggtgccgcccttggccaggcgcgcggtcacggagaacgggtggaacgtggtctggcgccaggccgggccgcccggctccgtcatgatcggggcgatgacattgaccagctgcgccaggctggcggcgcgcacgcggtcggcgttcttgagcagcgtgatcatcagatcgccgaacaccacggcgtcggcggcggtgtagatgtcctccagcagacgcggggccaccggccagttgccgatgccctcgggggtcttgctcggctcctcaccctggtaccagacattccattcatcgaacgagatgtacacgtcgtgcgcgctcttcagatgggccttggtggcgtcgatggtggcggccacgtccttgatgaagccgtccatatccacgccggaggccaggaagctggccatgtcgcgcgtgccgtcctccttgaagaacggctggtagtaggcgtggcaggagacgaagttcacgttctcgtaggtcttctcaagaacggtctgctcccacttgccgaaggtcggcatgccatgggcggaggagccgcacaccaccagttccacatccggatcgatctggcgcatgccggcggccacggaggcggcgagcatgccgtagtcctcggcggacttgtggccgagctgccacgggccgtccatctcgttgcccaggcaccacatgcggatatcgaacggcttgtcggcgccgttggcgcggcgacgttccgacagctcggtgccgccgggcacgttcgcgtactccagcaggtccagggcctcctgcaggccgcgcgtgcccaggttgacggcctccatcagctcgttgccgccggtggcctcaagccattcggccatctcgtgcaggccgaattcgttggtttcggtggaatgccaggccagatcgagtcgacggggacgttcctgcttggggccgatgccgtcctcccagcggtagccggacacgaagttgccgcccgggtagcggatggtggtggcgccgagttccttgaccaggtcgatgacgtccttgcggaagccgtgctcgtcggcggtcgggtggtcgggctcgtagatgccggtgtacacgcaacggccaaggtgctcgacgaacgaaccgaacagacgattgttgaccggagcgacctcaaaatcgtcatcgacgacgagacgtgcggtcagatggtcctgctggggcatgggattcctttctacatatctgcatgcactctgcatacgtgacacgtatccatacaacgatgtaccgcggaggcgcgggcgaccggggacatccgtgtggcagccaccagtgtagtacaaccttgtactgactgccggaaggcgcgtcgcagagacggctgagaccttttggcgcaccactgcagcaaaaaagatcccaagaagtcgaattacagtcccatccgacgcatagccaccgtgaacatacggcaaaaggcatcaaccacgtcacccgtccacccgctacattcacaagcagtaccgcccactctgcatcattcgcatatgcaaaggccgcgaaccgtacgatgacggttcgcggccccctgacatgccattaggccacccggctcgcaccggctgttcggcctgccggctcagccctcgcgcttgggcgcctggctggccacgcgggtcaggcgcggcgggcggcgcgtggacacgaacagcggctgcacctcgaccagcgggttgtacggcgccaggccgaaccacttgaccggggaaccggccacgcggcggatcgcgtacttgatctgcagcgagagggcgccacggccggagaccttcgactcgggcatcagcgccttgtggatcaccacgtagcggatggtgccgatgccgggatcggcgtcaagcttcgggtagatcgactgctggttcggcagctcgccggtcttctccagatcgtgcatgatctgatgcaggtaggccgggatggactgcgagaccttgaagccgaggcggatgcgcacacggaacaggtagtcggtaccgaagctctcgaccgaatactcacgggtgaacggctcgtcggtggtctcgacggccaccgcccaccatgcgcgggcgcgcttggggtggtcggcgaagatcgagaagaagatgtccgtatcgagacgcttcaggtccggatcgctggtcaggtagacgatgttgtccgcgaaccggtggatgcggctatcgccgtgcagcttgtccagcgcggggaggaagtccttcggcatcatgtgccgacgctgcgagcgctccagtttggtgccctcgttccacgtgtacatgatcatgaggatcgccagcgtgagcagcagcgtgaaccagccgccgtgcaggaacttggccatcgaggcggcgaagaacaggacctggatcgccaggaacacgacggtgaacacaacggcgccgaacttgttgctgcggtgccacaggtagatgcccagcaggatcgtggtggtgatcatcgtgatggtcagtgccaagccgtaggccgccgagatatgttccgaatcgcggaacagcagcagcacggccagcgtggccacgcacagcaccacgttgacgaccggaatgtacagctggccgcgggtacgggcagggtaacggacctgcagatgcggcatccagttgaggccggtggcctcggagaccatggtgaacgcgcccgtaatcagcgcctgggaggcgatgatgccggcggtgaccgacagcacgacggccacatagcgcacgttcggatccatcatctggaagaacgggttgatcccctcggcgtcggccagttcggggttgttctggttgcgcagcatccacgcgccctggccgaagtagttgagcaccagcgccaccttgatgaacggccaggtgaagtagatgttgccgcggcccacgtggcccatatccgagtacagcgcctcggcgccggtggtcgaaaggaacacggtgcccatcagcgccagaccggtggcgttattcggactgaacaggaacttgatgccgtagtacgggttgagtgcggcgagcacggaccagtcgttgccgatggctaccacgccgacgatcgccaggaacgcgaaccagaccatcaccaccgagccgaagaccttgccgatcgattcggtgccgcgcgactgcacggcgaacaggatcacgatgatcaccgcggtgatcatcatcgtcagatccttgttctcggtgaacagatgctccaacgccggcagcgtcttcaggccttcgacggcggacgagatcgacacggccggcgtcagcaccgagtccgccaggaaggccgcgccgccgagcatggccggtatgacgagccatgcgccgtatttgcgaatcaacgagtacagagcaaagatgattctgcagaaacggacatccaaacatcccaattcacatcacacatgaccgattctccagaatcggacacacagaacacatttttcggaactcagacgtccgattcggcagaatcggacacatgtgcacaagtcggatgatgagcacgaccatcgacgggcgtccgctggttgtggacgccgctgaaatcgatgcgatccacaccgggcacacgcatgaagacgcgcagcatcaacgcgtggtatcgcctggcaccagcgtcatgggaataagcacgttcggctcgaacggcttgggaatattcttgcgtgaagcgttagctgcggccacttcctcattggcaatagcctgcacgatatggtcggctgccgactgtgcgatcgccgagaaatcctgcgcgaccgcggtcagcttcatgccggccaaatcggttaaatacgtgccatcgtaggcaacgatctgcagctcgtcaggaatggaaattccgcggctcaacgcttcgcgcacgcagaacgacgcaccaatgtcggaactgaccacggcatcgacgccgtcggtcgccaccttgtcgagcgcattgctgaccgcacgatgacagccggcaaaatccatcacttcgccagcttcaacatactcgtatttcacgcctgcggaggtcaattcctgttccaacgtgaggtagtagcgcaccgtcgggaacgtggtctttcccaaatcgaacgatccttcctcgacttctccgcgcacagccaaatcgaagaattgatctcgcggaccgccaatcatcaccacatgtttggcaccattgcggatcagcatctgcgcaatcaatcgcccaccctgctcgtggtcggatccaatcgacgaaataccgtctccaagcacacggtcgaacgcgacgatcgggcgatgaatcgacgtccaataatcgccgggatgcgaagtgtgcgcacacatgacgatgccgtccatcatgtgccgacgcaacatgtcgacatactggatttcgccctccgcctcatctgcggtagagcacaacatagtgcgtaatccttgcgcggcgagcgcatgctgcagatgtgcggtaaacgttgcaaagaacggatgacgaatggtaggcacgatgacgccgaccagattcgtacgatcatgatacagattgcgggcaagctcgttcggcacataattgagcagttgcatggccttacgcacgcggtcgcgcatgtcatcagacacgtacccattgccgttcaccaccagcgagacggtgctcagagacaccccggccttcttcgccacatcgcgcatgccgaccatgatcgcaccttccccgtcatcactgttctatcgttgtatgctcacgtgcttaccacgaaatattacattcatttacattctctcgaacctgttcgacagtccggcaacgaaatacagcttcttagtgtcgactcctgcggaggcgaaggccttcagcagcggcttggtctggtcgaatgcaatcaccagcgttgcatccggactggcggccttgatggcggttgcgctcagtctctttcacgttactcagcgaccgtccgtgtaacgtgaaaattacgccggattggcaagcagcgcaatgccgaaaccggcggccacgcaaatgagaggcaccgcgacggttgctattccatagcccagagccagcgtaaaacgacgctggcgaatcaatgaaaccacttcgttgagcgccgtggagaatgttgagaaaccaccgagaaatccgacaacgaacatcatgaccgtgtccatatccaccgattgcgaatagtaggacatcatggcgatgcccgcgcatagcgaggcgacgccgttgatgacgagcgtggatagcgggaagttgcggttcgttcttcgattctcgcggttccagccttgttgaattgacacgtcgagcacgtaacgggccatggctcccagaccgccgaacagacagatcatccacatcatcagcgcacctccccggtagtcgggtcggcgacaagcgaaatctccgcagtgatcggtttgggctcgaagctgggtggaagcgggttggccggctgctggattggctgcgactgctgaatctcgggcagctgccccaagtctggagtatccggctcgcgcagcaacggatgcgccggctgcgtcagctgaggaacggccagcggaggaatctgcggaacgcggactgtctgcataggctggctggcggtcggcggcacggttggtgtttcgactcgcggaacctgtcccgtctgtgcaatctgctgggccgtctgcgcggcttccattgcggcctgcgcggcagaacgcgccacgtcggccactttcacatggcgtacgccctgcgtgtccgattcggcagaatcggacacggaaacagctgaaaacgcaccccgaacccgctttcgagtactccgtgacagcagtgcctgcatcagaaccacgccggcggcggcagtgagcaaaccgcctgcaaaatttcccgcaagatagccaagcgcactggcgatatgccgctcgtgcagaccttccaccgtttccagcatcacgccggacatcgtcgaaagcccgccgagcaagccgagcccaacgccacggctgacaacctgccgcacccggcgacgcagccacgaagcggtcgccatgaattcggtcagcatcgcgaacaggaagcaggcgaccatattcgacacaaacgtgcccacaacgaatggcgtcccgctgaccgacggcaggagcatatccaacgcatgccgacagccgactccaacaaatccaccgacgaacaccacaacatacatcagtccgtcggcgagcggattgaaccgcgcctgcatacgtttcatcggcgccaggggaatcgtaggcggatccatggtgttagcggcgggcgcggttgcaccagcatgcgtcacctcaacagtgtcgattgcctgcgtgatgggatgtgagtcctcacccgcagtcaccacgtctcccggcgattgttcttgcgattccattgcgctccccctgtactggccttccgcggacagcgttgttccgcccataggccgtgcaacaacgagctgggccgcggttgccaccttcctaacgcatatgagtttacacggagcgccaacgtatgcaccctggatgtccgattccgcaaattcgtacatccagagtccagccgaattcagccaggctcagtcaagccgggcatcacacagccgccgcatcgcaggtcgcacctcgcgctcctcctcgccactgaacagcaccaccagatagtcgccggcacgcagccgtgtatcgccgcgcggcacgatctcgctttcgccgcgacgcaggccgatgatcaggcacccagacggccaacgcacgtcacgcacccgcttgccgtccgcaatcgctcccatttccaatggcagttccataatgccgctgcccacatggcttgcgatcgccatctgcatgccttgcgcgcgcacgtaccgctccagcaactccccataaatcggtttggtgcgcagcaaatcggacaccaacagcgcgatgaaagcgacggccgcgaccggcagcatgtgcgtcaacgttccagacatctccacagccaacagaatcgacgtgatcggcgttttcacggacgcggcgagcgtgcccgtcatcacgcacaccgcaaacactgccactgcgtcggatggcagatcaccgaatcgatgcaacacttcaccgcagatgccgccggccaacgaaccgaccgcaagaatcggcatgaaaataccgccaggcgcgcctgagccgaaactcgtagatgtgaacagcatcttcgccacgaacagcagacacagcattcccaagccgacgcgcgcatgttcggcggtatcaatcagattcgagccgccgccgagcacatcgggcaaccagatgccgacaggcaacgcgatcgcaatcgcaatcatcgggcggctccatgccggcagtttgccgtacagcgtctggaagccaagcaacgagcggttcatcagcgaaccaaccaaaccggccaccaatcccaacggaatcagccacacatactcttccaacgacagctgaccgatatcaccgaaatccaaaaccggacgcagaccgaaacagtattttgagacgaaatcggcggtcagcgatgcggcggtggcacccatcagaatcgcaggggaaaaactccgatgcaccccttccaaagcgaacatcatgccggacagcggcgcgctgaacgcggcggacaagccggccgcggcaccggcggtgaccagataatgctcctgcatgtcctcacggcggcggccgcgcaaacggtgagatacacactgcgcgcccgacgcaccaatctgaatggacggcccctcacggccgagcgacagaccaaacaacgcgcccaacagtccaccgacgaaacggactggcagaatcgtctgccaacgcatcttcatcccgcatatcaccacgccgttggtctgcgggatgccgctgccaccagccatcggctccttgccgaccatccacgcgatcgccagcgcggccgccaccgcggcaaccgcccacggcgcaatcagccacggggtctcgcgaatccgcgcatatatccaacgggacgcatccgtgccgtattcgatgccgagacggtatacgacaaccagcaatcctgaaaccagaccaatgactatgccggccgccgccatcttccacttcaagtggtcgaatcgcggaatcagccggcggatatcatgtgccgcgtcgttaccagtcaagccgggaaattcgttgcagacggtcagtcgaccagcgaattgatctggatgacatggtcgcgctgcggaccggtgccgatcgcggagatacggcagccgctcagctcttccaaacgcttgacgtaggcctggcaggtggcgggcagctcgtcgaaggagtggcagtcggagatgtcctcatcccagccgggcatggtctcgtaaatcggcttggcggcggcgaaagcggcctgatcggtcggcatatcgtcgtgacgttcgccgtccacgtcgtaggccacgcagatcggaatctccttcaggccggtgagcacgtcgagcttggtgagcacgatgtcggtcaggccgttgacctgggaggcgtaacggttgacgaccgcatcgaaccagccgcaacgacgcgggcggccggtggtcacgccgaactcgtggccctgctgacgcagccattcgccggactcgtccagcagttcggtggggaatgggccttcgcccacgcgggtgacgtaggccttggagacgccgattacgcgggtgatcttggtggggcccacgccggtgccggtgcaggcgccgccggcggtcgggttggaagaggtgacgaacgggtaggtgccgtggtccacgtcaagcatggtggcctgagcgccttcaaacagtacggtcttgccttcgtcaagcgccttgttgagaatcaggccggtgttggccacgtacggcttgaggcgttcgccgagcttcagcagctcctcggtggtctggtccacgtcgatcggacgacggttgtagagcttgaccagcatctggttcttctggtgcaggctggcctccaccttgtcgtgcagatggtcggcgttgaacaggtcatgcacgcggatgccgacacggttgatcttgtccgcgtaggctgggccgatgccacggccggtggtgccgatcttgtgcttgccaaggaagcgttcagtcaccttgtcgagtgtgcggtggtagggcgcgatgatgtg

SEQ ID NO: 350 - DNA, 2842 bp, Unknown
  R42_10m  MAG No. k141_16927
gcgcctcatggactggctggagacttggtaccacgagcgggccgaggccaacctgcgtccgaacagcaggcgaagctacgagaacgccatcgtgcggctgaacaggatagccggcgcgaggcgcatcaactcgctgggccataaggatatggccgacattcaggacggcctgaagtgctacagcccgaagacagccacgatcacttggtccgtcctgaagaacgcgcttgaggccgcgcgtgacgaaaacctcatacggaggaacccggccaagatggtccgcccggtgtcgggcaggcgcaggccgatgaaggtcctgtcccccgcgcaggcggcgaagctgataaggaacgagcccgacccgatgtggcgtctcaactggctgctcgccttcgccaccggactgaggcagggcgaacggctcggactgacgatggacgagctgacgacgctgaacgacagacgcgccttggtgatcgaccaccagttgcagcgggtcccggactctgggagggcggactggcctctgggcgaggacgtgaccgatctgggcaacggcttctggctgtgcccgcccaagacggacagcggcgagagaatcgtggtcttggacgatgtgatgtgcggggcgctggacgaatggctcgccatacgcaagcagaaaggcgtggactcccccatgctgtccgtcaccttgtaacgcagccgctccccctgcacgtcgatctcgaacaggtcgcctttcttggcgagcccgaggttcgtgaacatcagcctgtccgccagaccccggtgggccgcgacgaccgcgtgcgtggattcgtcccccaccggcagcgacgtcccgtagaggtgccccgccgacttctccagcgtggcggcgtccgtgccgtggcgcaccggcaggctgatgtgcagcctcggatagcggaccgcccccattgtgcccctgccgtccacgtcgagcagcccacggtactccttgtccccccccgctgtatgaggtccttgagaagttgtccccggcctcgccaagcaccgactgcggccttgccgaaaggccctcgttgtatgccttgtcttcctcgatcatcccctgccgtccggtgtgggcagggctgcggcctcggcgctcgcggtctgcccggcggagtcgatggcttgcaggacgaatggtgcgctgagcgtcagcccgccgagcagcaggaggacgacgccgagccatccggagatgtcacgtttcataatccgccttccaagcgagcgatggaaaaggccacggccgggggaacccggaaccgtggccttggcttccgaaggggtctgtgccccgaaggccgtttacgcgtggcgcctacgctaccaaatcattaccgctcacaataccatcctgccaacattagtcagcgcgacgccgacgatgaacgaagatcaatgcaatcaccactccggcgattagggcggtcacaccaccagcaatcatgtaagccagccacgtcgagacaaggaacgtaccctttcttcccagcgtcttggttgacgtggtcgcaccattggcggtgttcgtcgcggagtattgcatgcagtcggagccgccatcggaacggcactgctccaccttcttccacgccgcctgctgacgctcatactcccgcccgatgagcccggcctcacatgggacattatccgccgcggtgccaacgccgtccgggttcgtcttgcaatcctgcgtgtaccagtccttcagatccgggtattgggcggccgctttcatctggtactccagaatcggattcacatccttgtactgggccgggtcaaccgtcagcaacgcattcaggtccacctcaccgaaccctcgcttgcgttcagggtcaatgaccggcttgcccttgccgctcttcgtgttgcgtatcaaagactggatgatctggttgcccgtcgcgtcgggccacttctgcatggccagcgccaagtacgatgacaacaccgctgccgcggttgacgtgccgccattgcccgcgatatcgtagacattcgaaagaggattgaccgagtctaatacgttcatgccataggacagcaccgccacattgccgtccataacatccgaggtgggagctaggttcccagactcgtccacgctgttcaccatcaccacaccggggaaggtctccatgctgcgcgggtcgccggtcagatcatccaagccgggattcatgtcattcgcacgtccttcgaccatgacgaccccatgacgcagggcatccacatacccagcataatccgtgctgacgagagcacctccctgagaacggttgaggatgcgagcgccccagtccaccgccgtcttgacatctgcaccactgtcgcttgtcgcatcacccgcgagtttctgatcgcaaggtgtcacagcaggccccgcattaaccgccccatccgtaatatgcaacacgtccgctttgggcgccgaccccatgattccgggccacttcgaggtgtagttgcttccatcacccacgatccatgccagcatgtcggtgccgtgcgaggagtagtagccgccttcaccggacttgatcgtcgcggtcaacggcttgccgtccaccttgcactcgaccgtcttgtcatccacgttatggaatcgtcccagcttgtatgtgatcgaggcatgcttcaacgcgggataatcctccaccgcctgcgaatccagcaccgccaccttcacaccggaaccatcaatgccctgcttccacgcggcagccaccacatcgttcgccaccggccaacgcccgtcatccgccgcgaacgcgccgggcgtccacgcgcaaggcaacacaca

SEQ ID NO: 351 - DNA, 19963 bp, Unknown
  R42_10m  MAG No. k141_18928
cacagaccacccaggcctcacaggcctcacagccgagcctgaacttccccaccgcacggcacatcgacctgcacatcatcctgctgatcgtgctgctcgccccggcaatgggcatccagaactccaccgcccgcaagctgtcggtgccggacctgcccaccaccgtgctcacgatgacgctgaccggcgtcgtcgcagacgcttcggcacacggccaccagcagtcgaagctcgggcggcgtgcggtcgtaatgctggcgctggcgtctggcgcgctgaccggcgcgcttctgcaggcgcacggacacgagaacatcatcttgatggtgatgctcgggtgtctgctggcggtcatcgcgatgatgattccgcacgtccattcggatgcgccgtgggtcaccggccggcaatagcctctggcgcatactttcgccatatgagacaaaaacggccacgccacagcgcaaccagtaggaaacgcccggcaatctcggctctcctcgatatgttggatacccgttgtttgaaacaggccctccgcaagatacaaacaggggcagtgagaaggagaggtaaatatgactgacgcacagcaggcgaacggcaaccagcccgaatcccagaaccaagcagaagcgacggcacagccgcacaacaagcgagtgacgaagtgggtcgctatagtgattgccatcgtggcggtggcgattatcgccgcggtcgcggtgttcggcacccgcgcatacagcgcgtctcagtacgatagtgcagtggccgcctgcgccgccgcctcggaagacgtacgtaacgccaccaacgactacaacaacttggtcaatggcgatgttacagaagccgccgctctgaccaaggcagacgtctcggacgcctccgctctcgacgcgctgtccaaggaactgaccgtggaactgccgacgtacgaaggctgcgtggccgacgacaccaagggctaccaggccgcgaccaagaaactcgaacagcaggtcacgtggtaccacgagcacaccacgtcgctgcagaaggctgttgacgccgtcaacgcggtcaagaagtaagacgagggcggtctccctcacgttttcaggatcggacagcgctcaagtcgcggcaacgcgcgatgtcggccggtcctgcacggcccgaaacggcagaaatcccgcgccccttacgttcggacgcgggatttctgccgtttttgagtcacggattgggactatagcccagtctttgccccagagttgtctattcaggattaccctctcggccgtatctcatgagcaggacgtgtaaaaacaaaaaaccctcgcaaatccgcgagggttattggctggggtgcctggactcgaaccaagaatggctgaaccagaatcagctgtgttgccaattacaccacaccccaatttggcttggcgtagcaactccgaagagttgttcgtcgtacccccaaccggatttgaaccggtgttggcgccgtgagagggcgtagtcctagaccgctagacgatgggggcatattcagtttttcaaccggctacgtggcgaaccgcgcaacaggtagatatattacgcgctactctgctctcacgcaaatcccggcgtgtcgcgccattttccgccgttctgcgggaacaccccatgcaacgcgaaagcgggcatccgtatgtacggatgcccgccatgcgtcacgctcccatcatccgccggcgtgcggtggacgacgcatcacaggtgctcgcgcaagcccttcaggcgagcgagggaaaccggcttgccaacgatctccatcgattcgaacagcggcggggagacgcggcggccggacatggccacacggaccgggccgaaggcgaggcgcggcttgtagccggcgtcctcgacgagggccttgttcagggtctcgtgcaggttgtcggtcttccaatcggcctcatccacagcctcaagtgcggcgatggcggcatccagcacctcgccggcagaatccttgagctgcttcttggcgtcgtccgcaggctccagatactcctcggtggacagcagggagccgaccatgccggcgacctcgcccagcaggcgcacgcgcggctggaccagcggagcggcggcggtcagcacctcacgctcacggtcggtcagggcatcccagttgtcggcggaaaccacaccatcgcggtgcaggtacagcaccgagcggcgcaggaagtcctcgggctcgagcatacggatgtgctcggcgttgatggagatggccttgtcgatgtcgaaacgggccgggttggccttgacgtcacgcacatcgaacttctcgaccatctcgtccatggagaacacgtcgcgatccggcgcgatcgaccagccgagcagggccaggtagttgagcaggccctcgcggatgaagccgttgtcgcggtggttgaacaggttggattccggatcgcgcttggagagcttcttgttgccctgtcccatcacgtacggcatgtggccgaacaacggcatctccttggcgatgcccagctccatcaggtaacggtaaagcacgatctggcgcggggtggagctcaggaggtcctcgccacgcagcacgacgttgacttccatcatcgcgtcgtcgaccgggttggtcagcgtgtacagcgggtcgccgttcgggcgcacgatcacgtagtccggcacggagccggccttgaactcgatggtgccacgaatcagatcgtcgaaggcgatgtcttcatcaggcatcttgatacgtagcgcaggcttgcggccctcggcgcggaaggcggccttctgctcatcggtcaggttgcggtcgtagccatcgtagccgaactcggccggacggccggcggcaaggttgcgctccttgatttcctcgggagtggagaaggactcgtaggcgtagccggcttcgagcagcttggcggcaacatccttgtagatggcggtacgctcggactggcggtacgggccgtgagggccacccacatcgatgccctcgtcccagtcgatacccagccaacgcagggattcgagaatctggttgtagctttcttcggagtcgcgcacggcgtcggtgtcttcgatacggaagatcagcgtgccgccggtggcgcgagcttccgcccagttgaacagggcggtacgaatcatgccgacgtgcggggtgccggtcggcgacgggcagaagcgcacacgaacgttcttgggcagttcgggtttggtgttttcagcatcagtcataatcccctattgtgccgcgcgcgccggacgcggagagcagcgctcctcgctcttttgcttcgttattgacatttcgggccaacaccatcccaaaacggccattttccaacgaaatctcttttgcctgtctttggtagtgcccgatatcttgatgcctgtcttcacacctgttttgacacctactttggcgccatccacacgcccgcacgcaaggcttcgacaccatttggcgcaactgttgagttttttacccaaacgatggaagaataggagtcgacgcaatcgtcttatgaaaggggaatcaatgaccgatcccaacaacgtgccgttgccgcagatgcccgcgcccaacggtaccccggcccagcagaatcccagcacgccgcaatacggcgcacctgctccggcccccgcacagccagattatgggcaattcaacgctccggcccccgcacagccggcctacggccagcccgcatacgggcagcccgctcccgattcttccgcacccggcgcagcgcccggtgcaactcccgcctatggtcagcccgccgccgacccgtacgcggcgaatgcggctccgcaattccccgctcccggcgcggctcctacctacggccagcccggaccggacgccaacgcttacggtcaggtgccacccgcatacaaccagtacgccgctcccactgccacagcagccgtgccgttgaacaagccgtattacgactgccccttccctgaggcattcctccgtttctggaagaagtatgtggtcttcaagggacgtgcctcccgcagcgagttctggtggtggacgttggcctctgtcggcatcagcgtcctgctgagcctcctcagcagtgccacggacgacaagctcgggttcctttccagcatttggagtctggccatcctgattcccagtctggcgctcgccgttcgccgtctgcatgacacggacaagcccggctggtgggtcgccatcttctatggcgcgatggccctcggcatgatcatcatggttgccggcggtggcgcagcactgtatggcgccttcggcagccttagcaactccagctatggagccatggcaaccggcggcctcggtgccatggccattggcggactgattacgctcgctggttcaatcgtctacatcgtgttcatggctatgcccagcaagccggaaggcgcacgtttcgacgatgacgcagtagctgccccgatgcctcagggcgcttacggcgcaccgtacggcgctcccgcaaccccggacttcaaccaggccgctccgggcaccgctccgaacgcacccgctcctgacttcaaccagccagccccagcctatggtcagccgaccgcaccggctcctgactacggccagcccgctgtgcctacgcccgattacggtcaggtaccggttccgcagtacggccagccggagaccccggccccgcagtacggccagcccgacgctcaggccccacagtacggccaggttccgccgattcccgaaaacgttgatgatgggtccaccgtgctgtctccgcacacggctcccaccgatgacaacgcacagaaaccctggcaaggccagtgactgacgccggcgaagttcgcttaagaagttcgcctcatcactcatgaagcccaacaatgaggccccactcatcaagcggcggtagtattccccgccgttcagtaagccaatgccctgtgtactggatcattccagcacacagggcattgtgcgttattgcggcccctctcttcgcgcaacattccccggaatgcgttacggtggaggatggacgctgcgccgagctactcctacaagctgcctacggagagcgtttgggagatcacatgggattctcccgggcccagcgtcacgatgcggtcgcggcataccgccgcttcaaccgccacgaaaccgcgccattcgcccggcttggtgtagctcatattgtcgccgtccgctcccggattccacaccacggtttgcggcgacccggtacggctgatatgaatcgcacgccccaacatgtcatcgcgcagttccagacgcgcatccgagtaatacacacgattcaccggctgctcgccaaacgtcaccacttgcgcgtcctgtgttttcggcggaaacccttcttcggtggcatccagatacgtcgctccctgcaatccgaccagctgagcaccggacacatcgccgacatgcagataggaatgcaacgcggcctcgtacgacataggcgccgtgccggtgttggtcacggtcaggctcatggtcagcgcattgcccgtttgcacgtcatacacggcatgaaactgagcacccggctcgtcatcgaaccaaggcacttcattgtcgttcagctgctgcgaatccaacacataccgtatgtggctgtcgtcgaatgaaccctcgtccaacgcccaccgacgcagacgtgcaaaaccgtgggatggattgagtgccagctgcttgccatgcgcaaaacccgggccgaaccacgggaagcagatcggcactcccccgccgagcgacttaccggcctcgatatgccacgtactcggcgtccacaccacatccgcctgcccggccggggcccagcgcaacagatgcgctccgtaatcgctgattaccacgctgccgccattgttggcgagcatacgcaaatcgacaccattgcccataagtttcccattcccattgtgcgaacgatacttttcactaaataggatacttccttaacaaaaaagaatcgcaaagtatggccgcaggatgcacaaaggccgtgccaccccattcgccgacgaccgccacgcgccaatcgtgcgcaagatcatcggatgcgactggcaatagatgctggtcacgcgggccagtgcccggctcaagcacgacttccccctcgcgcaccagttcgccgtgctcccaatggtgcacataaacgcgatccgcacccaaatcgctggtcagcacgcggccgtccggcactggctgcacccagtgggcgacggcgcgtccgacagcagccgttcgcggcgtagcaccttggcatcgccactgttatcgccgccggcatccaataccaattgttcgatgccggggcaagccacatgatgcagtttgccgaatccaccaaccagaatatccatgaggatgttccgttttactacgaactacgaaactcttttcgccacacaatacgccgtcgccggcggggcaaaatatgccaaaattagccaattgcagaaaaagggcgatccccgtataggaatcgccctttgcgcacacactcaggcggagggaagtgcctcaggccgtcaaaccggcgaagagcgccgaccagtcctgagactcatcctcaaggtcgaatcgttcggtgttcatcagtgcctccttcaccggtccgggagccctcccctcaagtttgtgtattgagtaatcggtgagatcactgatcgtggcccccaatgcccatccggaatgcggcaaatacacgtggaattggattgagcagacgaagacgccgacagtgatcatcgaacgtgatctgccgctgctgggttcccgctacgtcgattcagtgcgcaccaaccatccctatggcgtgcgtaaggcggcggtgcgcttcctgcaacacggtcacacccgtgtgggcgcggcgttcaccgatacaccgacttcggagctgattcaggatggctggaagcaaatcgtgacggaaagcgacgccatcgaatgcccgttcaccatcaccggcattcagccgtacaacaccagggacgtcaaccaaatcgtggacaccattctggattcgggcgtgacggccatgctggtgcactccgattatctggcgatcgccatcgcgcagaccctggagcgccgcggcaagcgcgtaccggacgatatctcgatgatctccgtcaacggctttgccacgcccagctcccgcccgctgaccgtactgcgctcgtccgataaggatctggccgaggcggccatcaacctgctgatcaaccgcatccaaaacccggattctacaacccgccacatctacgtggacccgacgctgaccgatcgcggctcggtaatcgataagcagtaaccccacctccctctgacgagggaggtggcatcgcaaagcgatgacggagggagaggcaccaggcctctaaccgttacgagcgaagcatcggccagagcaacgcccttactctttacaactccacggtctctttgccgggatcatccttgacatgcgcgaacttggcggccagagcctccttattgcgcttttcgtcttcttccttggcctgacgcttagcctcgtccgggttccagagcacatcctcacggtgcttgttccattcggcaacggccagaagagcgatgtattcggcggtggcggtcagggtgtctgcgtcggcggctttggcacgggcattaagcaacccgaggatctgctcgtcggtcaggcagatgcgcggcaccgagcactgctcgcgcagttcgttgacgtagagcagaatcggcagaatcttggcggcagcattggcgacactgtccgctgaaccatcggccacagcatcaccggacacctcacccaataacgcatcgcacacggcgagcgcggtggcgaaccgaacagccacatcggcgggcttggcagacgtggccagacgaccatcggcttcagcgtcggcctcgacctgggcttccatggccgcgaccgcctccctcaccgattccgccgtcgcggaatcccagtcgattcccaacacgtcggccgcctcaacgatcagcctggcatcaccggactcggcgtagtcggccatcgtgtcgtaggcgtcattggcggcgagcagggcgtccacgatgttctgcggacggccgggaatctcatcggcgccctcatacacgaactcggcgtccggcacggtgacgtcctcgccggtcaggatgcgggcgaatgcacgggtgacgcgcacctgcaggttctccgcgtactttgcgtcattgtccatctgcatggcttcggtcagcggccacaggccgatcagcgccgagccggcttcggcggcctcagttaccgccggcaatgccgcgacctgtgcgattgcctcacgattgagttcaatggtcatctatgctcctttgcgtccaccactcgattgcagtgcgtcttggctcccctctctgaggggagccaatgtcctaacaccagtgtgccgttacttgacgttggctgctgggtcgacatacgtgattgacatcacacggccggtttcgttgtcgtacgtcaccgaggtcacggaggcgagcgccgtgtgccgcaggaacatccagtgctcggggtggccggtctccagataatggcgataactgaaaatcggcgattcgtggctgaccaccacaatctgctcgccggggtgctgggccaccttctcgcgggcgaagtcgtccatacgcgccgcgatgtgctgataggactcaccccagctcggcttgtacaggttggtgacgagcttccagttgccgttcttccacagcgcgccctcgccatggccgatgcgcttgccacggaactcgttgccggcctcaatcacccgttcatcagtggtgagcgtgagcgaagcctcgccacgagcctcgcgcacggggttcagcgcatcgagaatcgcgccggcggtctcgcgcgtacggtcgagcggcgaggagtagacggctgcaatcgtattggtttggggattcttggccaagtacgtggcggtggcttgagccatgcgacggccaaggtcggaaagatggaagtcgggcagtcgctcatagagcagatggtcggggttatataccttgccatgccggacgaaatggatggtggtagcgctcatgagccgcctttctgcttcccgccctgaagggcatgagaacgttgtcttaatatctccaatctaccgcgtgtcgcggagtggacacccgtagagtatccgtgacgcaaatatgcggatgggaaaatccgacgcaaactttgcgcgaccatggacaacacatcattcgatgagggcttcgccggcaacgccacgccagcgggggacatccaatcgggagcggaaaggagcgtagtgctgttatgtccaataactcgtccaactcgaactcgagcaccattctggccggcatcaaggaagtaggccacaaagtctttggtgggtatgcggaactactgcgcattccgcataccgcccgttattccatcggctcggtcatcgcctgcatgccattcccgatggtcggcatgaccatcaccatttccgtacagcattattacggcaactattcgctggccggcatgctcaccgccattcaggcgattgcgctggccgtggccacgccgctgctgggcaagctgaccgacaagttcggccagaggcaggtctcgattccgacgattatcgtttggattgtggccgccatcgcgctggtgacggcgattaccaaccgcgcgccggaatgggtgctgtactgtctgacgccgttcctggccgccattccgccgtggggcgcgatgagccgcgcgcgctggaccaagattcttaagggtgaccgggagcgcacgaaccgcgcgctgtcgctgtgcggcgtgctcgacgaatgcatgtgggtgatcggtaatccgctggcctccacgctggccgtgatctccggtttgctggcgttctcgttcaccggcatgtgcgtggtggtcggtgcgctgatgttcctgaccgagctgaccactgagccaccgtcgcagaccgcgctggcacgtgccgagggcatctcccgcaaggaataccgtgagcgcgaggccgccaaggctgaggcgctgaaggtggaaaccgccgccgaggagacccgccgccgtcttgagcgtgaaggcgtgaccgatgaggccacgattaacgcagccattaagcaggcggtcgccgatgcgcgttcgggcaagaaggcgtccatttggggtccgggtctgattgcggtgtgcgtcacctggttcggtttgggcgcgttccagtcggctacgggcatctccatcatcgcgtttgccaccgaagcgaatatgaagcagtacacgggctttgtgtttgcctgcttctccttcagctcgctgatgggcgcattggtgtatggcgcgaagaactggtcgattgccctgtggaagcgcttctacttctgcctggccgtggtgaacatcggcatcagtacgttcctgttcgccaagcatctgtgggtgatcatgatcatctacttgattattggcgtatgccaggccccgacgtggatcaacggcaaccagctcatgctgcatctggtgccgccctctcgcttgaccgagggcatggcgtggatgggtgcgatgaattctatcggctcctccgccggttcggcgattgccggccagttcatcgaccgcatgggctcgcacggaggcttcatggtggtgaccaccttggcactggcctcgctggtgattgcactgatcggcttcaagcagatcaagggctccaccgagcagccgaccctgactgaagtgagtgtgtgagacgtatgctaagccccctctgacgagggggcttagcatacgtcaaaacgctacttcggccagcctttgggcgtgtgctccaaggaccagatgccgagcttgtgggagaagctgttctgccacttggcttcaagctcctcggcattcagtcgattttcagcggacttcagacggttcatcgcattggtgtgcgtatcgtcgagcagccacttgcgaatcaagaagttccagatcattaccacggcagtggccaccaacttgccgatattggtgcgcaacagatattcggcatgctgcgatacataggcatcatggttcataccataggtggaaatccagataatcgcgtcattcatgaacagaccgactacagcgcccgccacgaagataaggatctccatccagcgtgccatgtcatcacgatgcttgaatacgaatttcatgctcgccagatagttgaaaatcagcgagatgatgaaagagatggtggcagccagcacgttgtgcatgtggaatatgccaaccaataggttgaggataccccagtcgataacaaaggcgataacgcccacaatgccgaacttcatcagctgttcaatcagttttctcacaagagtattcaacactattgggctgactgcggaacgtgtattggctggaaaggccaatatctccccaattggccttgccccggtccgttctgcaagcagcttcctacgtccgcatgccatgttcaacagcagccgctgaggctagactggaagtgaaccgaatcaaggaggaattatgcccgttattcacactcatgtgtccgtgtccaccaccccccgagcagcgtgaggcactgaaggccgcctacggcaaggcgattaccgctgtgccgggcaagtccgaaggctggctgatgtgcccgttcgaggacaatatgccaatctacttcggtggtagcgatgaccagcccgccgcctatgtggaggtcaacgtattcggccgctctgtgccgggctctgcttgggaaaagctgaccgaaagcattatggccgcgctgaactccacactcggcattcccgaggaccgcacctacatccgctacaccgccaccaccgattggggctggaatggcggcaacttctagttgccaccattcccctcgcagcatagctgttcgcatcgcctacggaaagcccagtgggctttccgtttaatggctcagggtggcaactagtttgcgtattctggctcccctcagtcagcttagctgacagctccccctcaaagagggaagctcagatgtagaaagcccgccggtggcgggctttctacgtttcaaggggctgatttccaacattcagaagctctactagcgtttcaaggggcttttaaaacaagaaacccggagtataaacattgcaatttcaatggtcatactccgggtttcgcaatcgaagagcccctcgaaacgcagatagacctccggaaaaccggaaatccgcccctcgaaaacgagttacctcacctcatgcctgtcatcacacaatcttgggcatgggggtggtgaggctggtggtcaggttgacgtggaccagaccggcaccggcatgcacctcgaccttcttcagggtcacggtgcgctcttcttcgggggcgcggtcgttgtcggtcatggtcgccggggacttgaccgccacgaacgccagatcatccagcgagatgcctgcgctctggcacagttccatggcctcggacacggactcggtgaagcccggcttgtagatcacgcgctcggccggtacgccgtaggcgttctcggccacccacttggcgttctcggtcagggccatgcccttgtgcgaatgcggttcagccggcatggagccgttctgcagcgcgtcgacgaaaccgtcaagctgcggggccagcgcctcgccgccgtcgcggaacaggttgccgatgatcggcgtgcggaagcccagctcgtcggcggtggcctgcagggacgggacctgatcgtcctcgccttcccacaggttgatgagcgggaaggtcggaatgtccaggttctccaggcgctgcacgtggaacgggtagcgccaggccagctcgggatcgtcgcgccaggtggaggcgcgggtcaccacgatggcggcggacggccactgcgcgccatactcgcgacaggcgatgtccagccacttctgggcaccggcgtcggtgccgtaaccggcttcgacgacaaccacgtcatgcagagcgcaggccatttccacggaaaccagcgtcggaatgccgatggacacgttggcgaacgggccaccgtgcacgtagaccggggagccgttcacggtctcggtcttggccggcttgaccgcgtcggccagaatgccggtgatgcgccacaggtccacgaactcgccgaaggtcacggccttgccgtccttggtgccggcgatcatcttggatacacgctcggaaatctcgtccatcgagcgggagagcaccatgatctgcatgagctcgcaggtcggcgtgagcacgaccttctccggcacgttgcccttgccgtagtccacggcggtggagcgcagggagcggctcggcacctcggagacacgcggcacgagaatcgtgtcaagcttgccttcatcgatggccttctcggcgaaggagacgagcaggttctgggccgcctcgatggcgcccatttcgccgcacagaccccagtcgatgagctcggggtgggtcagggatgccttgccgccgccggaggcaccgcccttggaaccggctgcggtgatgcccatgctcggctgacgcagcacggcggccgcatcaatgccacgcttgttcagggcgtcgatcaaggcgatggtcgtggtggtcttgccttcgccgcgcgatgccttgagcggcgtatcggcggtgacgagcaccaccttgccgtgcttgcgcggggcgtccgggttctcagccaggtacttcatgtaaccgaatgcgtcgatcttctggaccaggccgtactggctggtgaagtcttcgatggtggtcatttaatgcctttctgtgttgatgatggcggagcggggtggtggggcggccgccgccgcctcttcgcctagaaacagcccactgggctgtttcttaacagcttagcctctcagtccgcttcgcggtcagttcccctcagggaggggagctcaatacggactaaaagtcggacatgtggaagccgttcttcatttccatgctgcgagtgtacagcacggagtcaagcagcttgtcggtttcctccttgagctggtcggccatggtctggttggcggcggcgagaatctcgcgcacctcggggttacgcagcgcggcgatggtctcgtccggggtcatcggctgcacatcgccatccacgttgtcggcctcgaattcctcttcagcggcagactgcgcggcttcctcggcggccgtcaagcccagacgggcgatctgctcgtcggtggcggcgaccaagcggtgacccatcgcaccggtcttctcctggtagcgctcgacggcgttggacgtggagcggaaggcgccatcgcacagggcggcgatgatgcggttggcccagtagaagttctcggacgtcacgcgggtggtggtgtcctcaaggtaagcgggcgtggtgtccacgttcgggaagaacggcaccagcgtgttgaacgggttggagccgtatgccatccactggatggcgcgggaggcctgcgggcggtacgggcggatctgcatcaccgcaagctggctctggcggttgatgccgatcgtgcggtacatgtggcgggtgcgctcatcgcccagctggccgtatggatcgaacggggtgccctggtagtgggagctcaacacgtacttgatgtcctcgatggtcaccttgcgctcgggctggcgggcccacgggatgtcgtcggaggtgggcttgtggtcggcgtccgggccgtcccacacctcgtcgtacgggttgaggaagcgctgcatgtaccaggcgcgcggggtgttgtacacgtggtcggagtcggagtgggagccgaaggcgtcgcgcgggttgaacggggtggtgttctccaccgcgaggtccaaatggttggtttcgatgaattcggcaaggtcttcggaacacatgtgcgcttcctggtcgcccagagcgtcctcaaggtcgaattcgtcgataccgagctggttcggcatggtcacgtaggcctcgtccggcacgcgcttggcaatccagtgatggccgcccacagtttccagccaccagatttcgttggagtcggagaaggcgacgccgttcatctcgtaggtgccgaattcctcaagcagcgcgccgaggcgctggacgccctggcgtgcggtcttgacatacggcagcacgatggtcaggaagtcctcttcgccgatgccgccgggcacctcgggctcatcgcccctggccggcgtgtattccacgaacgggtcggcgccgagcacgcgctcgttggtggtcagggtctcggtggcgctcatcgccacgttcgcctcgttgacgccggcctcgccccagatgccttccttgaggtccgcgttcggcacggcggtgtactgcagcgggtcgtccggcagagtgatggtcaggtgggagatcactgatttgtattcgcgcggctgttcctccggtttcacgacgatgaagcgcttcgggttgaactcgccgttcgcggaatcctcgttgcgggcaatgatggtcgaaccgtcatagctcgcgtctttgcctaccagaatcgtggtgcaggccatagtgtgatggtgtcctttctcttattcaagctccccttgtcaggctgagccgttcagcaaacagcccggtgggctgtttgtaggcgagggtgggagataagtcccaccacagatgttgcgggcggtagcccgtccgtaattgcaggacgagctgtctcgcaaagcgagactgaggggtagtcactctagctgtctctcccccagtccgcctacggcggccagctccctcatcagagggagctcacatacgccaactaaaaatcacgccttaccggtcaggaagatgccgtcggtgtcgggcgcttcgccgctgttgcgcagcgcgtgcaacagctcgttgagccagaagccctgattcaagccgggcaacggcttcttggtggcccacacctgcaggtagtactcgtggtccttgtccggcggctgcggaccgttgtaccgcatgatcaccgctgggtcagtgctgcggcccaagaacttggaggccgaagaattgcggccttgcacggtctcgggaatcatggccggcagctgacgggagaagtccggcgggatggccaacgcatgcgaatcattgaagtcgtacatcagcgcgtcaatcggcagattggccacggaccagtgaatccactcgaagccgcagaccggaatcgaatccgggtccacgaactcccagtgcaggtaacgggcctcggggttcacatcaccgatgtagaacgggaaggagacgaccggcacgccgccgttgaagtactcaggcgcggcggccttggcaaaatcgtccggaatgacggtgaaatcggcggaaatcttcatatgtcccagtatcgctcatatgtgtgacgtactgggggctgtgcgttacgggggtctctcccccagtctcgccgcgctcgacagccccctcgtcagagggggctggttgcgtcgggttatggaattagggcgcagaagagggattcgaataccagtagcgggttgccgttgccggctagacgcttgcgggcgtgggccacttcgtccagacgggtcacggcaccggcccggttcaaccgcaccgacaattcggtgatcggcgagcggttctccaggttgatgaggcccaccgaatcctccgcattgttctgcagcaccgccacatcccggtagatggaggcgatggagttcagcgcacgatccaatacgtcgcgcgtacggcgggtgaccaaacgcttcacatcgtctttcttggcgatctggttgaacgcgccacgcagtttcggcgggatgcggtcgttcggtgccagtccgttgatgcggcggaattccgcttcctggccggcggtgatgcggcttgcgtccgcctcggcctgggccttggcattgtcgataaggctgccggccagcagcaccgcgtccgaggcgcgagcgaggttcagtacgcccaccaccaattcgtcgcgatccgtcatcacctgctcgtcagtggcgtacaacttggcgatgccgatgtgtccctcggccagacgggccgcacgctgcgccacttttggctcgacattggtggtggaggtcaggaatccggccaccgcctgggtggagggcacggcgaggttcacgatgcgcgtgcgcgagcggatggtgggcagtacatcctgggcactcggcgcacacagcagccagatgcagtgttcagccggctcctcgatctccttcagcagcacgttggtggtgcgctccagcatgcggtccacatcctcgatgatgatgatgcgccatggtgccgtggcaggcatttgctcggaggcggtgatgatctcgcgcacctggtcgatgccgatggtcactttgttggtggccagcactgtgacatccgggtgggtgccagcgagcacctgttgggtgacgcgcgtgggctcatcgttcatgccgtggtcggggctttccagcgccgccgcgaatgctcgggccatattggaacggccggagccgggaggcccgcaaatcagccacgactgggtgatctgacccgggtcgccctgcgcgatgcgactgagcatgtcgattaccggctgctggccgactagtgaatcccatacgctcatcggacaccgcccatcgtcacggctcctgtagacgccccggatcgcgccatcaccgtatccacatctgcaacattgtcccgcagcagtgtctgaatgtccgcttcgatggcggaccacacctgttcgatggactggctggcatcgatcacgtggaaacgattcggctcggccacggccaagtcgaggaacgcctgacgggtgcgggactggaagtcgctgccggccgactccatgcgatcttcggcatgctcaagacgattgtgggaaagcgccggatccatatccagcagatatgtgcggtcgggcagcaggttgttggtggcccacatgcttaaggctcgaatctcttctggcgtaagttcgcggccaccggcctgataagccaaggaagagtctaaatagcggtcggtgatcaccacttcaccgcgctccaatgccgggcggatggtttcggcaacgtgctgggctcggtctgcagcgaatagcagcgcctcggcgcgcggtgcgatgtcgacggcgcccccatccacaccgtgcaacagcagttggcgaatggccttgcctagcgcagtgcctcccggctcacgggtaacgaccacggtacgcccctgagcctcaagatacgcacgcagccgctcgacttgcgtggtcttgcccacgccatcgacaccttcaaacgaaacaaacagaccgctcatgctattgaccttagcgttaggcgcagagttgtgcccaacaggcagttaaaccagctctacctccgtttcaaggggctgatttggtcttttctgaaggtctacttccgtttcgaggggctgttacccaagtagacaacgtcccaaaacggcggaatgacgttggcgcggagccgttcatactcgtggttcagcagatgaccagccccttgaagcggaagtagatattctcaaaacgagaaatcagccccttgaaacgcaagtagagcaataattccgctcagccacgcttgggaattacggcggggcgctcgtagccctcgttggcggtcagccagtcgacatccttcttgacggtggcggcggtggagctgagcttttcggcgatgcgctggttggaccagcccttgtttgccagcttcttcacctcggcacggcgtccggcgcgcttggcctcggcggcattggtcgcagccgaagcagcgcccttcttggctcccttggctcccgacttcgcggcacctgcacgcccagcaccgcgacggccacgggtggagggaccagccgcacgcttttcggcgagcagtcggaaggcgtcatcaggggtgatggattcaggcgtgtactgacgcggcaccgtgcggttggtctcgccatcggtgatgtacgcgccgaaacggccgtccttgatggtcacgttcttgccggtgttcgggtccttgcccaaatcacgcagcggcggcttggcggcaccacggccacgcccgcggccgtacttaggctgcgagaacagttctttggccttgtcgatatcgaccgtgaagatctcgtcttccgaggccagcgagcgggtctccgacttgccgtcggcacccgtcttggtcagataggggccgtagcgaccgttgttggcggccaccgtgcattcggatacctcaccggtttcggcgttggtttcctcgtatgtgcccacttcgcgcggcaggctcagcagctttagcgcgtcttccagcgacagcgattcagggctcatcgtcttgaacaacgaggccatcttcgggcgcgacgcggcggcggccgcggccttcttcgaacccttcttggccgcagaagcaccagcagtatcgccagcagcgccagccgaagcctcagccggcggcaccagcgccacatacgggccgaaacgcccattgcgcacctcgacggtaccgccggataccgggtcaacgcccagctcgcgcggtccaccggagtggttgtcgatcaaatcgcgggccacggccaccgtcagctcatccggcgcgatggtgtccggcagagacgcgcgcttcgggttgccttcgacgtccagatgctccatgtcttccagatacgggccgtaacggccgacgcgcacgtgcaggccgtcgccgatgtcgatggtgttgatggcgcgcgcgtcgatctcgccgagctgcgcgacctgctgttgcaggccttcgtgcgcctcgtcggcgttgcgggcggcgccctcgccgga

SEQ ID NO: 352 - DNA, 40943 bp, Unknown
  R42_10m  MAG No. k141_19934
cgcatagcacatcacggctgccacaccgaggatttcccgtcgggggctagatatatgcttccggagcatatactttccggaaacctacaggtcaatccgtgaaaatccgcgattccggacacactttttgacccttaaccctgttcggcgatgccgatcccagccagctgaagtctctcgccaccctgagcaacgccaaggtattcgacggccgctccggcgacctcgccgccgtcttccgccaagtcaagggcttcaactgatgctccaggtaatctgtggattcgttgtcggactgctgctcgccgggctcggtttcggactggtcggcggcggagtgcccggcctgatcgtggccgtggtactggccgcacttgggtatatcgccgcctccacgctcaccgagccggagcgacgcatcggcaaaatgctggtttccgccttgcccaacggtcagaagaccgccgatacgatcgacgcggcgaacgctcaactcaactcgatcgccatgctcaccaagcaagtacgtgacccagccgtcaaagccgaagccaacgacttcatcgccgctaccaaagattgagtgcaatacgtgacccgagacacctccgcctacccgacgttgcgccactacatcaccgtgtacggcgagcagaccgagaaactgttgcgctcctacgtggacgtggaaagttccggcgcacgcgatcagatagccacggtacgaatcgaaaccatcgaggcgctgcaagtgctcgaacagaccgccgccggcgaactcagccgggcggtaagcgccaagacgttgggcattacggccgactccgacgccatccaacggttggcccgcatggatggatacgacgacgtcgcaccttcgcctgtgccttcctcggctgctgatgaaggacggcatgcacccagtcagactccatctggcggcccggctcaccagtcggaccagaaaacggacgcacaatgaaactctccaaatcaaaaatcatcggactgatcgccctgcttgcggtagtgggcgtggtctgcggcacgctggtgtggcggcaatcgcaaccagcgccggccgaaccgaccgaacaggtgagcatcaccggctacctgggcggcgagaaaatcggcctgttcgatgacgccaagttcaaggcgctcgccgccaagcaaggcattgccatcgactatcgcaaggccggatcgctggccatgatggatgcggaccggaaaggcatggattacatgttcccctcctcgcgcgcggccgtcgaatacggcaatgcgaaaggcgtcaaggccccccaaagcgacatcgtcttcaactcaccgattgtgctatacacgcacaaggccgtggcggacgggctcgtgaacggcggacttgtgaccaaggacaattcgggcgcgtatcacatgtgcttgatttggccgtgaaccagacggatgcgttcaagcagatcaaggacgacgtggtcatcgtctacccgacgccgaccgtgtggagcacccacacgctgatggccttggacgagaaaggcgacacactgctgaacctgttgaaaacaccggcggcgcagaagctggcgtgggagcgccacggcttccgcgcggccaacttcgccggcaccgattcgatcagccgattcggcgtggccggcacgctcgaccagatcccggccgtatccgaactgcccaacaacgacgccatgcaacacctcatcaccaccctccaatccgcgcaagccaaactcgtggccgacatctccatgtacgacacgatgtacacgcagaacgcccagcaataccgcgagctgaaaatgaccgtactggccggcaagaaggcgctcgccgacttcaacgccaaccagctgccagcgctggaggccgaggccgccgccagtggcgacgccatgcaggcgcaagtgctgaaggacttcaagtccaagctcgaccgttttgccaagcgactcgacgacctcgaccgcatcagcgtggttaccttgcagaccgcgccgcagatcaaaatcatccagaacgcggaccagaccatcgtggacaagatcgacaccaccatctccaccacgattccggtgtggaagagtcagatggtgatcgcgctgggcctgtccaaccagcgcaaggttctcgacctgcagaacaaggccgacgatgtgaccaacaagctgctggcgcgtaacgcggccgccctgcacaagggtgcagtggacgcggaaaaggccaaccagcgttccgtggtggaaatcgacacgctggagaagatcaacgccgaactcatcgccaccctgaaggagaccgtgcagatccagaaggaaggcaaggccaaccgcgaggccgcccaggtcaagatgcgccaaatcgagtccgacctcaaaaacgccttgctcgaaaacgcccagcagatgtgagccgttcgcgcgccagcatgctcccgttggcggagtttgcgggaacgtgcaaccatgctcccgttggcagaggtatatgagtacgcctactggtgtgcgtatatatgctcccgctggcgggagctggcagccgtaagactggctgagggtggtcacggcgctcggctcggccggctttaccggcagccattcccgccgcaatttctctgtgggcataatcccggaatgattgccgcgctcgggaattggatgaagtgaaggttaaaggttgagagcccgggagggttccggaaccggccacgataaccgctgctagccccgcgatacgggttggcggccggcagccaagccgattctctcctaatcaaggagtaccgattatggcaatgtttccggctttgatgaatgacacgatgttctcggatctgttcgatgatccgttctttgagggttggcgcaacacggacaacacgatgagtgccgtaatgcccgccaacatgatgactaccgatgtgcgcgagaccgacaagggttacgacgtcgacatcgatatgcctggctttaagaaggaagatatcaaccttgagctcaacaacggctatctgaccgtgtccgcctcgcgttgcagcgagcatgaggacaaggctccggccgctgaggacgaggcttccgacagcaagtgtgcttgcgcgtccgattcgggcaagtggctgcgtcgcgaacgctacatgggctcctgctcgcgtagcttctacgttggcgaggacgtgaaggagtccgacatccacgccagctaccggaacggcacgctgtgcatccaggttccgaagatgcaggcccagccgcaagtcgagtccaagcaccaaatcgcgattgagggctgacgatacttgattcgtcccgaagtcccgcttcgagtagcttcgccccctctgacgagggggctcccgcgaagcgggtgggggagagataaatcgtaaccaaaccatgcttcccacgccgtctgccctacgctttcaacgccgactaacctgacagacggcgggaaacatagccaatgcaaatgccgggtagggatttaccctacccggcattttgctgtttcaatcaccgaaccccaccctgttcgcgcgccggtcgcgtgccgttctgccgctgtacacatccgatgggtagagtgacttcgaaacgatgcgagagaggcggacatatggcgaacggcgcacagaacgcaagcggcacaccggcaccggcggcaagccattccggcggccacgtcgtatccgcgcgcgccacgaccatcggcctgatggcaatcctgctgtggagcttcatggccggcaccgtgcgcatcgtctccgaaaacttcggcgccacgcttggctcggccctgatctacacggtcggcggcatcctgctgctgatgttccggcgcccggccccgattcgcgagttccccaagaaatacctgattatcggcggcctgttgttcgtattttacgaatcgtcgatatccctctcgctgggtctggcctctaccgacgcatcctcggtggaagtgagcctggtcaactatctgtggcccacgatgatggtgctgctgtcggcgggcgtatcccatcgcaagcacgcggtcgtcaaggtgttgccgggtgcgatcgtggccactgccggcgtggtgctggcggtcggcggcaattccgggcttgactggcatgcggccgtgcagcatatcgccaccaatcctttgccctacgcgctggcgttcgtgggcgcgcttgcctggtcggtgtacgcggtgttcacgccagccatgagtcatggggtggacggcacttcattgttcttcccctgcgtggccgtggcgttgtggattatccacttcgcgtccgggcaggggtggccggccgagccgccgagtctggtcgcatggctgtttgtgttgattgccgcggcggcgattggcggtggttatgcctgctggggctatggcattctgcatgggtctatggagcggcttgctattgcgtcctatgccacgccggtgctgtccaccggggccagtgcggtgttgctgggtttggcgctgtcgctgccgttttggtgtggcgcgctgctggtggccgtcggatcggtgcttaattacttggtcagtgcgcgcaaatagcggggtggctttgctcatggggcggtaataatcccatggggcggtaaaaccctcatggggcggtatcccaaaatggctttattctgccgtttcacaatttcttcaaaccgccccatgggtaaattaccgccccatgggtaaattaccgcccgatgggcagcagcaacttactcgccgcggcgctcggacgggcggcgaatcgggtcaagcagcgtattcggatcggagatgccgaacatgctgcgcccgccggtggattcagggtgcttggcgagaacggccagcgaaatcgcccccggaatcataatgatcaccgaaagggccgccaatccccagttcacgaagaatccgagccccagtacgatggccaccacaaccaccaccgtgacgataatcgtcaacagtgctcgacgtgggttggtttccctggtccaagaggtgctggctgcgggttttgctgttgaactggccgcggcgtttgtggctgttgtgccatcagccgtgccggtcgtgggccttgccgtcgcgctcgtcgcggggtcagtaggggcgtcagacacgttatcggcgacattgccggtcgctgctggacgttgttcgtttgcgtgagtcatatccaccagcatattccctgcttccggctaaagctgggacaagcctgcgcaccgctaatccagcgctgacactggccttgagctgcggacgtccaggccggatgtgaacaggagctgaacggagtctggggaaaccatgagaactcgcgacaatttttgtgaaattgggtgacgctctatgaatcgcgcgctagtgttgcgtgagcttacaagacgaggagcctggagtgcggggggcgaaggatgaagaactccgtttggaaaacgttcatggaattgtcgctggtccgcggaatcgtgccgtggaccgtgttcggactgaccgcgatcgcggcaatcatactgattgttgggctggcattgagcaagaagcgcggcccggcagcagacggcctggcaccgggcggcgaatcgtcggcccaatcgcccgtcgacccagataaccagccggccaaccagcctacgaacgcggctgctacggcgtcatccgcagcttcgacggaagagacgtttatttcccatggcctgcgtacgccgcaacgtcgtcacttgcatccgctggccgccgcgctggccgccgccgtgctcgccggcgcgggcggactactggccacatggctgatgtccgacgtgttcatggtgttcggcgtatcgttgggctggccggtgatcctcaccgtcgcgggaggcttcgcgggcctcggcttcgtgctggccgccgccgtgacgttacgggggggccgtcgcgcgctggccgtcgtgctggtgccgctggtgctggcgtccaccgcgctcggcgtggactcgatctacggcgaataccagaccatcggcagtctcgtcggctatacgccataccccccgctcggttcggtcaccgtgcgcaaagcctcgatgagcgtcggcgagtggcgcgacaaggcgcgcaaggacgctctgccatccatgcccgactcgggcagggtgttcgtcgtcagcatcccgaacaccgaatccaagttcaaggcgcgcaaggcgatggtctacctgccgcccgccgcgctgtccgaccgcccgccggccctgccggtgatggagctgctcgccggtcagccgggcagtcccggccgcctcatcgacgccggcaacatcgccgccacgatgaacgcttacgccgccgaacatgacgggctggcgccgatcgtgctcgcacccgaccaaaacggttcggccatgcacaacagcctgtgcgccgacaccacccgaggcaacgccgaaacctacctcaccaaggacgtggtgaactgggccagggcgacgctgccggtagccaagtcggcccgtatgtgggcgatgggcggattctcgcaaggcggcacctgcaccacgcagctggtgccgcgtcaccccgacatctacggtgcgatgctgccggtggatggtgagctcgagccgaccgacggcagcgtcgagacgatggttcggcgatatttcgccggcgaccgcaaggcctacgacgggcaggtgccggtcaacgccatcgccgccaccggcacggccggccaggcgctgttcgccggcgccggcaaaggggatcggaagtcggtcgccaacatgcgcaccatcgccgcggccgcgcgcgcggccggcatgcagaccaccgaactggtcgtgcccggcgccgaccatgactggcatgcggtgcaggcggtctggaaccccggtctcgactggttcggcgcgcgaaccgggctgggcgaaatgacgaaatcgttggaggaatacccacaagtggaggtgttgcaatgagcgaagaacaacagcatgggaacgcgcggccggcggccatgccgcagacgcggcggcccttgcgggacgcggaaccctcgcggacgaagcccgccacgacctcccgcgccaccaaaccgcatacggcaaggtccagccatgcggcggaaagctggcgtgaactggccggtgacgtgcggcagtgggcggacgaccaccggctggccgtcaccgccacggcggcgctggtggcgctgaatctggtggcgtggctggtggccgcgatggccggattcgcgtttccgctgcggctcagcaccagcatggccgcattcaacgccggcaaactcatctgctcgctgttcctggcgcgcggcgtcatccaactcatggtcgacgccgtcctgtggctcgtcatgctgtcgatagccgaaccatggctcggccgtgtgcgcaccgtcgtcaccgcgctcgcctgcgcggccggcggcgtgctggcgggcctgaccctgtgcgcggcggccggatggatgttccaggactccctgttcgtctcccgcatgcggttcgcattgagcccgctggtgttgccggtcggcgcgctcatggcggccagcgcgttctgcagccacctatggcgcaggcgcatccgactcgtcggctatgtggcgatcctggtcacgttgctctacagcggcaaccccagcggctactgcatactcgccgccgcgctgatcggccatgccgccggccgtgtgatggccggtccgcccgcgcacgtcgaagccgaatggcactggctgcgcagcacctccttcgaggcgcggcgcatattcgcggccatcgccgtggtactggccctggggccggtcatcgccatcacctcccataaccatgcgggcccgctcagcacgatcggcctgctcatgagcccggtttccgtcgacaacggcatgctggccaaatgcctggccggtgacacgcacggcggatgcttcctgcagttcgatctgttgcgggcctcgatgcccggcgcggtgctgcgctcgttgctgcccaccgccgtgaccctggtgctggcgtggggcctgtatcgcggacgtcggttcgcggccatctgcaccgtggccatcaacctgttcacggtggccatcgccgtcgcctactatctggtcgtgccgctgagcttcgcgccggacggcatggcctccctgctgcagcacggcgcgatcgtggcctgcgtggcgaacgtcctgcccccgctgctgttcgccatcgccctgctggcggcgatgaaacacttcccgatccgcatcggctggtgcaggctggtcggcggcatcggcgccatcgtgctggcctggctggcgtgcgccgccatatacctgatatacggcatcgcccaacccgccaccttctcgccacgcgctacggcctcgtcgctgctggccgagctgccgggacgcttcctgcccatcggcttcctgagccatatgaagctgtcgttcgtgccgcgcactccgatggcctcgatcatgtaccaaggcgtcggcctggtgttctggatcgtggtgctggccgtggtgatccactggatgggcgacgtgagcgaatcgaacgagcgggcccgggcgcgcgccgaacgtctggtcgaaaccggcggcgaatcgatgagcttcatgaccacgtgggaaggcaacagctactggctgtcccccacgggcagatcggccgtggcgtatcgcgtgctcaacggcatcgccctgacctgcaccggaccgttcggcgatccggcggaatggatggacgatctgaacggtttcgcccagcactgtgcggaacgttcgctgtcgccggtgttctacggcgtgcatcgggaacagcgcgacgcgttgctggaagccggctggaactccatcgaggtcggcagcgaaatggtggtcgacccgcgcggctggaagacgaccggcaagaaatggcaggacgtgcgcaccgccatcaacaaggccaagcgcgacggcgtgaccgacgtgcagtccacattcctggaagcgtcgctcgatgtgcgcgaacagatcgaggacatctccgaggagtgggcgcagctcaaggcgctgccggaaatgaagttcacgctcggcggcgtcgaggaactgcgcgacccgcgcgtgcggctgctttacgccatcgacgcggacgggcgcgtgctgggcgtcaccagctggttgcccacctggcgcgacgggcgcatcgtcggctggacgttggatttcatgcgccatcgcaccgacagccccaacggcatcatggagttcctgatcgcgcgcatggccgagcggctgcgtgacgagggcgaagccgatcccacgcacgccgtggagttcatgagcctgtccgcggcgcccctggccggcatgaatcccgatcgggacaacgccggggaggacggggcaccggccagcgaaggcacgcaggtgctccaacacgcgctgcagatcgtggccgactggatggaacccgcctacggcttccactcgctgttcaacttcaagcgcaagttccagcccaccgaggcgccggtctacgtgtgctacccggacccggcggcgttgccgcagatcgggctcgcggtggtgcgcgcctacgtgcccagcgtgacgcccgccgaagtggccggcatgctcagcacgctgcggtcgtgaaggtgtgcacacgggtacgcaggttagccgattcgagcctgagacggggtatctgctttcagagaggtacatttggccccttgcggacaactaactgccttcaaagaggtgcctgaactctgaaatctcgagtatgagcgttgcaatgacaacgtttgtactcggggtttcccgtattcggtgcctctttgaacgaagatagcattctgcagaagcccgaatgtacctctttgaacggagaaagcctgacaaggagggcgcggcaagcgctatctccgtttcgaggggctgatttggtctctcccggaggtctactcccgtttcgaggggctgatgccgaagtattcacgctccaaaatcggcggaatggcgttggcgcggatgggtttttacatgcggtctagcggccgaccagccccttgaaacgggagtagacctccggcgggggtcaaatcagcccctcgaaagcgggtttgccggtgcagaggtgtcgttgactgcatcgcgagccgcctcgacgtagtaacgtggggcgtatgagcgaacgtaacgaacacaatgacggaaatacgcaaaccgcatacttcgccggcggctgcttctgggggctggagcgctacttccagaacgtcgacggcgtcacggacaccacggtcggctacgcgcaatccaccgtcgaatcgccgacctacgagcaggtatgcgcgggcggcaccgatgcggccgaaaccgtgaaagtcgagtttgacccggcacaggtcagcctgcggacgctgacattgctgttcctggaggtcatcgacccgttctccgtggaccagcagggcgaggaccgcggccggcagtaccgcaccggcatgttctacacggacgagacgcagcgcgccgtgtatgtggcggctctggagcagctggtcgaccgccagccgcagcgcccggccgtactggtcgaaccgctgcgcaacttctacccggccgaggcacaccatcaggactatctggtgaacaaccccggcggctactgccatgtaccgatcgccgcaattgcgaacgtgaaacgccgtcagaagtacgtggaacgcatctgggatctgacgctcgaacagttcgccgtcacgcagaacgccgccaccgagcgcccgttcgtcaacgagtacgacgagaaattcgagcccggcatctacgtggacatcgtcagcggcgagccgctgttctcgtcgcaagacaagttcgattccggctgcggctggcccgcgttctcccgcccgattgccggtgacttgctgaccgagcatgaggaccaccgcattccgggccgcgaccgcatcgaagtgcgcacgtcggacacacagattcacttgggccacgtgttcaccgacggcccggccgaccgcggcggcctgcgctactgcatgaattccgccgccctgcgcttcgtgccgcgctcgcgcatggccgaggaaggctacggcgactggattgcggttgtggatggggatgatcaggcatgagcatggagaatatcgcgggcgctcgcaagcccgccaagcgtgaggatgagcacacggtcgccggcgagcatcgcatgatgcgccgtgcggaccgcgaggtgaccgatcccgagcggatcgccgcgatcatcgccgcctgcgacatcgttgaagtggcctatgcggatgccgagggcctgactatcgtgccgctgaatttcggctttgattacgacgaggcgactggcaagctgacgctctggttccactccgcgccgcgcggccgcaagctcgacgcgattcgcgccgccgccggtggccgactgcccgtggctttcaccatgcagaccgactgcgaggtggtggcgggccgcaccacgtgcaattggggtgaggcgttcaagtcgatcgtcggcaatggcacggcgtcactggtcgaggatctggatgaatgccgccacggcttgcagacgctgatggcgcagcaggcgcatatgccgaatgtggaattcactgatgcgcaggtccgcagcgtcacggtgtggaagattgagtccgactacttcaccaccaaagtccgcaccaaacccgtgcccgcacacatgcatcagcgttagccggggatagcgcgccacctccccactggcgggaggcagcgcgcagcgccggtggatggcccacgtccggacccgatagacttgccgccatggcagcagtgacagtggtaattaccagctacaatcagggcccgttgattcacgaggcagtcgagtcgtcattggccccagacggttcgtccggaacggatcatcatcgtgaacgatgggtccgatgaccacgcatccgtcgagatgctgaacgccactctcgacgattgccggcacggggcgatggatgcgaatggtgtggccatcgacctcatcggccaggcaaacgccggtccttccgccgcgcgcaaccgtggcatcgccgccgccgaaacgccgttcgtagtggtgttggatggcgatgaccgtttgcggccggccttcattgagcgcacgttgtcgatgttgtccgccgacaaaacgatggtcgccgcatccggctggctgcagactttcggtgtcctggaatcagtggtccagccgactggtggcaatgccgccgcgttcgtgtcgcataattgctgcccggccacgtgcatgattcgccgtgtcgcgtgggagtgctgcggcggctacgacgagtcgatgcgcggcggcttcgaggactgggacttcttcctgtcgttgttggagtgcggattgacggtggaaaacgatatctgcggtgctggggttactggcggtactgagcatgtcggaggttttgggagtgcctgggatacagagaatcccgcaaaagacgcggcccatatcggcatcgcccccgagccgctgatcgagtaccgcacggccccggcctcctcaaacgtgaccagcatgaccaagcgcctcgatctcatgcgcttcctgatcgccaagcaccgcgatctctacgccgcgcacatcgccgacgccatcctcggcgttgaagccatctccatgagccgcttaaccatgtgggaatcgttgatgtgcggtgacacctccgccagccaagccttcatgacccaccccacctacggcgacggtggaatggccgccgccgtacgcttgcggagttgatggtcagccgggccagctcaaatcggtgtccccactgtcgtcaacctgccaggttttggccggcaaacgccgctgagagccttttggcggcgtcaagttgccagcgcttggcccattagcgtcgttgccgtggttgcttgcggtggtctacgaaaggacgcggtccgtggacactgcagatagtcaggaacatgtgagcggtagtcatcacgtgctgaatattcctggtacgctcttttttggaccatccgctgacagagagtattcattgaaggaatgaggatgacgtgagcgttataccgattattgacctgttcgcaggccccggagggcttggcgagggtttttcgtcgctcaaggatccggccggtaatccaattttccagatttgtatgtcggtggaaatggaaaagaacgcacatgacactttacggttgcgctcgttcgtacgtaaaatcatgaagtctgatgggcagttgccgaaaagctacctgaactatcttgataatccatcagcttacaatttccaagccatgcagctggaatatccggataagtgggctgcggctgatgaagaagctgttcaaggtactttggtggaaggtgatgacacctttgtgaatatggccaaggacaagttgaaggctcgttgcggtgataactacaatggcccacttgtacttatcggcggaccaccttgtcaagcatattctcttgtgggacgtgcacggagaacgcggaacaaagaggccttggataatgatgttaagcagacgctttacaagtgttacctccgattcatcgaggaactacatcctacaatcttcgttatggagaatgtgaaaggtatcctttctgctcagcaccgtcatcagggcgtatttgcacatatcgaacaagatatgcaggatgccggttacacgttgcactctctagtggttgatgagcctgagacccccaaggatttcatcgtaagggctgaatgttatggcattcctcaggctcgtcatcgcgtaattcttcttggtgttcgtaatgatgaggaacgtggcaagccccgtaccttgcagaagaggcagggcgtatcggtttctgatgcgttggccggtattcctaaggtacggagtggattcacttctaaggggaaacctgattgcgattgggatgaatatgtacgtcgtgctgcaaaagcaattctcgccactgatgagggccgtgatctatcggacgtattgcaaccagtactaagtggagccctccctccttcgcaggatgcgagtcgtgtagaaaagggcgtcattaatgtttaccgtggctggtaccgcggacatctcaagcatcgtacggtattggtgaaccatcatgcccgcaaccatatggcggctgatctagagcgttatctattctgttcagcgtttgccgcgaaacataataagccggctaaactgtatgattttcccaaatcgctgttgccggatcacgataatgcaaaaggcgtcgctaagggggaaaaagttatctttgctgatcgtttccgcgtgcagatgccggatcgatgctcgacgacaattacttcgcatatttgcaaagatggtcattactttatccatccagattgcacgcaatgccgcagtctgactgtgcgtgaagttgcccgtttgcagacattcccggacgattactactttatggggaacagaactgcgcaatatcaacaggttggtaatgccgtgccccctcttttggcacagcaaatcgccaaagtggtggctgaatatcttgatcgcgacgcaagaggatatttcgactaatacgtacctggtcgtggtgcgaattggctagcggggaatcctttgtcgatcatcttttgccgccatgtccagagatatcgggtctgctcttcagttaatcgaatatgtttgtcaatttttgcgatgtcagccagtgcctcattggttaaaatatgtcgatatcgagcccattcgaggattgtgcgccaagtgtcggcggtgatcgcagcgaggaagtctctttgataatcgatcatgtgatcaaaactcgtcgggaaactgtgtgtgggttctgatttcggcagaggagaatcccctattgcctccttggccgctgttggcttttcgcttggcggattgtattggaatccgcattcggtggcccgcgatagaagataattcagagcgttggtgttgatgccagctgatatgtcatcaatgagcgccactagtgaagtttctgatttaggactgagtatgccttgctctttagcgaaagtgtgtagctcacgaaggaatccagctggtgctgttgtccaatcatctatgcgtgcatcttctgtttgctctgatgctttgtgccgcggtacggatgaggacaccggagcagaagcagaaatgggattttcggttttcacgatggtttgttgggcttcgacgagcgcactttcttccgtgtctgggacagcatccgtctcagacactgttgaggtcaaggactgcaccgcatagagacaagacggttgtcgccgcagtgcatcccagcaggcttcttttttcgcccactcgccgatattttgggtggaacgattcgagtcgttcaaaacattactagcctgttcagcggccttcataaggcgtccgagggcggtatcgttgatgcgctgtgcgcgccaaatcgtctcaaaatcgaaatcagcgtggaaccgtttcagatcgagtgcatattttgcgacggcatattccgcgatattgccttggtaggcccccttataccaatccgccatcttgatgtgcttgtacacggtgtcgaagagaatccgcttgcacaccagctgtttgaagaactcggcgtcgagcgctttcacgctttcttgccctttctttgattcattttcgacgaatcgagcgaaacatttctgtgatccaaggctggcgatgtggggatacccgtcccaacacatgagatattttggtgcatcaatcatcttgatacgctgcttggaaggattgagcttttcgaattgcttgcgatcagcagtgtccctacggtttcgttcactatcatactgaccgcgggtgcgctcgtaataccaatgcgtcgggtttttgccgggtaacggaggcgtgagaacttgctgagagagctgggatagtttgacctggtactcgctgttagatgagaaatcggtctcggcgaccttgttttgactgttggtgtatcgggaaatgtacgggacaagttctcgggcaatatcctcacgtaccacaacgagcttgaccgggactacgactgcggacaagtcgagattgtctttcttttggctgtaaaaaatagatgccgtagtctggccgccgttgacaatctgcaagtcatggattgccgtaatgtttcctcgttcgttcatatcgactcgactggcggtcgcagataagccgttgttataagcgacaaatcgatcaggttctgtgcttaatgtgttgcggataccgcggttgacctttccacgcaaggacaagaacgaacggacgttggcctccataagtttggagccatgttttttgtaccagctggaaagcgtttggccggacaagaacataagataggtgtccatattgttaccagcctcgggtgccttgacggctggaatgccttcggccccgaggcttactgtgaggtgttcgagcggggccgcagcttgtgatgcttccatgaggtggcgcaaatcccatacatgggcttcgaggctgaccttatgctcatcctcacctttggagtaaaagtcagtggggtccttgatgctggagtcgcgcccggtgtattcccggtcggtaataaaataaagacggaatcgagagatgcccctcttgtgctcgtgaatgaatgaggcgaattcccaggctgcgctgctctcctctgcctgttcaaggaaggaaccatcaaaggcggctttgatgtaacgacgcatggctttgatgtatcgcatgcaatctttggcttgaatggtatttacctgttcgtctccaacacggttggaatagtcatcacatgcaatgacgacgatggattcgtccatatcgaatgcagattgatcgtatccatctaccgccatgaatcggttcgtaccctcaccaaatcgatatcccggttcaatgggctggtagtcagcgatggcctcgctgtcgcgtaacatttcacagacgacttggaagaatgcctcttggtcgagaagcccttcgtctatggccatctcttggactcttgtgacgagttcgcgtctgtagctagttagctccatcactcctccggtgatactgccatgacctcggtgtcgctgcttgtgatgaacggtttcatcgcggcggtttcgatctcgtatgtcaatcccgttataccggccggcactgtcttgaccgtcacacgtgggaaatcttcttcaacagcgtatacggtggccgctcccactgcgaacatggtgtgtctggccaagtccgaatactgctccaaacccaaggtatccagcccgttatcgatacatagacccgttcggtagggatcgtccgagactcgcagtagcagctctataatccgagacagattcaccagatgttcctcatttgttcccgatggctcgttgaggacaacagtgactagattgatacgtcggtcagacgtgtctagctgttcaggcgaggagattttgatcctcttcgcgttactgtggatcgttttaatttcccagtagcaacgttccgattcgaatgagtagtcttgaggcgcgccgtacgggcctgtccatgcctcacacgtcatgtcaaccgatctgctagtgagctttgcgatttcgaaggaagccagcagttcaccgcatatcccgcgtagcgtatttataccagttccgtcggcggtttttaataggcgtcgccattggtccatcgttgcgtagatctcgcgcaaggcggaccgttcggacgatgaccggcgaatgcgctcgatgaacgcgaggcagatttccgcgaatgcgtgcaacaagctccagtccttgagaatgaaagtcaaggaccaattctccttgataggcgactgccgtgctgtaacacgcacatcaatcgccttcaagctattcaatgctttgggtcgtgtattgcataggagcatgatgtacggccggcattcagacgtacatccgatgactaccggaagtctcagggacagatctaattcttggttctccgtccctagtcgtttggctagttgccgccagagattctcaagggaaccggaatcgattagtaggcccaatcttcgtctcccccttcgttgttagcgtcatattgctccctcatggcgcgatactgctgtcgtgttgcgaccttgttgtagtagtaggttgcattgcctctatgccggtcgtccgtgatctcggcagttggaatgacgagtttggcggcgagcacgccgttgccgctatccggtacgggatagatctttttcccattctgcttaatctggacgcggtacagcataagtgtggggctgattccgaaatacttcgtgaggtagtaatcagtctcgctactggtcatctttttgggcataggaactggtgagattgcccgggcgacattgaacacatcctgtgtgcctgctaggcgcatgcttttgccgctgatgcggaacaggtcgtgttccctgtcatatgtgcttttgcgctctacttgcgtccaatggaacctgactccatcaatgggttcccccttaccgctaataaacgcgatgttccagtcgatatctggattttctgtctgctgggtttttgcgaattcgagggccttagtggtgttaagctctttgatttgatttctgtattgcaatagcgtacggccgaagtatgtatcgtcgtagccggcacgatagtgagatagaaactctgtgattattccagcaggaatatgcctgtagacgcgcatcggcgaatccgcgataaacgcgctcggcattgaattgcactcagtgatcaacttattgagcgcgctgtcattgtctttcaagcggtccggcgctgcactgatacgtacagcttcgattcgggtcccttccaagtcgaaattagcaagcacgtcgctgctaccttcttcagcgctgcgcatcttcgtggcgctggtgatgcgcacgcctttttctgggttcttcatgatggctagaccgaactgtttgggagtctgtccttgccgctccattttcttggcctgcgttttgagattctcggtgatggagcaagcataacggaaatcagcaatggactgatctgtcagccagacacgttgcaggtcggcgtatcctggtcggtacccaaaccagcgccccatctgtagtagcgtgtccgccgacgtgacgttgcggtaaaagacgctgcaaatgagcccatccaaggtcataccacgtgacagtctgttgcctcccacgtagagggtgcattcgtttttcgctaggttgatgggtacttggttgatttcgctccactttgatgcggtggaattgactaggcgcacctgtagccgttcggtcatcagacgcatccgatgtaggactcgctgccaagacatcccgttggtttggccgtaagccgaatattcctcatcgtagacacgatgcatcttataaatgcgctggtcagtttcacttggatggaattttagcgcagatacaatgtcgccaacatatttgttgatcatgtcggcaatctgttcttggactgcagtaaatcgtgacaaatggatcagcatcgactgccgcttgtcctccgcgccgggacgcaacacgcaggcgatgaggaagcaatcaatggcatgagcaacttgcggatttaactcacattgtccattgttatcaaaacggtattccttcttatgggacagaggtaaccagctggagagttcatcttcatcaaggagttgtacgcatgggctcttttggccttcggtatcaaggtcgccgaacaatttcttcgcgccgatgtaggcgggaggagttggcaggatgtgaatgaagtccctaggaaacagatcctctttaacttcatcgtcaatgaacacattggcgaatggggtggcggtcaccgctacatatgatgaccgctcactgatattgcataaagtgcgtaacaacccgttgatggctgtgggagactcgtcttccttggcagagtttacggatgcgtagtcgctctcgtcatcgatgatgagcatgggcagatcctttggaaactccgggctgtcaagccacttgttgaatttgcctaagactatgccattcttcttcatgaccgttatcacgggacggtcgttccacgtcggtcgtggcagcccctgaaatgccttgctactcggagtagtgaaatcatcctcatttgtcagcgagactggagtgggtatgctcttgcctttggtatatttgccgattcccgtgctttctcttgtcactctcttgataccgagaaaatcggagtcaatgcgttcttgggtctgtctgcgtaggccttcgtcggaactagtgagtactacaatcatcttgtatccgtagtccactgccttgttcattagtgccatgtatgtacgagtcttgccggattgtacatcgcccaaaatgagccctttacgccgtatgggggcgtgatcgcgccgtgggtcagagagcaggccgagcacccgatccgtggacttatccaatgattgaagctgaatgaagtcggcgttctgtttctcctgtaagtattgctggtatgcaaaccatcgttgcggaaccagcccgtcttgcttcatttctggcagccactcccgccagttggtctccccattatcagtaagcgttgtaccctcggggatcttcgcaagaaacatgtccctcagacgtcgaacggcttcccgatattcatcggtatcacaatctagcccaagcactgatgcataaacacgaagtatatttccgatcaacttttcgtttggcagaatatcgtttgcagatagcgcattcgttgtttgctggatagccttggcccacagatcagacatgtgatacctccttgagtatcatctctccgttacggcagagggacattggttcagtgttcctgaagtattcgacgaaccgttctggcgttaaacccatatgctcgttcagcgtccacatctgtttagcaaagacgcgggcttgatcatcgttgagagtaaaattgtcagctcgttggtccattgcaaaacgagactgcatatcttcatatgggatcgtggccgatagaatcttggccatttccatgaacgtcttttgctgttcaacggttaatgcgtctaaaaatgacgcgatatatgggttgctcctgttgatttcgtagcggaatacaccatcccggtcattcacgatatcccacacaggagcataggggtcatcgttttttctgcgaccgcggaattgctgggccctgcgacttggttttgctaaacggtctacatatcgcttcatgacttcgctgacgatcttcggcggcgtggctcgagacttcttgatgtcaagagtccactcagcatctaggctatttggaatatccacttgcacgcggcttaacttagtggcctgcttcttgggaagcatgcgaaaccaactgccccaagtgattaatcggtaagcacgatatacatagaatccttgagtatcggttagcgtcttacctcgttgctcgctgagattcaggagctgtctgtcttcgtcgcgcagacggttttgatacggcaatgtataaccgcgcagcgtggctccggaagtgctgatgcgctggactccagtggtttggactgccggattatcgcgaaggaatgggtcgcgctgaggaatcgtgcatccgttgacgtcgatgacgatttgccggatattatcgtcgggatagggatgtgtaaaccggtgaaataccaatgcaaggtatccggtaagctcttccatagccttatcgatctctctgagagatcttccggcaagagtttcaagtttgtcgagattgcgccacaagatacaagtgccgtgtgagacgggcatggcatcgtggactctttggggcagcgctgacaaggtctctttctcgttcaattgttctaacgtccattcgcctgcgcgtgctacagcgtccaaatcccagcgcagtgtagtacgtgctccgttctgaagtgttgtcatgagtaaagatcgtgcttgcgagagagaagcagttttcagaccaagcccaaaccgacccagatcgtttgacgcgcgatccttattgggactgttgccggcaagctgcatggcttcgaatgcggttttctcgctcatgccattgccgttatccacaatagcgatgtatggttcctcgccttgcccgaagtacaaaatactgattttagtggcattcgcagctattgaattatcgatgatatcggctaccgcagtattcaagtcatatccgacagaacgcatggattccagcagattgggatttggcgcacatgttcgttctctcatggtgatacctcgacgtgcctaaagttgcttgcaaaactctagtgtaatgtacgttaagaacggttttcgaataatcaattaagattggcggctagtataagcatctttctaattactgtactcaatacgcaagctggggtctgtctcgtatgtgtcaataatcttgttgtaagaggtgaccaaatcagtgagcattgttttgcgttcatcttggctaaaatgaccatgctcatggacattggttgacaggaatgactgaatatcccagacctccaatcgttcagcgaagcccatatccgctgccaaatcccaagcagttttcactcggtctttcaccgtgataatgattggatgaaggccattcttgatattgcgctggcatttctccataagcaacgtggctggagcggtagtgcagtgtatggcggtatctccgatattgaagtcgccgcctcgcccggtggggtcatctgctactgaagctccgttgatttccacttccggcatgataatagacagctttgctgccacgagctgctgcagcaccgtgccctcgtacatggtaccgggattctctttttgccgcttcttggcctgctctaacagattgcctactgctgcggtgattgagagtgactcatcggcctctagcctgaatggcttgctattgaagaacttgcgtatacgatcaatccaaaaacgctctatctcgctgaaatctttgctggacggccgctcttcattaatgagcgctgcataatctttcattatgcccataaggccgcggctagttcgaccaccttcggacgcgagcaccctcttgatgtggtactcctctaaaatgctttggcagttcgcaccactcagtcctttgacctgtccttctttacccgtgagataatcatcgggattgattggcaatgtatctttcgagaaggcgcggttgagctgcagtatgccggctaggttgcctttggtgttaatgccgtggctctttcgaaactcctcgatggcgtcaatacccatgctcgctctccttcgacgactatcaagctgaccgtagctcgtgttgctgctttgccttgtccaatgtaccgcgaagtgctggcatgaagtagtgctcgccaagccattcgactacaggtactgccactgcgtcaccgaagccgaacaaggcttggttggtgcgcagaccattaaggttgtaatgagatgcgcccataagtgccgcgtactcctttggagtcatccagcgcactgccgtcgaccccttgccgagtcgtaccacggcttgtcttgaagaacccccgcgagctgttcgtagacatcccgaaatgtcatccgctcggacttcccacgtgggtttcccgttccgagtgcgcctgtatgccgttcgataagagatgaacggattgtccttcagcttcatcactctctctgattgcacagcggacagtgagtcaagaaatgccgttagcttgcccttaggccaccatcgggaatcatcgtctgacatctcttcggcgtacatgccaaagcccgccataagtggttccggcggttccggcagaactgccctgtgcatacgcagggaggtatcggcaaacacctgttgcaaccaatctggccgtagtggggaattggcttgcgagccctcaggaggattggttaggccgaccaagaacagtctggggcgggactggggcacaaaacgccgagcgtcgattgacagcgcgtcaactgaatatcccagttggttgaatgcgcttactgctgctgctatatcctcgcctgagtgagacgtagcaagacctgcgacattctcaagtacggctacaggtggcctattgttgcccatctcttccaggaggcggatatactgccagaaagcgctggactgtttgccgttcaaccctgtacgggttccagccagagatatatcggtacaaggggaggagccccaagcaatggagatattgtgaggcaagtcagagccatgtagctcacccatgtccccctcgatcagggtatgttcctgctcattgttgccgaactggttcctatacatctggcatttggcgtgatctatatcgttcgaccacgccacgtggaagccagcctcttcgaggcctaggcgggcaagccctatgccggcaaagaactcaagcgcttgtggtgcggttgagccgatacgggtagccccgctggatgcaccagtcatgccctgttcctttccgatttctgacattcactggtactagtgtacgtgctgcttgctatgaaatcgtatgcgtattcgctgtggcgcgctcctcctatgacatctaccagcattttttggcggcgaaacacgcatttgattacgcaatcgcgtggattgaagatgtcgggaaaggcgctctcgactattgtggtagccaagagaagcgatccgtttccgaggtgagattcgggaacggtccgactctcggcagtgatttatctacgcagacaagccaaaggagcctcgccatgatcctcgtcaccaccaccccgtccgtcgacggatacaccatcaccaattaccagggcatcgtcttcggcgaagtggtatccggtgtgaacatgttcaaggatcttggcgcgggcctgcgtaacatgttcggcggccgcagccagggctatgaggaagagctgatgcgtgcccgcaacgaggccatcgccgagatgcagcagcgtgcggaggcgatgggggcgcacgccgtggtcggcgtggacatcgactacgaggtgctcggcgccgacaacggcatgctgatggttaccgcgtccggcaccgccgtgcagatcgcgcgtacggcctgagtccatcgagcacagcctgggcccggactcgtccatcgagccgggctttgtcggttatcgtgacgcattgcactgacgctcatgaccatacgaatcgaagcatacgaccggctgcccgacgcggcccgcgccatccgcgagcaggtgttcatccgcgaacgcgactggcggccggagttcgatgaatgggatgccgcgtccgtacatctgctggtgttcgattcggtcgattcgtccgatcgccccggcccttccgcgcaattggcctcacgcagccagcccattcagcccagccagaatcaccccgtagcgacctgtcggttctacgcggaccccgatcatcccgaccagcccgggcgatacatcatcgcgcgcctggcggtactgtccgaggcgcaaggccggcatatcggctcgcggctgctggctgacgccgaacgccgcatcgcgcaagccggcggaaccatgaccgccgtgcactcggaaaacgaccactacaagttctatgagcagtgcggctatcgactcactgacgaggtctatgaaggcggccgtcacggctggctggtcaaggacttgattcttggctccgagaattaagggccgctgtctgtcccgcgccgtgttcaaatcgctgcaatacagcgagttcgaagcatcctgtatgaattgctggacgactacagcgcacagacaatcagataaatcgccacgacgtggcaggcatacccgatgaccgtgcccaagtgaaacacctcgtgaaactcgaaccagccggggacggggttcggcttgcgcagcgcgaagcatacagcgccggcgatgtacgcggcgcctccgcacgcgatgagcacggtcggcgccgggcctactgcgggagccgtccagagctgcggaataagcgttaccggggccagccccaacacgacgtatacggtggtgaacacccagttcggcgtccgcagccagacgatatgcagtatcgtgccaatcgccgtggtcgtccagattaccgtgagatatggccggcgaatcgccgggctgagcgcgaacagcacgggtgtgttggtgccggcgatgatgaggaagatgttcgaataatcgatgccgcacagcacgcgagtcaccttcgcgctgcgccatggcacgacgtgcagcagcgcgctgttgccgaacagcagcatggccgaggcgccgtacaccgcgcaggccgccttgacgggaccggccggcgcgatacagatgagcacgatggacgccgcgatgcacagcggcagggtggcgaggtgcagccatccgcgcagtcgcggcttgcgattgccgaatgcatccacggggacgatctggcgcttgatcgccttcagtgcggccttggcttggcggtagcgcgattgcgcggccctgtatcgggctgatgcacggtccagtgcggtggggttggcgtttgcgctggatttttgactcgcggttgcggaaggcgcaactgttgcggcggaagccatggttcgtccagatggcgtgctgatggaaacgctcatactgatcacctcgctatggccggcgacgctctcccgaccactaacctacgctaccgtaacttagtataggcccgcgcaataatcaaggttgatttcgtaatgcttacagttcttccgtggtgtggtattcggtggtgcggttgcggaatacatcgccgagtctgtgaactcgtattatgcgtgtctgctgggtccgacttgtgtcggttcctgatttcggattgctgcgaatgatgctcccgacgccgccccgccagttgccggattcgtacggctcggccgttcggccgagctggtcgtcggtgactccagatacttcgttggtttcgtctcggttcatgatgttatgtaatgctagtttatggcggatggaaagttgaggaaagttaaatctgcttcatgggcttctctctgatctgtatttgtcccggttcatatgtcaatcgtttgacctgtcgaccggggcagaatccgctgtcccggtcggcgatttcggcttgttttcgtgaaccgggacactccggtttcctcaactcatatcgtctggcagacggaatcggcggaataaggccgattctggaattggcacgttgtcccggttttcgcataaatcgattgacatttataccggggcaacaaaaattgtcccggtttgcaaagatcgcccgaaatcgcgaaccgggacagcggattctggcctggcttgaacgtcaaacgattgatgcaggtaccgggacattttccgccacgaaagttgggccataagcctcaagtcctaaagcccccctgaaaaacggcgcttgcccggacaaagcaaaagggctggaaccttccgattccagccctttagttgctggtgcgagtggggggagttgaacccccacgagcatacactcactgccacctgaagacagcgcgtctaccattccgccacactcgcagacaatcgactaacttacacccggctgggtaatcatgcaatcttcggcgtgtcgcatgggaggcagggatatatcgcttgtgggtctcctgcgggcgccgtgatctttgagggtggcggcactcccctcagtcacttcgtgacagctcgtccgcaattaaggacgggccttgcctgcaacctgctggttcgactatcgtctcaccttcgactacaaacagcccactgggctgtttgcttaacgtctcagcctcagcgaggggagcagagagaagttcggcacaagccgcaacgaaggagaaaaactcacaaccctggccggcgctcgccgttgccgtagaagtgggccagcgcttcgtcgcggaactcatcaaagtatccgccgtcgatcgaggcgcggatgtcgtctagcagcttcacgaagaaatgctcgttgtggatcgtggccaacgtaaacccgttgaactcgcgggcgcgcagcaggtggtcgacgtacgcgcgcgaataatgctggcatgtgtagcagtcgcatccctcctccagcggcccgaaatcgaacttatgctgggcgcgcttgatgttgtaccggccggcgcgcgtgtagatcgcgccgttgcgggcgcagcgcgcgggggccacgcagtcgaaggtgtcgccgccgttctccacgcacgcgaagatatcgtccacggaggcgatgcccagcacatggcgcgggcggttctccggcatcgcgtcgcagatccacgcgcaggtgtctccaatgatgcgcttctcgattgcgccgccgattcccacgccgtcgaagtccagcgaggcgatctgcgaggccgcgcgccggcgtagatcctcgtaattcgcgccctgcaccacgccatacagcgcctgatagggcttgcccagccgctcagccgtcagccgctggtgctcgtccacgcatcggcgggcccagcggaaggtgcgctccaccgagtcctcctggtaggagcgggtgttcatcagcgtggtgagttcgtcgaacgcgaacatgatgtctgcgccgattttgtgctggatgcccatcgaaatctcagcggagaaacgatgtgcgtcaccattcaaaggcgacttgaacgtcacgccgtcctcatccacccaggccatgcgctccttgcccttggcgatgatgtcgtccgacttcatgccggtcacgtccattgccagcgtcttcttgaagccgacgcccagcgacatcacttggaaaccgccagaatcggtgaacgtgggcccatcccagttcatgaaacgcgccaagccgccggccgcgtccagcacgtcctcgcccgggcgctcgaacaggtggaaggcgttggccagcaggcactgtgcgcctagatccttcatctgctcgggcaacacggccttcatcgcggcttgcgtgcccaccggcacgaaggcaggcgtgcgaatatcgccgtggggcgtgtgaatgatgccggtgcggccgtatcgggcaccgtctcgcccaagcccgctggccgtggatggcaggcgggtgatcgtttcgaaatggaaggcgctgcggtcgccgggctgtccgggctgtgcgcccaacggatgttcaagaaggctgatcgtcatatgttcactttaggcagaagggccagaaaagggccggaaattgtgaagaactcggtttcgaggggcggatttcgccgctcccgaacgtctacttccgcttcaaggggctcccggtcaagtaggccggctgcaaaaatggcggaatggcgttaaatgagggcccttgatactcggaattgaccgcgcgaacagccccttgaagtgcaagtagatgttcccgaaacaggaaatcagcccctcgaagccgagatgcccataagactctgcgatgattacgcatagactttcaatcaacgttcagaaaacctccagattgactgcctttactactgaggtagcacacgagaagtggcaatgggcaagtgcccgaatagccgccgaacagacgtgataggaatttaggaaaaggagcagcaatggctgacgaatttaacccgcagggcgtcgaccagaccccgcggaataacgaaaaccccaatagtactgccgataccggcaacgccgagccgaagaacccgtttgtgggtggcgactcggttgatgccggcaacgccagcgattccagcgagcagcaagccccggtttcctcggccgccctcgctgccgatcagcagcctacacaagccgctaccgacactgccgccaccgagcccatcccggactacgcctccgccaagggcgagagcacggtggtctcctcctcgccggcttctccggcagcaccggccgcaggccagacctcggccacaactccgctgtatcgtccggccccggaatatggcgcttatggtccgaccccgactcaggcacagggccagcagggcggccaggccggcagcaatgcccagcccacgcagcaattcccgttcggtcagcctgcacagcaaaccccacagggccagcagggcaaccgcaatccctactacaccaataacccgcagccgcagggcaacggcaatccgttcaatccgcccacgcagccgcagcagaacaacggcaacccgtttgccagccagtccggtcagaatggccggaatggccagcagccccagcagggcggtctgttcggtttcggcactcccggtaccggtacgccgaacggtcaaggcccggcccagccgggacagcccggtcagcccggccccgccaagcagggcatgtccaagacggcgagcaacatcctcatcgccgtggtcgccgccgttctggctgcggccctctgcctgggcctcggttacggcgccctcaccagcggcctgatcaccttgccgaccagcaattcgctgtccaacgtcagctcgaataagtccggctccgggtccgccaccgccaagagcggcgaagcccccgactggcagactgtcgccagcgatgtctccggctccgtggtctccatccagaccgcgttgagcaacggcaccgccaagggctccggcgccatcatcgacaccgaaggccacatcatcaccaacaaccacgtgatctccggtgcccagcagattcaggtgacgcttgccaacggcaacatgtattccgccacgctcgtcggcaccgacaccaccaccgatcttgcggtcatcaagctcgacaacccgccgagcgacctcaaggccgtgaaattcgccgattccgacaagctcgccgtcggcgagaacgtgatggccatcggcaacccgctcggctacgacgacaccgccaccaccggtatcgtctccgccctgaaccgcccggtgaccgtgaccgacgacaacaacaacgagatcgtcaccaacgccgtccagatcgacgcggccatcaaccccggtaactcgggtggcccgaccttcaacgcggccggccaggtgatcggcatcaactcgtccatcgcctcgaccgccacctcatccgactccgcgggttcgatcggcatcggcttcgccatcccgtccaacctcgtcaagcgtgtggccgacgaaatcatcaaggacggcaaggtcaagcacgttgccctcggcgtggtcatcaagtccgacacggttgaagccgacggcgtgactcgcggcggcgcgaccatcaccaagtccagcgccactggcagcgcggtcgtctccggcggcccggccgacaaggccggcctcaaggagggcgacaccatcgtggccttcaacggcaacgcggtgaacaacaactactcgctgcttggttacgttcgtgccgcggctttgggagacaaggtgacgctgaccatcgtgcgcgacggcaagaccatggatgtggacgtgacgctcgatcaggaggagtcgtcggtgaacggttcgtccagctccgattccaacggtaacagccagaataagcagaacaaccagaacggcaacggccggaatggttacggcaatggcaacggcaacaacgatggcggcaccggtgatggcggcggcttctccgacccgttcggcctgtggtaaagctggttcagcgcgtcacacggcgttgagcggtaaccgttgaacgccgtgtcagataggcaaaggtccgcagcagtgagcaactcctgctgcgggcctttcgtatacgcgggaagcgtttggctgggtcggccggagcggcggcagatatcttgttccgtgggcttttgtatgcacgggaatcgttctggcaggacgtcagctgcaggcgcataagggctgcgagcccctcatatgcacgggaattcttggcggaatcgtagggggggggcgattgatgccttccgactgagctgccaacgtagtttcgccgcccggcatgtcgcgttcaggccgctgatagggtaggccaagcgctgattcgggcaatgtctcgaacgatgcgcacaataattcaacacataactaaaaacgatttctttacgccgtgtatcggatggtcgcgcggagccgaaaggccctaagcaaagccgccggtgggttaacaaggcgtgaccgcagcgccgattgcgcgggccacgcttgccgcaatcgactccgtatacgagcgtaaggagcaatgatgagcggactcatcagattcttcaccaaaatcctcgacatctgccgacttgtgccgatgcttcccgttgttgttatcgccgcgatcccgctagccctgctgggcgattggtgcccatggggcaacgcaattgcgatgccggtgctgggtaatcctggtgtaggccaatggctgataatcgcgctggtggcaatcattgtgattgacacagtgcgtggcatgattgacgatttgcgccacggacaagtcggcgtcgatttgctggccgtagtggcgattctttccaccgttgccgtccgcgagtactgggcaagctgggcggtcatgctgatgattacgtccggcgaggccattgaggaatacgcgcaggccaaggccgagcacagtttgaccgcattgatgcaggcagcaccgcaaactgcgcacgtcgtcaacttgcctggcgtggggtgtggggctgccgctgataaggacgattcgtccgatggcttccggcgtgtaggctcggttccggcgacgtcctcccctcagtcgacttcgccgacagctccccttggagaggggaaccaagtaccgccgtcgaggggagctgactcgcggagcgagactgaggggagctggtcggctgaggccgccacgcaccgcttcgacacggtgccggtcgagcaggtgaagctcggcgatgtgctcatggtgttgccgggcgaaaccgtgccggtcgacggcgaactgctttccggctcggccacgctcgatctgagcaacatcaatggcgagccggtgccgcgcgaggtgttcgccggtgcccgagtgatgtctggcgcagtgaacggttccactgccttgaccatgcgcgccacccaggtggccgccgattcccagtaccagcgcatcctcgaactcgtcgcttccgcacaggagtcccgtccggccgtggtgaaaaccgccgaccgattggccgttccgttcactgtgctgtcgctggtaatagcgggcgtcgcctgggcggtgtccggcataccgacgcggttcgcccaggtgttagtgctggctacgccctgtccactgcttatcgccgcgcccgtggcatacatcgccggtactggccgtctcgccgccgccggtgtgctcatcaaggcgcaggatgtgctcgaaaaccttggccgcgtcacccaggtattcttcgataaaaccggcacgcttaccgtcaagcagccgcaagtggtgcgcgttgagatgctgcctggagctgagacccgtcttaatgaggaccatgtgctgatgttggccggcgttgtagagagctattccgtacacatcctgtcgaagggcatcgccaaagccggtgccgacgcgatggcccgcttgcgtcagcgtttcgcggacggccagcgtctctgccccgaaccagaggccagctggcccggccacggccgcgaatatccggtcgtcaagaatattaatgaggactccggcaagggcgtgtccggcgaggtgaacggccatgccgtccgcgtcgggcgactgtcgttcgctgcagccggggaggatgggttcttgactgccgaggtagcgggtgtaagccgggcggatggcccacggcaggaggcggccgacctcctcagcccgcttcacggacagtcccctctgggcggggatactgaggcaggatctggccgtacgattgccgggaacactaaggaaaaggaaacgctgcgtacgcgattcggtatgctacagccggacgaaatggcctcctacgtgtccgttgacgggcaactgatcgcccgcatcgtgctgcgagatgtacctcgcgccaacaccaaaaccgcgctcgccaatctgcacgaactgggtgttaccaagctcgccatgcttaccggcgataagcacgcctcggccgaaatcatcgcggacgaagtcggcatcgacgaggtccacgccgagctgttccccgaagacaaggttgccgccgtcaaggctgccacggaggcaagcgccgcgccggccgggcgcgcgaatcacgccgccagccctgtgtccgatgccgtagatggcatccggtccgatggttctcaaccgtcgcgttctcgatgcagccgcgccgccgcaatccgcaagccggtcacgatgatggtcggcgacggcgtgaacgatgccccggtacttgccgtcgccgatatcggcgtggccatgaccgacggcacttccactgctgcttccgaaagcgcccaagtggtcattatgaatgacgatattgccgctgtaccgcgcgctatcgccattgcacgccgtaccaagcgcgtgatgctgcaggccgtgatcgctggtctcgtactcgccaccatcggcatgattgccgccgccttcaacctcattccagtgatcgtcggcgctttcctccaagaggccatcgacgtggtcagcatcctctgggccctcactgccctcatcgaccgcgactaggcggggtatctcctcgactgagtcgcggttttgccccgctgacggtctgtaagcggggcgattctgtgggctaataggggttttgctccactcgtggtctgcgagtggggtgattttacggtctaatagtggttttgctgcgctggtgggtgttcagcggggtgccttggcgggttagtcgcagtttcgctccgctgatgggctgtaagcggagcaatttttcgggttactcgcgattttgctccgctggcggtctgtgagtggggcaatttcttgatcgactcgtggttttgccccgctggcgtgaggctggcagagggtattaggcacaggattcccaccactcacccctgttgcaacggaaggctttgcgttaggctagagcgcgtgactgaatctgtgaacactgaacttcgtattgctgtaatcggcgctggtccggccggcgtctactcatccgatatcttcctgcgccagctcaagaagctgggcgaagaacttggcctcggcaccgaagcgcgcatcgacctgttcgagaagctgcccgtgcccttcggcctggtgcgttacggtgtggccccggaccacccgtccatcaagttcatcgcctccgcgcttgagaagacgctcgacaacccgaacatccacctctattgcgacgtggaattcggcaaggacgtgactcttgacgacctgctcgcccgctacgacgccgtgctgttcgccaccggcgcggtcaaggacaagccgctgaacctgcccggtgccgaccttgaaggtgtgtacggtgccgccaagttcgtcgaatggtacgacgggtatcccaccggtgcccgcgaatggccgctgacggccgagaacgtcgccgtgatcggcggcggcaacgtggccatggatgtggcccgcgagctcatgcgcgacgccgacgacctcaaggccagaaccgacattcccgacaacgtgtacgagggcatcggccgcaacaaggccaaggtgctgcacctgttcatccgtcgtggcgtggcccaggccaagttcagcgtgcaggaactgcgcgagatggagaagctgcccggcgtgcagctcatcatcaatgaggacgacttcgatttggacgacgagaccatcgaggtggccggcaaggacaagctcacccgccagatggtcgaggaactgttcgccatccgtgagatggccgaggacatggaagatgacggcgacgtcgacttcgaaggcaacccggccgaccgcaagtactacgtgcacttcaactccgcccctaccgagatcctcggcgaggacggcaaggtcaaggccatccgcgtggaacgcaccgaaaccagtgccgacggcaagatgagccgcaccggcgagttcaccgactacccggttgaggccgtctaccacgccatcggctacaagccggccgaggctcccggcattacttacgacgagcacggcgcccacctggccaacgccaatggcgatggccgcatcaccaccgaagcggacggcggcgaagtgcgcgaccgtctgtacgccactggctgggccaagcgcggcccggtgggcctgatcggctccaccaagtccgacgcacttgccatcgtgaccaacatgcttgaggatctggccaaggccgccgaaggtggtcgcgtggccgaggatcgcgaccccgaatccatcgaccgactgctggaaagccgcggcgtcaagccgattgacttcgctggctggaagaaggtcgacgccttcgagcgcgccgaaggcgccaaggagggccgcgagcacaagaaggtcatcgagcccgaccagatgcgtgagctcgctctggcctgattgactatcagctcatcgcaccggcaactgcaccagcagcaatcggcgcgattgatacatcgataaataagaacgccggttatacgccagcgttcttatttatataaaagccattgtcatgccagtcgagcaggccgatgggccaaacgatccaagcagccaaagcaggccaaacaagcaaagcgtctcgatcagaccaatcggtaaagcggtaaagcggtaaaacaggccaagcaaccgcactgtcaagcatcgtcaatctcatgtaaacaggctattccgatccccgccaaccgcaccgtaagcaccgccaacccccatccgattcacccctcggcgcacatccagccaatattcaggcagtgattttagtgtgagcctcatggatgccaaagtacgggtgcacggccatttcaacggcctgaagactacgctgctgttcgccttgatgtgggccatcatcatgctgatatggtgggccacgggcggcaggcagcagacgctgggcatctacgtcattatcgggttggccaccacgttcggctcatactggttctccgacaaactcgccatcgcatccatgggagccagggaggtcagcgagcaggaagcccccgaaatctaccagatcgtgcgcgagctgagtgccaaggccggcaagccgatgcctcgcatctacatcgcgcccaccatgagtccgaacgccttcgccaccggccgcaacgaacgtcacgctgccgtatgctgcacgcagggcatcctgcagattctgaacgcccgcgagttgcgcggcgtgctgggtcatgaactgatgcacgtgtacaaccgcgacattctgacctccgccatcgcctctgccatggccaccgtcatcacgtacctcggttattctctgatgtatttcggcggcggcaactcgcgcgacgaccgcgataattcaggcggtctcggcttgatcggcgtgctcctcagcgtgattctcgcgccgattgccgcatcactgattcagatggccatctcccgtactcgcgaatacgacgccgacgaagacggcagtctgctgaccggcgaccccgaggccctggcctccgcgctcaacaagatctcctatggtgcccagaccacgcctatgcgcaaaacggccggcacccagtccgtctccgcgatgatgattgccaatccgttctccgcggtcggtttctccaaactgttctccacgcatccgccgactgatcagcgcatcgcacgcctgatgcaaatggccaatgaaatgaacggcactccggtggccgcatccacgtattccacgcgcgcaattcactagtccagcacagaactcaaaccggcacatggcgcaaggtgccgcataggtgatacacttgcctctcgtgcgtggaagcgcacatgcggacgtagttcatcggtagaatgaaagcttcccaagctttagaggcgggttcgactcccgtcgtccgctccatcgattttccttgaaatttcaacggttttccctcttttgagagcttattttcctgccgtatgaccgctatatgagaacaattcacgtcgtccgcgtatcgtgatgggcgatgtgtgaacccaagaccgctgcaaccaatggccaaccaacgccaaccctcgaacgcaccccgcacgacatcttcgtcggtgccggactggcgctcgccggaggcgtcttctggggcgtcaacgccaccgtctccaaactcctgatgaacgactatcacgccgatccgctgtggatcgcctgcgtgcgcgagctattggccggtgtcatctttctggtttgcgcaggaatcttcacgcctgacaagttcatcaactcgcttaaggactaccgttcctacccgagactcctgctgtgcgcgttcttctgcgtgctcatggtgcaggtctcctacttgaaggccattgactggaccaattccggcacggccacagtgctgcagacgctcaatctgctggttgtactcgtattcgtatgtattatgggcaaacggctgcccggcaaacgcgaaagcatcggtgtggtactcgcttttgtgggcacggtgctcatcgccacaggcggcgatctcagccagctcagtctgccgctgcccggtctgctgtggggcctgaccgatgccgtatgcacgtcactgcttgcgattctgcccatcgcattaatggccaaatggggcaacttcatggccagcggcgtcatgttcatcgtttccggcctaatgctgctgccgctcgtgcgcccgtggaccaccgcccccgcgttggactggttcggcattggtctgatggtattcaccgtggtgttcggcacattcggtgcctattggctattcctcggcggcacccagcgctgcggtgcaatgcgcgccaccatgctcggcaccagtgaacccgtaaccgccactatcaccggtgtcctattcgccggcgcggtctttaccccgaccgatttggtcggcttcgccatgattatcatcatggtgttcctcgtgagatagttcacagctcgcctggctccagaacctagtctggcgggcacaccccgagcgataatgaagccatgacaatcgcaacaccggaacgttatgccgaaatgctagacgccgcacgacgcggcggctacgcttaccctgccatcaacgtgaccagctcgcagacgctgaacgccgcgctgaaggggttcgcggatgccgaatccgacggcatcatccaggtgtccgtcggcgcagccgcatacctttccggcatcggcgtcaacgaccgtgtcaccggatcgctggccttggccgcttttgcacacgaggtcgccgcgaagtacccgaacatcaccatcgccctgcacaccgatcactgcgccaagcagtatctggacgaatgggtgcgaccgctgctcgcacatgagaccgatcaggtggcgcatggtcaggagcccacattccagtcgcatatgtgggacggctccaccgtgtcgctcaaggaaaatctggacatcgccgaggagctgctcgataagtcgcaggccgcgcacacggtgctggagatcgagatcggcgcggtcggcggcgaggaagacggctattccgccaaaatcgacgaacgcctctattccacgccggccgatggccttgaagtggcccgtcgccttggtttgggcgagcgtggccgatacatggccgccttcacgttcggtaatgtgcacggctcctacaagcccggcgtggtcaagctgcgtcccgccctgctcggtgatattcagtcccgtgtggcgcgcgcggtggtcgagggtgagctgcccagcgccgccggcatagtcgactttcccaacggcaagccgttcgaattggtgttccacggcggttcgggctcccgtccggaagagattgcagaagccgtgagccatggcgtgatcaagatgaacatcgacaccgacacgcaatactcgttcacgcgcccgattgccgaccatgtgttcgagaactatgacaaggtcctcaagatcgacggtgaagtgggcgaaaagaagttctacgatccgcgttcctggggccgcaaggccgaggaatccatgtccgcccgcgtggctgaggcatgcaagcaactcggctcggccggcaaagcactcagataacacccaaataaactgtcattcgccgtggcggcgccttggtgtcggcccgcctcgcgcaacgcgcggcaaagacaccagaagcccgattgcgtgagatggccgcgccccgagtagagggtgtaaggtagtctgtttccggcggaatcgtgcgaatgcggaggtgcatcatgcctggaattgttcttattggtgcccagtggggcgatgagggtaaaggcaaggcgaccgatctgatcggtaccaaggtcgattatgtcgcgcgcttcaacggcggcaacaacgcgggccatagcgtggtggtcggcgacgagtcgtacgccctgcacctgctgccctccggcatcatcaacccgaacctcaccccggtgatcggcaacggcgtggtcgtggacccggaagtgctcttcgaggagatcgacggcctggaatcccgcggcatcgattgctcccacctcaaggtgagcgaggccgcacacatcatcgcgccctaccaccgcacactcgacaaggtgactgaacgcttccttggcaagcacaagatcggcaccaccggccgtggcatcggcccagcctacgcggacaagatcaaccgtgtcggcatccgcgtgcatgac

SEQ ID NO: 353 - DNA, 12617 bp, Unknown
  R42_10m  MAG No. k141_20451
cagccaagtcgacgcgcccctcggccgtatcgagggtgaggcgatgaaccatgagctgatgatgtgggagggtgtgcgagtacttccctatgacccttggagcgcgcgccagcctgactggtgggaagttcaagcggccattcgggctttggcggaaacgaacgacgttgtcatcgtagatgccggtcagggtggactcattgagaccgtacccgatctgcgcagtggcctgcaggtgattgccgcggaattgtcggtaatggggctggccagagccaagtcgcaccggtccagattggattcatggggctgtgaagcgccacatatcgtaggtgtggaaccacgtggcgctccacgtgggagaggccacgtgggtattggcgaggcgcaggactatttgactgccacggtattggggcccatcaagccaagtgtcaatctgtgcggagacgtactggaaggcctcggcatcagatcggtgaccaaaggcagtcgcaaagccatgaacttgcttgccgatctcgtagaacaggccattcgcccggtttcgggagcttctcacaaggaccagtgatgctatggctgccgtcagcacgcgagccaatgaggctggcacagcgctcagaaccatattcttcggtctgctggatgacgtggcatctgacccgcaggttaccgatttggcggtgacctgtgatggccgcgtttgggcggaccgcggcaatggcatgcgcgaaacagtattgcatgtgccgttccgctcgccgcaagtagttcgagaatacgccgtccaactgtgcgcgcagctcgggcgcagactggatgatgcctgcccgatagcggatgccgccagtccggatggcatccgcgtgcatgcggtgattgccccattggtgccacaaggtgccgcgatttccatacgattccctgaccgaaccatggcatcgctacagcacctgagcaaattaggcgtattcccggctgcttggctgccgacgttcgtgggattggtgcgcaaacatgccacagtgctgattaccggcggaacaggcgtgggcaagaccaccttgctcaaggcgctgctggcgcaatgcgacgtgaacgagcgcatcgtcaccgtagaggaagttcgtgaactgggggaactgggacgcgacgatcatgtctcgttggtaacacgcgaggcgaatgtggagggcgtcggagccataagcctggcggacttggtcaaagcgacgttgcgaatgcgccccgaccgcgtggtgctgggcgaatgccgtggcgcggaaatcgtcgacctattgcgcgcgttcaattctggtcatcacggtggcatgaccaccgtgcatgcggacggcgtgaaccgagtaccgtccaggctgatttcgcttggattactcgccggagtcagtccacaggcgttgaccatgctggcggcaggcgctttcgacgcggtggtgcatttggagcgagtgaacggacagcggcgtatcacgcagatcggcgaactgcgcgtagcacatggtgaactggcaggaacaccgctggcggtatggaatggctgccatcctcctcggtatgccgccgaatgggggcacttcattgaacgatggggcatcgttcccaggccgagtggtggtgggtgatgatgtggtgtgctgttctggtggcgctcgccgtgctgatatggccggggaacaagtccgggaggctgtaccggctggcttaccgcgggcgcgcggtcgattccgcagccataaacgaacctcgatatgccgactcacctcgcgtgggcgttgcgcaggtgattacgtccgccatcgcgcgattgcgaggtggcggcacattggttgaagcattcgaggaacaatccagcagacgcttcgccactcatcgcattactgtggaacggctcataacggtgttcgaacagcggcgtctgcccgacgaatcaccagcgcaggtacttgaagctgcacgcggggtcgccgccgcagcggttttgagcgatgagctcggttgccaagcggtgccatgtctggaagcggtattgactgcttaccggcagatgaggctgatgcagaacttgcgatcgcaagcatgtgccgttcctaaagccactgtggggctgctgagcgcgcttccggccgtcactgtggcattgggcgagcttctgggagctagaccattggcgttcttgcttggatcgccacgcggtgtggtctgcttgacattgggaggatgttgttatgctgccggcttggcatggatgcgggcattgttgaaaggcagcggattatgagtacggtgtgggtacacgccgcggcaggctgtgcggcgattgctggttggctgtataaggctctgtctcgtcatgacagccgcttgccgggcgaggagccggccgtagcgcatgattgcgggtcgtcatggaccatactcatattgcgtatgttgcaggtgtccttgcgtcagggctcctcgattccccgggcgcttgacatggtgggcaaagccgtcggcggcgactgcggcgctcgcatgagcgaggtcgggaactccctgaccagaggggttccctgggctgatgcgtggcatgccgctatggctgttcagcatgagggtgcgccagctgatagtccatccaagggaaatacgaataccacgcaacgagatcttggcctgctgcaatcggctttggaatcgtcatggacgcatggcgatatgcctggtgtgcgcctcgaatccgccattgaacagctggaccgtgacgagcgtgctgctatcgaacggaatgccgcgaagctgtcggtaaagctactgacgcctacagggctatgttttctgccggcattcgtgctggtaggagtcattccggcgattgcgtccttcacgatgtgaatataggcgtgaactgagtgcgcttaggctgaatcttgttgtattgctcggtattgtacttggctgcgtttggttatccacatttgtggtggacgacacgtcgaggtgtggataactcggcaagctagaaccacataccccatttttcctggtgcatgaagcgttgatagtccacagtggtatgcaccccgcgtcaacccggcgcgggggccaaccactcacacacgcatggggaaggtgcgaagccactgcgcagcttcccctccttaccgaaaggaacgccaatgaatacccctatccccgtcatcgtcgacgggcaggccggcatctttgcgcacagcaaggctcgtgtggccacgctgaacgccaaggcgaaagaacggctatgcctcatggacgcacgcatccgcgccctcatggctgagcccgaagaaggcgcagccactgcggaatacgcagtcgtactcgttgcggctacaggctttgcggcggtgctggtcgccatcctgaagtcggatgccatcaagacgttgctgaccaacatcatcaaacaggctctgaaagtcgggtgacagccatgaagaccatgagatgccggtggaggctcgccagactgccgccagacctatgcacgggatcggccaccgccgaattcgcgatcgtattgcccagcgttatcgccatcgccgggctgatactggcaatgggacgtgtggtcatcgtttccatggactgccaaggtgccgcgacggcggccgcacgcgagtttgtggttaccggtgacgaatcatccgcgcgcagcatagctgcggacgttgcagggggagatccccgcgtcagcattgcccacaacggccaatcgacgagcgtgatggtcgaatgttcggtactgcccggcccactggatgtcactccaacgcgggtcaccggcaacgctacggcgataagccaataactggtcggctgctggctgggcggccgcaatagaaaggaactgcggtgcagggaatgcgttatgaggagggatcgggcacgatggccggagccatgctggttatggcggtgggcattgcgctcgcggtggcggcaagtgtgggcaacctcatgatctgccagaatcgagcgcgttccctcgccgatctcatcgcctttgacgccgcgtatgcgctgtggcatgtggatatcggtgatccatgcgcgcttgctgcaaacatggctgaagcgaatggcgtcacgctgggctcctgctccgtgcgggatgaagacgtgttggtaaccatcaaggtggaaaccatggttccggtggcatcatccgtggagcggatggctcgggccggaccggtgaattgtacggaaggagacaattatcacaataatggaccgtaagcactgatgctctggcgggcttctggacctttggttaaggtgagagcatgagcgagagtgaacgcacagaacgccgtcgcgtggtggccatggtgggcaatcccacttccgataagggccgtggtgccaaggtggatgcgcgagtattgggactgctggaggacgccggccgtgcccataacttcgacgtcatcgacatcaccggcgtaagtttcgacgattccctgaaccaggcgcgtgaacgcgcgcacgagtacgactatctggtggtggtcggcggcgacggcatgatcgcactcggtgccaatgccgtgggttgcggcggtaagccgctgggcatcgtggccatgggctcgggcaacgatttcgctcggggacttaagctgccggtcaatcgcatcgaaaccgcagtggaaggtatcgtcggcgctatcgtgcgcggatcacacattgatgtggacatgggacgcgtgacctctttggatggtggctatgccgtgaacccatccaccggcggggaatacgagtaccgggagaacaagtctgccgagcacccgattgaccggtactatgcgggcatgctgtcctgtggtcttgacgcaagtatcaacgaccgtgcgaatcattcgcatctgccgaccggcaccatgcgctattttgcggcggtgctggtggagctgacgcatatgaagcgttatgggtaccacgtcaaggccacgctggcggacggtaccacggatgaacgagacatcatcacgccgttgctgacgattgcgaattcgcgtcatatcggtggcggcatcgaggtctcaccgtactcctgcttctccgacgggctgttggacctggtgtggatgaatcatgtgccgaacttcggcgaatgtgcggtggccatctcgaacgcctataacggcaagctgctcgcctcaaaggtgttcgggtggaagcgcatacgcgagatcgaagtcacgcgagccgcagaaggcgacgagccaccggtgctgatggcggacggcgaatacatcgggcatctgccattcagggtagtggccgaggactgcgcgctacgcgtgctggtaccgccggccgtagccgcccgtgaggtggactcccgacaggaagtgctcgacgccatcgcccgagacggtcgcgaccccgtaaccggccagttcgcctgacctgattatattggctcccctcattaggctgagccgtaaagcaaacagcccagtgggatgtttgtaggtgagggttcgacgatagtcgaaccagaagaaagtcagccgtaggctgtccgcaattgcggacgagctggccgcgaagcggactgaggggagtgcgggagagcggtaccagagccaatggccgtcagacctcagacgacatagctttcgatatgcagcgtctgcgccatgacctctttgatggttcggtcgctgatgttcggatgcgagcgaaccagcgagataagccccacgattagcgtgaagaatgtctcatggacgttggtgattggcagaccatgcatctgctcgaaatcacgtacggtggtctgggcaatgtagtcggcaatacggtccgccgcgcggtcaatgaacttgatatacagttcggcgttgccatcttggatcatacggtttgagaaggggctctcgtcggcgattagggaacggagcacatgcacgatgtcgtctaatgccttgttcacgttgcctgtttcgcgcgcttggttccactgcttcaacgtggtgaggatttcgtcgatgacgtcatcgagtactgcgtcggctacggcttccttgtcttcgaagtagtggtagaacagcgaacgcgtcataccgacttcgcttgcgatgtcggaaacggtgattttggagaagcctttttccagacacaccttgcgcgcggcttgcacgatggcgtcgcgccgggcatcgccacgggtggggcgtttcttgtcgaggatatcgctcatgggtacctcctgactacaaccgttattgacactatgttaatacaaagaaagcggttaataacaataaaaatgcggtaaccgttgtcagatgaatgtcgttggaatataaagagttttcccgattcggcagctatgagcccggtttatcttgactttttatcggttaattctgagggcaaaggtaggttagtagctatggcacttgcactgtatcgtcgctatcgtccggacaccttcgaaggggtcatcggccaggaccaagtcacggtcccgctgatgcgcgccttggacgaaggcaagcttacgcatgcctatctgttctcagggccgcgaggatgcggtaaaaccagctccgcgcgtatcctggcccgttgcgtcaactgtgccaaagggccgacttcccacccctgcggcgaatgcgaaagctgcaaggacctggccaccggcggtccgggttccatcgacgtggtcgaaatcgatgcggcctcgcacaacggtgtggatgatgctcgagaattgcgagaacgcgctggtttcgcccctgcgcgcgatcgctataagattttcattctcgatgaggcccatatggtcacgcagcagggcttcaatgcgctgcttaaaatcgttgaagagccgcctgaacatgtgatgttcatcttcgccaccaccgaaccagacaaggtgatcggcaccatccgttcgcgcacccaccactatccgttccgtctggtgccgcaggaagtcatgggtccctacctggagacgatctgcgacaaggaaggcatcaagcccgagcccggtgtgctgaaactggcgatgcgcgccggtggcggctccatgcgagataccctgtctgtgcttgaccagctgatggttggttcggtcgaaggcgttatcacccatgatgccgctgtagccctgctcggcttcacgccggaggcgctgatcggtgaggcagtggatgcggtaatcaatcacaacggcgaagccctgtacggcgttatccagaaagtcgtggtcggcggattcgatccgagacgattcgtcgaagacctgctggctcgtgtgcgtgatctgctggtgcttacgttggccggggaccgtgcggaatccgtgctgtccgacacggctgaggccgaggatatggacgatctgcaccgccaagccaaggcgctgggactgggcgcactgaccgccatggcagacatcatcaacactacgttgggtgccatgaccggagccatttctccgcgtatgcgcttggaactgctggccgcacgattgttggccggcagtgaatcaggctttgcaacagccgctcccgcgccagcttcttctggcatgccgcctgcggctgcttcttcgacttcgactacgtcagccgcttccggtacgggtgccagtggttttgccggcgcatcgcgaggcgggtttgccggagtctcacatggtggattctccggtgctgcacgcaaccagcaagcagccgcgcctcagagcaccgcttcccatgaatccgctgtgggagacaatggccctgtcagcagcccagtcagcgaccggcccgcgggctctccgtctgcgcaacctgccgcagcaactgctgctgccaatgcctggggtgatcccgccacgtcgccggccgtcccggcccaaccggtgacctcgcctgcggcatcggataatcggtccatcgacgagaagtgggatgcagccgtcgccgctttgccggaaaccattcgtgaatatgtgtcacgagacaaggtgccgaccgtaaaattcggtcccaaccgtaagagtctgccttgcctgtcgatgacgttcgacaagtcgctgagccagcacgctttcgccttggccgtggacaacagcggtaagaaggcggcgtccgtggtgttggatgccgtgcgcaacgagttcggtgccaatgcggttattgcaccttctgcggtcgcggcgaatggcgagcgagtcgaatccgtcaaacgtatgagcccggagcaattggccaaggtcaagcagcagattgccatggccaaggccggattggccgcgtcgagtttgggcgcgggtctgggcattcatatggggagcgagccgaaagctccgaagccgactgcaacaggccaagccgaggatacggacgacagccatcgagccggccaatccagtgcatccacggcggcgaagagttggagtgacgatgacccttgggccaagccggccgtaagcaacgcttcaccgcaatctgcagacgggttcgcacctaacgagcccgctgctgcgcctgcgcccgaagagcatcacaagaagcatgttgcggttccggacatcagtgatggtgttgatccgtgggccgctccggctgctcctgttgcacccgctgcgtccgttgcgtccgctggacccactggacagtccacggggcagccagccaccgcagctcccgctacggcagttgccggcgcaagcgatgatccatggaatcagccgcaatctcaggctacggcctcgctggcactgcaaccggtcgaagccgacccgtggaaccagccatatcagcagtctcctcacgatgatccgtggaatcagccgcaggggaaccatgctcaggcggctccgcagccaggagacgacccgtggaatcagccgcagtcccagactccggcttcttcggttcctcagacagtgtcgggcaatatgtcgggcgatgacccgtggaaccagccccaatcggttccgcagccggctgccggcgatgacccgtggaatcaaccgcagcccgcacagccgacgccgaatgccgacccgtggaatagccagccgcagccgcaaccgcaagtcgcggccgaggacgacgaatactcgatgaacgaccagtcgctcggcgaggcgacggccatgaatcttgacgatctgaaaaagctattcgaggtcaaaaaagtcgagcaattcgcggcagatgatccgaagaaccccaagaacatccagcctgccaagaagcactcggatgaataatgaggacgaataacgaggaatacccatggcacttgcttatgacggcgcaatacagcgactgatcgacgctttcgggcggctgcccggcatcgggccgaagggcgcgcagcgtatcgccttctacatgctgtccgcgcccgaagatgaagcgcgcgatttggccgaggccatcgaggaggtcaaggccaagatccgcttctgtgatatttgcggcaacgtgtgcgaatccagcccctgcccggtatgcgccgacccgagacgcgaccgttcggtgatctgcgtggttgaagagcccaaggacgtgatgagcatcgagcgcacgcgcgaataccgcggcctataccatgtgctcggcggcgcaatcaacccaatggccaacgttggccctgccgacctgcgtattcccagtctgctcaaacgcttagaaggcgatgaggtcaaggaagtcattatggcgctcgacccgaatattgaaggcgaggccaccaccagctacttgacccagctattgcgacccgtaggtgtcaaggtcacccgacttgccagcggcctgccggtgggctccgacttggagtacgccgacgaaatcacgctgggcagggcgctggccggtcggcgtgaggcctaggccagcgtatcattggcgctttcgcccttgcggcgcatccacggccagaatgcgccgtggcggatgatgcgcgcggccttgtgccgtcgtgccaaccagataatgaacagtcctgccgccagtatgcccagaccaacaccaagggcgatattgcgcgcgtcaagcacgtcattcggctcgggggccggcatcggaattgccacgcggtgcccggagataagcagtcgatgcgtgttcacgccgtatggcgtacaggtcatcaaggtgacacggtcctcacccggcacaatcttgagcttcgacgtgtcatccggcaaaatcaccgaaatgcggtccactttgtagcccaaagtttcgcccatgacaaggtattcagttatggggttctgcggaaacctcgccggtttgctttcgtttgccggtaattgatagttaaccgctcgaatctcaaaggatggatgcggctgtctcaaagaaccaccggtgaaaacttgaatatttgctgaacaacgtaggccatacccgtgtccgcatgccggcgcggggtcgcggggtgaacgcgacagcccttataatcgttgcgtttgcgtagaatatcgaccaaacaaatctctaagagaagaacaaaaggacagcagtggctctcatcgtgcagaagtacggcggctcgtcggtcgccgataccgattcgatcaaacgtgtggccaagcgcgttgtggagacggagaagaagggcaataaggtggccgtggtggtctccgccatgggcgataccaccgatgaccttatcgatcaggcgctgagcatcgactccaacccgcccgagcgcgagatggatatgctgatgactgcaggcgagcgaatttccatgagcctgctggccatggccattcacgccgaaggcagccgcgcccactccttcaccggtcagcaggccggcttcttcaccgacacccgttacggcgcggcccacatcaaggccgtgagaccggaccgcgtgaagaacgcgctctcattgggagacatcgccatcgttgccggcttccagggcatcaacgccaagggtgacgccaccacgctcggccgcggtggttcggacacgtccgccgtggcactcgctgtggcccttggtgccgacatctgcgagatttacaccgacgtggacggcatctttaccgccgatccgcgcatcgtgccttccgcccgccgtattccttccatcggctacgaagccattctggaaatggcctcctgcggctccaaggtgctggcactgcgctgcgtagagtacgctcagcgtttcaacatgccgttgcacgtgcgctcttcgttctcccgtcgccccggcacgctggttgtgcctgacggcattgacccgcgcacgctgccgaacctcgactgagcgcggctacagcgaacaataatcgtaagtaatttcaaccaagacaaggcaagacatgactgaagaagaagcgaaatccatgggcgacctgttccctgacctgggccccgaggcaccggtgatttccggcattgcccacgatcgttccgaggcgctggccaccgtgcgtggcgtgccgaacgagccgggtatggcagccaaggtgttcaccgagctggccaccgccgacgtgaacgtggacatgatcgtgcaggccggcgcatccgttggcactgcagacatctccttcaccgtgcccgaatcggccgtcaagcaggtgcagaacacgctgctcgacaagcaggaagtgctgggttaccactcctttgatgtgaacaccaacgtcggcaaggtagccgtggtgggtgttggcatgaagacccacgccggtctggctgccaagttcttccaggccctgagcgatgagggcatcaacgtgctgatgatctccacttccgagatccgtatcgccgcactcgtgccgctcgaccagctcaacgacgccgtcaaggcgctgcacactgcctacggtctcgatgccgatcagatcgaagccgtggtgtacggcggtactggccgctgagccgcgaattccgcgcctaatacgatgaaagccctccttgcggagggcttttgcgattttaacgagattcaactacttcttagtgatgtagcctagagccttgagcatttcggcgcattcgagggcgccgccggctgcaccacgcagggtgttgtgggccagacccacgaacttccaatcgaagatggaatcctcacgcagacggccgatggaaacgcccatgccaccctcgtagtccacgtcgagcttgacctgcgggcggtcatcctcggtgaggtactggatgaagtgcttcggcgcgtgcggcagctccagctcggaagccttggacgtgtagttcaccagacggtcgataagctcttccttggtggccttcttgccgaagttcaggaacacggtggcggtgtgaccgttgagcacgggcacgcggatgcattgcgaagtgatcttgaggtcgccgtcgaacggcacgatctcgcccttttcggcgtccacatggccgaacaccttgagcggttccttctcggacttcgcttcttcaccagagatgaacgggatgatgttgcccaccatctcaggccaatccttgaaggtcttgcctgcgccggaaatcgcctgataggtgctcacaaccacctcacgcggctcgaattccttccatgcggccagtgccggcgtgtaggcc

SEQ ID NO: 354 - DNA, 6399 bp, Unknown
  R42_10m  MAG No. k141_20725
ggactgcttgagtacgtcgagaatcggcttgccggcggtaccggacggctcgccgtcatcgctcatgcgttcggacagtcgcccatccgcgcctccgcacacggcggcatacgccacgtgtcgggctttcggatgctgctcgcggatcgcggccacgaacgcgagcgcctcgtcgagcgtatcgacatgggcagcgtcgccgatgaattcggactttttttcgacgagcgaatcgtgggcgggatcgtcggacgtgttgagaatcgtctgcataagcgtgttccggtggtcggctgactgggtgttcgattgagcgcgaggctagacaggactatcagtgttcggagacgacgacgttatagtcctcgccggcgaagtaggcggtcaggcaggcgatcatctggcgggtgagctccttgaacgcgccgtcggtacgccagccgacgtgcggggtcaggacgatgccgggcacatggcagatggcgtcgtcggcggtcagcggctcgtggtcgaacacgtcgagtgcggcgggaacatcgcccttttgcagtcgggcaagcagcgcaccggattcgatgacttcggagcgggcggtgttgatgaacagggtgccgggcttcacatgcgcaaggttctcggcggtgacgatgccgcgagtggcgttgttgagcggcagatggacggagatgacgtcgctggtttcgatgagctcgttgagatcgtcgaccggagtggcgccggagcgttcgaaatgctcgggcggcacatgcgaattccatgcggcgacctccatgccgaaggcgcgggcgatgccggccacggtggcgccgatgccgcccagtccgatgatgcccatgcgacggccggcgagttgcagtccatcgccgccggcccacgcccagttgccggccttgacatccttatcgagttggccaacgcggcggatgagctcgaacaggagggcgaaggtgtgctcggccacggcgtgatcgccataatgttcggcgttgcagacgcggatcttcagctcgcgcgccttatcgagattgatgtagctggcgacgccggtaccgcagaacacgatgcacttgacgtgcccctgctcgctgatggtgcgcagcagatcatccgaaatgtggtagccgcccaccagcagggcgtcggcatccttcagacgctcggctatggtcgcctcgtcggacgtgaattcctcgaacatacgcacgcgggcaacgtcgtggagcgcggggaactgggccttgatgggctcgatcatcgcgtcgagcacggacggcatcacgacgaggggcagatcggtgcgttcgctttgggtttcgtaaatctcggtcatgggctccacattaggaggccgacgggaaaagcgtcaccttgcggcttcccctccttgagaccaagccgagcaactattgctttgccgcctgctcctgcgtgatgttccattccttgacgacgttctggtccgcgcccatcgaatagatgacatcccagatgcgttggcgtatctgagcgtcgtaggcttcgtcccaacatgtgcctatgggatggtcgctggatatcgggcaccattggtagttgccttgatgcacgttggcggtaggcacccagtcgatgcggttgacgcgccacgaccccttgacgcccttcttgccggcgaactggatgcgtgcggtcacaccctggttgttgaccaaggtttccggcgtgttcgccgactcggtgacggtgttgcccagaccgtagacaatccacgtgccgttatagttctcgatgggctgcgcacaatggcagccggcaccgtagataacgtcgaaggcaccagtgtcggcaagctcatgggcttccgaaatctgccaggaatcggcgtaatcaaggtattcctgcaccgagtgcatggcgatggccaccacatcggcaccttgctcgcgggccttgttggccttgtctaccgcgcgctggatgtcgctgccgtgattcgggtcgccgtcttcgcgcagacgatccacctgccagtcctcgtcggcggtcatgccgttgagggagaccgtgccggtgaccagacccagcttgccgccgccggtcggggaatcgatgactaacggtttggtggagtcggcttcggttttgtacgagccggtctgggcgatgccatcggcctcaagcgtgtcccacagacgggcgatgccatccgccccctgatcccaggaatggttggtggcgtgtgtgcaggcgttgtatcccacgttgcgggcggcatccgccacttccggcggaatgttgaagatcgggtacgcggcatatgggccgccgcgctgggcgatcggggtttcgaattcgcacacggcgatgtccgaagcctgaatgtactgcttcatcggcgcgaacagcgggtcgaagttgaaggcggtgccatccgtggcgttggggttcgggccttggaaatggctccacaatccctcatggaacaacaaatcgccgttgaccagcatggcgatgcagtccgtatccgggcaatccggtgaattgccgtgatgttcggtcaccggtttgggcgtgttcttcgctttattcaacgcgacgtccgacactccggcgcgtgcggggccattgccgtccgtgcgatgggttgcgaaccatgcgccgatgcccagcgtaacggcgagcgtgatcacgaacacgataatcagcgccgcacggttggttcgtgtcgagttggagcgatgttgcccctgcccagcgatatggctcatctttgcccgcccttcggaactcttcttctctctctagtgtaccgcccatctcagtcaaacactgcggggaggaaggcgatgggcaagcgattggacaagcgacataaaccggttaatcttcaatcaccattcacgaacaccacgcaaaagtctcacttagtggacattcttctttcgtttgttagcctttccccgaggtgccgcactcgttcacccgctaaaatggcggtttggaggcggacggacaatggcgtacctccgactccgcttaccacaagcggagcccgaccgtcctcggttatttcggttatttctagcgacacattcccaggaaagtttcgcaaaacagacccccaagcaacccactagaaacacattcccaggaatgcgtcgcaaaacagatatccggacaacccaccagaaccgtattcccggggttcgaatccctctgactccgcgaagtgcgaacaggcccatcatcaggagtttccggaaaacaaaaaagattccaagctttcacccggaaccttaatcggcggagtcagagggattcgaaccctcgagccgtttacacgactaacaccttagcagggtgcccctatcggccactcaggcatgactccacgttacgcaataatgcgcaacagcaaattactgtaccacgtcctgcggatacggcgtgccgaacgacacattattgaccgtccgcgggcgcggcatcgccggagaacgtaacgataaccgcgcaaatcaccaacgccacaccgatgatttcaccaacgccgggaatctcgccaaacgccagtcccacggccaccgccatggcgggattgatggattgcattaccgaaaatgcgccggatgtggtgcgtcgcagcgtgatctgctccaccacatagggaatgaacgaggccatcagggaaatcacaaacagcagagccagcagcttcagcgagccgccgggctcaagcgcccacgtggcatcggccttggggtgaaccacatgagccacagccggcacgccaaggaacagggactggaccagccagccgatggtcacggcgatgcacagattatccagcgaattgccgccagccgccacgcgccggccggtgatgatgtacatgccccacatcgacccgccgatcaaaatcgcaatcagaccatacaaaaacgtgccattgccggacggattggccaatgatatgccggccaacagcaccacaccgaccgccgcgacgccgataccgacccgttcacgccagcttttgccggtaatcaccgccaccgaaagcggtcccaaaaattcgatagacacggcaatgcccatatccatattgctgatggccacataaaacagggtattcatcagcaccagcgagcagccgagcagtacgaccagcccccagccgcgggcgtcgcggtgaaacagctgcgctcgcttagccttgctccagggcctgcaccacagcagcaacagcaccgccatgaatcccacgcggtaccacaccgaatacagcgggtcgagctgggtgaacgcaagtttggcgacggccgtagccaaataaatcaccagtgcctcaccaatcacgataagcaccacgggaacacggttgaggataccgaccactgccttcttcacgaggtttacgctactcggagagtcgggacagcgcgcagcgacttggaaggcgttacggacagtgacgcaatgtggacgattccgtggaatcgcacccaccatgcgaaacagccgcacagtgcgcaaacccttggaattccggcgatatttggcattacgacaatgagcgccgcgccatgcgcgccacatagtgagcatgacctcgttcggcattcctacaatggtggcatgagcaccgcaccgagacttgaggccgccaaacgcgattggggccacgacgagaccggatgcaccgtgctgcatatcgacatggatgccttctatgcctcattggaggtggcgcgcaaccccgggctcaaaggcaagccggtgatcatcggcaccggaccgcgcgcggtggtatccgccgcgagctacgaagcccggagatacggcatcaattcggcgatgccggccgcgcgcgcccatcagttgtgtccgaacggcatttttctgccagtggatatggcgtattaccgcatgatgtcgcaccgaatcatgcatgaggtgtttttgaccgtcaccgaccggttcgagcaggtttcggtggacgagggctatatggatgtgtccgccgcactgctggagtgggggcggccgagcgcaatcggcgcgtggattcgcgctcaggtggccgagcgcttccacgtgacgtgttcggtgggcatcgcctgcaacaaactggtggccaaaatggcctcgaccaatgccaagccggacggcatgctgctgattccggcggcccgctcggctgagttcgtgcagatgatgccattgcgtggcattccgggcatcgggccgtctttggagaagcggcttaatgcttggggcgtgcattcggtggctgaattggctcagctggatgaggctgcattgactcgcgccactggctccccggctgcggcacgtggattatgggcggcctcgcacgggttggattcccgcaaaatcaccacggtgcgcgaggagaaatccattgggtccgaggaaaccttggccgaggatacacgcgatatgcgcgtggtgtgtgggctactgcgttcggcctgcgacgaagtagccagcacgctgcggcgcaaggggctggtggcgcgcacgctgacggtgaagttgcggttcgccgacctgagctatcagacccggtcttttacgatggagcggccgaccgatacggccggcgtgttgtacccggaatgcgtgcggcagctgaaagtcatgctggggctgccggcctcggcggagtctgccactcccctgcccaaaactattcgcttggccggtatgagcacgtcttcgctcagtgaggcggcggctacggccgtgcagccttcactggatgacatgctcgaagaggccgacaatgcccgcggccagacctcacaggcacgtttgcatgatgccgaggccgcactggatgccgtacgccgcaaatttggcagcaaggccgcccagtttggggcgtgaacggctcaacgccacttgcgatctcattacgccgtgagacgttcgcaggcggaacggatggcctcgtcggtggcggtggcggagaaacgcaggtaggcgggagcgccgtagaattcgccggggctggggatgatgccgatcttggcgagctcggccatatcggcccagcagtcgccggacttggccttgacccatacgtacagcgcgccggagggcatttgtgccgaataaccatatgccttcagcgcgtcaaccagcgcggatagacggcgacggtaacgaccccattgctcgtgcacggcggctgtgtccttcagacccgcagccatggcggcctgcaccggtccggggataatctggccgatctgcttgcggtattcggccatttccttgaccagccggtaatcgccggcaatcagagccgtacggtagccggccatgttggactgcttggacagcgagtagagcaccaggatgccagctgcc

SEQ ID NO: 355 - DNA, 23145 bp, Unknown
  R42_10m  MAG No. k141_22103
gacgcggccaaggccgcgatcagatggctgaacccaccacgcaggtccggcacgtcgatgtcgcgtccggtcagcggggtcggtccgaagatcacggcggaatgcttgtagttgcgctgccggaaacggcacggcagcgagcccaggcactcgcggtacaactggatggtggcacccatctcgaccagcggcttggtgaagccgaaacggttctcgtacacggtctcgtgcactatcgacaggccgttggcctgggtcagggccaccacgagcggctgctgccagtcggtcatgaacccgggatgcacgtccgtctcgatcgccacgggcttcaagtccccgcccggatgccagaaacgaatgcccttgtccgtcacctcgaatttgccgcccaccttgcggaacacgttgaggaacgtgatcatctccggctgggtggcacccttgacgaaaatgtcaccgtgcgtggcgagcgcggcggacgcccaggacgccgcctcgatgcgatccgtcagcgacgtgtgcgtgtacccctgcagttccttgacaccctcgatgcggaaggtgcgatcaacgtccacagaaatgattgcgcccatcttctgcagcacgcacaccagatccatgatctccggctcagtggccgcgcccgacagttcggtcttgccctcggccagcacggccgccagtaaagtctgctcggtggcgcccaccgacgggtagggcaggtggatcttcgcgccgtgcaggccgttgggcgcggtgatgtggatgccgtccttgtgttccttgtccaccgtggcgcccagcttgcgcagcgtctccagatggaagtcaatcggacgtccgccaatcgcgcagccgcccaacgcgggaatgaacgcttcacccaaacggtgcacgagcgggccggagaacaggatcgggatgcgcgacgaaccggacagtgtatccacgtcggccacatcggccagctgcacacgcgaggcgtcgatggtcacaatgccgttcgcaccgtccacatccacgtccacgccgtgcagacgtagcaaatcggacaccacatgcacgtcacgaatctccggcacgttcttcagcaccgacttgcccggtgccagcaacgcggcgaccatcgccttgctcacgaagttcttcgcgccacgcaccttgatcgtgccattcaaaggcttgccgccctcgacatgcaacacgtcatccggattctcagccacgccactctcctcaatcaatcaagattcaaaaaatgctaccgtccagtttgccataagccatgtgccgactccgtgaaatgcaccccagccgaactttgatcaccgtgcacaacggatcccataccccccgtcgaatcaaaccgataacgtgatcttcctcacatttgccgccacggtgttctccatacttctacgctacgattcagggcaatggcatcagacgccatggccacaagcaaaggagcattcatgaccacagtcgccgtcatcggctgcacgcacgccggcacgttcgccaccacctcgattctcgccgagcaccccgattggaccgtccatgttttcgagcgcaacggtacgctgtccttcctctcctgcggcatcgccctgtgggtgggcgaccacgtatccgacccgaagaaaatgttctactcctcccctgccgctctggccgaagccggcgcgaccatgcatatgcgcaccgacgtgacgtccgtggacctcgacgccagaaccctcacctaccgcgcgctggacgaggccggagaccccgccgaacagaccctcgctttcgacaaactggtcgtgaccaccggctcgcgcccggtcatcccgccgatccccggcatcgacagcccgcatgtgctgctgtgcaagaactgggatcacgccatcgccatcaaggaaaaggcgaaaaccgccaagtcggcagtggtgatcgggtcgggctatatcggcgcggaaatcgccgagcagttcagcgtcaccggcgtcaagaccacgctggtcgacggccttgatcgcccgctggccaataatttcgataagaccatcaccgatcaggtggcggccgcgttcgaggagcacggcgtcacgctcgcgctcggccagaaggtggtcgagttccgcgacaatgacgacgacaccgtcactgtggtcaccgaaaagggcgagtacacggccgaaatggcgattctggccgtcggcttcctgccgaacaccgacctgctcaagggcaaggtggacatgctgccgaacggcgcgatcgtggtcgacgactacatgcaggcgtccgcgccgggcgtgtacgccgccggcgactccgccaccgtgttctacaaccccaccggccagcacgattacattccgctggccaccaacgcggtgcgccagggcctgctggtgggccgcaacatcgagacgccgaccgtgaagtacatgggcacgcaggccacgtccgccgtgcagctgtacgatctctcgctcgccgcctccggcctgacccgcgccggtgccgaacgccgcgggctcacggtccgcgagacctcgctcaccgaggattatcgcccggacttcatgctcaccaccaccccagtcacgtcgattctgacctgggacccggaaacccgcaaggtcaagggcggccagttctgttccaaggccgatatctccggcgcggcaaacgtgatttccatggcgattcaggccggcttcaccatcgaccagctcgccaacgtggacttcctgttccagccgaacttcgacaagccggtctactacgtcggagccgtggccatgaaggcggcggccgagtaagacggctgtacccaccgcaaaaaagaaaccccggcgtgatgggcgccggggagagaaaggagagaagaagaaagaggttaagttatgcagcttgttcggccgtgattacatataacagcaacagtttcaatgcaacatgggcactgtctgggaatcgtctgggaatcacggcccgtacaggctgttgcttgtttttggagccgatttaccggctggccttgatcttgtgggccagttcggcgtcccacatcgcgccggtggcggacatcaccgagtccgcgccggcgtcacggtacgcctggtagtcggcgggcgagaccacgccgccgacgccgttgatcgcgaaatcgagcccgagcttttcacgaatcgcggccagacgggcgaccatgtcgaggccggcgccacgaatcgcattgccgcacacgcctgagcgatcgcggcccgcgccgggcagggcctgattgccattggcatcgaccagtttggcggaaatcgtattgatggtgctgaagccctgcacggtgccgtggcccacggtggaacgcaccataagctccagagcgtcgtcgctggggatgtaggcgagcttgaccatcagcgggatgtcgccgatctcctgcttcacggcctcggtgatgcggcccacgagcagcggattgtggcatagcaggcggttgtggccctcgttggggcagctggtgttcatcaccatgagcttggcaccggtctccttgaccaggcgggcggtagtggcatggtcggcgatgtattcctcctcgctcatgccctccacacgcgagccttggaagctcgggaccagcacttgaccgggaccggcggcctcgatggcggcgcgcatgtccggctgccagacgtcagggctctgcgagggcacaccgaagctgttggagatggaaatcggctgttcatagttggtgtcggccagcacgccttcgtccagttcggcgctgcccggcgtcagtgaaccgtccgccgacttggggtgtacggcgagcacgttcgggaacgggttgcagccccaggcgcgcgaacgcacggttttgtaggtcgccagatcgaaacccatgtggaaagcggccgtggtgaaacggctgttgagcagcgggcctgcgggaatgccgaaaggcaggttgaccggctggcccaaaaaggtggccaaggcaccctcgctggtggttccggcggcatcggcaccgttgccatccttcagcgcctcggcgaacgcgccgaacggcccttgctcatagttgtcttcgtaactgcggctgacatcgtaaaacggctcaaaatcactcatgcttcaacgataagccaacctgcatgcgcacacgcacactcaacccatcatcgcgccgacaaacgaaataatggcgaaagcggcattggctaccacaaagatgatgaacgtcggagctgcccagccaaagtacgtgtctggaatactacgattcgtacggtgatattggcgcatctctttgccgtatatcacgaatatgatagtcgatccgatcacgccgatcacagatagcgacaatgagaatatcaaatatgcgttgtcatcaagatagttgccggcaagggtatcgatggcgccggaaagaatcgcattgttgaagatgtgcagtgcaatcgaccaaaccaacgagtattccatggccacgaatcccagaatcaggccaaagaggaacgcgaatgtgccttgcactacgtcgtcatggaacaggccgaacaccattgccgaggtgacgatggcgaagttcttgcccaacggcttgagctccttcatcagtacgccgcggaacagtacttcctcgcaaatcggagcgaccagcccaacgtacagccacatgcttacggtgacgctggattcggcgatgctgtctgacgtgggagaggcaagatcggtgcccagcctggaaaaagcgacctgcaccaacataacgatgccttgcacgcccatgcccagcacgatgaacatcaacgcccagagaggctgcatgcgcccgccgccatattggctgatgtggccaagctgattgggctccccgtacgagtcgcgatgctggccaccaagccagaattcgcaggtgaagatgtcacggtggcgcatgagcagcagaaatccgaacgcgacgaacaccgatatcaggctgatgatgccatcccactgcacgccggacaaatcgctcgcggttattacgccgacgataatggtggcgaccattgcgcccaagagcatcatgccttcataggcgagagtcagtcccattacacgattgaccaccttgcgacgccacgtgcgccatacacggcgaggatcgatcggcatgaccacgggcattgctgcgggcatcgtggcaggcattgcgttgggcattgctgcgggcatcgtggcaggcattgcgttgggcattgccggagccgtttgcacgaatggttgcggcgcagcggaatagggttgtggcgcgtagcccactggttgagcgtagtacggatgagcgaggggctgtggagccgactgttgcgccgggtatggggaataggcggattgcgccggatacgtcggctgcgtgggatacatcggctgggcaggatacgtaggttggacgggatatgtcgggtatacgagctgcgcggcgtattgtgcaggctgcacagcaggtattgcggcttgcggcacaggttgtgaaacaccttgtgaaacaatccgtggaacaccccgtgaaacatcttgtggaggtagcggttgtgcccatgcctccggctgacccgcatattgcggctgcatgctcggcccaggctgaacatactgtggcgtctgtggcatcggcgtctgtgactgtgccgcagactgcggtgccggtcgaggtggcaacggttgcgctgacagcgattgcgccggagccgtatcggaatcgttcgacggattcatgtcattcatggtcatgatgctcaacctaaccgtcattactggatgaatcgtgattatgtccacaaatgtgtacgaattcaggcacagtatttcgaacgctaggacggagttcatgagtgttgaggaaagcgccgccacgccggtgttggtggctgcggtggataacgaccgtatggcgttgttggcactgaagggaatattgccgcaactcctgcccgccgcgcaatggatgtggggcgcgggcaccagtgagacctttgtttgatgcgatgcgagcgacccaataatctcaatcagacacagagccaacggccctgggcctgcaattatggactcgcctttcggcgaggctcaatgctggcctcgctgctgtcgcggctcggcacagggcctgctgaaagcccaccgggctttcagcaggccgatcgcggctaaataatgccgcgatcggccaacggccctgtccagtctgcgtcctcaggctcgcgggcggactcgattctttcttcggcccagtgtttggcggggatggtcttgggcttgaaggggaacttttcggcgcgcatcttttcgtaggcggcgatgtcgtcctcgtgctgcagcgtcagatcgatatcgtcgtagccgttcatcagacgccaacgcacgtaatcgttgacctcgaacggcagggtcacgtcgccgcaagtgacagtgcgggtctccagcgagacagtcatctcacgaccaggctcttcctccagtagcttccacagaagttcgacggactcctgcggcataatcgcggccagcacgccgttcttggcggtgttgccgtagaagatgtcggcgaagctcggcgcgatgaccacgcggaaaccgtaatcgtgcagcgcccacacggcgtgctcgcgggaggagccgatgccgaattcggggccggcgaccagaatctggcccttaccggcgtattccggcttgttgagcacgaagttcgggtctcggcgccatgcgtagaacagggcgtcatcgaagccggacttggtcacgcgcttcaagaacacagcgggaatgatctggtcggtatcgacgttggagcggcgcagcggcacgcccacgccggtcagtgtggtgagtttttccataacaattttcctttcggggatctctcccccagtcagtcttcgactgacagcccctcgtcagagggggctcacgtgtattgactcagagatcggcgggagacgagattgtgccgcggatggcggtggcggcggctacggccggcgacgccagatgcgtgcgcgagcccttgccttggcggccctcgaagttacggttcgaagtggaaatcgagcgctcgttcggcaccagcttgtccgggttcatgcccaggcacatcgagcagccggcgttacgccattcggcgccaaagtccttgaacaccttatcgaggccttccttctccgcctgcaaacgcacgcgggaggaggccggcaccaccagcacgcggtggatgttctcggccttgcggtggcccttcataatcgcggcggcctggcgcaaatcgtcgatacgaccgttggtgcacgaaccaatgaacacggtgtccacggcgatgtccttgatcggcatgcctggcttcaaacccatgtatgcaatcgcacgttcggcggcggcgcgcttggtggcgtcggcgatcttgcccggctccggcacggaggcggtgatcggcagaccttggccggggttggtgccccacgtcacatatggaccgagctcggtggcgtcaatatccaccaccttgtcgaatacggcatcgtcatcggtcttcagcgtcttccagtacgccacggcctgatcccacagctcgccttccggcgcgtgcggacggcccttcaggtactcgaacgtggtctcgtccggcgcgatcatgccggcacgcgcaccggcctcgatggacatgttgcacacggtcatacgttcgtccatggtgaggttgcgaatcgcctcgccacggtattcgatcacgtaaccctggccgccgccggtgccgatcttggcgatgatcgccagaatgatgtccttggccgtcgcgtccgcgggcagcttgccgttgacgttgacggccatggtcttgaacggcttgagggacagcgtctgtgtggccatcacgtgttcgacttcggaagtgccgatgccgaacgccagcgcgccgaacgcgccgtgcgtcgacgtatgcgaatcaccgcacacgatggtcatgcccggctgggtcaggcccagaatcggggcgaacgcgtggacgatgccctgatcggcgtcgcccagcgggtgcaggcgcacgccgaactccttgcagttcttctccaaagtcgtcaactgcaacgcgctcgtctcatccgggttcgggcgatcgatatcaacggtcggcgtgttgtgatcctcggtggcaatgagctgatccacgtgacgcggcttgcggccggccaagcgcaggccctcaaacgcctgcgggctggtgacctcatgcatgagcatcagatcgatgtacagcaaatcaggagctccgtcgctgcccttgcgcaccagatgatcggcccagaccttctcggccagtgtcgttcccatagtgattcctccaaaaaattccgcgcgaggtattgtgttcgcgccttgttcgtggtattagcctatgtgcttgcgatgggcccggccatgagcatgccggatattgagatacggtcaaatgatggcctcaatatgactcggacccgactcgaacatgacctagtcatgactcggttccgctccagacatgtctcttcggcatccacgaacgccctttcaacttcatggccaccctgtgagacacttccccaatttgccatttcactatgtgagatggcataatcgcccttattatgactgattcccgggaagaaccattgaacaacagcttgaccgagtccgagccggttgaagacaccaccgccaaggacgatggggaaatccattccggcgttggcgtccttgataaaaccgtaaagattcttgacgcactggaatccggcccgtctacgctgggccagcttgtggccgccaccggtctcgctcgaccgaccgcacatcgtttggctattgcactggaacgccaccgtttcgtactgcgcgaccagcatggccgattcgtactcggctcccgtttcgccgaacttgccgccgcagcaggcgaggatcgtctgctgaccgccgccggcccgatcctgcagaccctgctcgatcgcactggcgagtctgcgcagatttaccgccgccaaggcgatcagcgcgtgtgcatcgccgctgtggaacgcacctccggcctacgtgattccattccggtgggtgccatgctgtcgatggaagccggttccgccgcccagattcttctggcttgggaggattccgaccgtctgcaccagggattgcgccacgccaagttcaccgccaccaagctggccgccgtacgcaagcgcggctggtccgagtccgtgaacgaacgcgaagagggcgtgtgctcgatttccgccccgatccgcaacgcctccggccaggtcatcgccgccatctcgatttccggcccgaccggccgcatgggcgccgcccccggacgccgctatgcgccgctggtgatggccgccggcaagtacctcaccgaggcactggtcaaagccgttcgctgaaacataccagtcaatccaaccgatagcccaaccggcagaaatcccgcgtcacaacgaaagagacgcgggatttctgggctataggaacaagagtgtggtgttcgcgcaggatgggcaagatcgggtagccggcggtggcgatggtgacggacggtccgaacatcgtgtagtcgccgattcatatctccgcgtcgtcgaccatgctcatgaacgcgttgatgtagatgactttgccgaggtgtacgcgacggcatccgttgctcgcatgcaatggcgtttcgatgtgcacgccgtcgccgacttcggcgcacatgtctttgagcagttcggcgcgccgctcccgttcggtgggtttggtctggttgtattcccatagtttgttctgccatgcgagctgtccgtccatgatggccgggtcgtcgtagtggtatggcaatcccgcatccctgcgcgccgtattgtccatgtcgtagtcccttccgtatcggttcatcggtctcggcccatcccatcgtcctttgttcgggccggaacgcacacggcctttctcaccagcatgaggccgcccgcgctgaccgattcccatcgcaacgtcgccgcacgcccccacggttccgtttcatcgaggtcaaggccgaagacgggttggacatgcttgaagaacttggaggcttgtcggaggaagccgagagccgcttgacgaagctgaatgagaccatatcctcccccgatatcggtttgggttcggattaccatgtcggccctgcgtatttcctgaatctttccaaatccgaatccacggcgaaagcgttcgatgacttttggcgtgatttcctgcaaccgctattgcacgattacgtgcgcggcatgtataacgaaacagaaatcatggagaagctgaaagcggcatatgaagatgcttcggattcgccgccgcgagtgctcgcgcatgggcgacgccgtcgtctccctgctcgactcccccatgttcgcaggccgccgcaagatcctcgtcgggttctcccagggcggctatatgtcgtatcgcatggtgctcgagcatccgcacgtgttcgacgcggcgatcctgatgagcccgtcgttcaagggcgaggagtcgacggacctcaccggtttcgactcccccacccgtttcctgctcttgtacggctcgcgggaccgcacgattccacctgcggaccagcagaccgcgcgtcgcgtgctcgaggccaccggccggctcgaataccgcgagtatcctggcatgggtcagccatcgtcgacgaggagatcggcgacatccgcgccttcctcggtctctagccggttccggacggaccgcccggttccgctcggtccgtccaccccgccatccgaccatccgtcacacacgtcacgcacccgtcaccgcccgcaatcggtgtcggcggcacgcgtcgccgccgtcacacgccgaggctgcgtccgatgacgccgaggaacgtttcggcaccggcacgcacgttctacggttgcacaggtttcccgaattgcgggtactccaggccgtgcaggtgatttcgacgtgaacggttcccgccgcgtagactgttttctccggaccaggcgaacctcctgcgtcgcaccccgaatccgtccgcaacggctggcatcgccatgccggaccttgatccaatcacacccgcacggcatggcgcggtggcccttccggcgcgcgcttgcgccgacggaccgccgcaatgccgccccaaccgcacaggagcaccgccccgcacacccatgtgccggcggtccgaccgtcatgcagatcggtcggatcgggggcgggaacgggcatgctcacacgatggccggagaccaggagccggtgggaattgatgccgtatggcgtacaggtcatcaacgtcagccgatcctgcccgggaacgatgcgcagctgcgaggtatcggtcggttcgatcacggtgatgcgatcgacttcgtaggccagggtcctgttcatcgttgagatgtagatgaaatcgccttcgcgcatttcatccaatctggtgaacatctgcgcctgcaccatgccgcgatggccggtgatgaccgcatgggtgtcgttgccgccgaccggcaggctcgtgccgtacagatgcccggaaccaagggacaattgcttgtctccggtgccgtggtagatgggaagatccaccgaaatcttcggtatggacacgcggcccatgatgccgtgaccttcgttgagcagcctgccgtagcgttgatcctgcgctgactgggatgacaggcgttccccgttactgaacgggtcggcctgggctcccagcaccggctgtccggatcggacgagagcgcggttgtaggcacgcgccgcccgcagttcgtcgtcgatccggctttccggccacagtcgcacctgctgttcgacggaagacgccgacgcggacatggacgtctgcgacgcatactgcatcagcagcggaaccaccgtgcataccaccgccacggcgatcaaaatccccgcgacggcgtacatcacacgcaatcgccgccgcatacgggcatgcgcccggtattctttggcaacgtcgaccagctgctcgaacgaaggtgccaccggcgtcattcggcccttactcaggctgcgaaactacgcttcgttttgcgggcacgaacgatgacgatcgaggcaccgccgatgcacagtaccgccacgacgccgaggatggccatgcccatggcaccggtcagcggcagctgggtgatgcttttgatgttgcggtacacgtaaccgttaccgccatcgctgagcagcccactggcgggaacgctcatgtcggtgatcgactccagcttaatcgtcccgttgtcgttcttcatcttgacctgcagtttggccgcggagccggaccaatagccattcggcaccttggtctccttgaggtaataggtgccggtattcagcttgaagctactaaaatcgacgagaccggcaccgccggatgtggctgtgacattcttaccattggcgtcctgcagaaccgttgtgaagtctttgtcagagtacacggtgaattcggcacccgacaagccggtcctgtcgttttctacacctaccttggtgaactggaagccgccgcgattggtcgtcgtggaaccggtcttggcgtttgcattggacgtcagatccacggtgcccgtgctgttcgacacgttgcagccggcggtaagcggagtgccgacgagcatattgttgaagcctgcatactcaacggtggtatcgcccgtgtccttggtctgcttcttgggctgtgtagcatcgaagatcacatacaggccgggttcggtcatagtgagcgtcatggtattgttcgtgtcgtcgacactcaccttattcgcttcaagcacggtgccgatgactcccggattatccgcgtacttacggattaacgaatcctgcccagtgttggcaagccagttcattggatcaccttgaagatccttattttgatacagtggcgtaccatcattggatttcagttcttgcatcgcctgaagaatgctcgtctccgaggccgccaccgtctcaagatgcaccgagccgccggacgtgtcatcaccgatcttgtagttggcgactttcgccactttgaacgtgcggttgctcgaagaggtctttccgttccatgtcttgaacgcgtccgcatccgtgcccttcaccgtgatggtgttgccgttggtcgcgcaagtcgtggaagtttgcgagactcccggcgcacccgactcttcggccatggcgctggccggtgcggtcatggccgcgaacagtgtggccgccgcagcgactcccgccatccatgattttgctttcattgttctcctccttatggaatatatggatgaatccatgttggtcatacggaacggttcccgtatgaacgttttctgatatgcgcggcgattgccaacaccgccaacgcccctccggacgccaccatgccgacaatcgtcaccacccacgtggcacgacgccccgcggagggcagcgcggaaaccggttgcggccgattggtcagacgattgtccgtaacaccggaccaatcaccccgtccgtgcagtacggctttcgccttgggatcctcctggcgaatcgtgaattcggcccaggtacggtcgctgtcgggcaaccggtatccgccgggcgcggtgatctccgtcagccggtaggtgccccagtcgagattgtcgatagtcagtttgccgacggtcggatccttgtctccggtgccggcacaggcggcatcaccgtcgcccacgcaatcggcgaagttatagagggaatcgttgaccttgttccacgtaccgttatcgttgcgtcgttcaagtcgccacgtggtgccggacaggtattcctcgtgatgatcggcgtccaccttgctccacgacaccgagccggtgatcttcttgtctcgaatcgtcaccgtatagccaccggtccattgatgcaccgacgcatgcggactgccatccgcgttcgtcgggccgaaatacgcgcctccgccgcaattcgtcagatagaaatcggtctgctcgtcgttgatctcatagccgagcggcgcttggagctctttgatccgatacgccgtgccgcactgcaacccttgggttttgccgacgacgatcatgcctttctcgtccgtcaccgctgtaatgggcgtgggcttgctcgacgcatagtcatggccgtcccattcgagcagttcgaatttggcgccggccagatcccggtagccggacgcatcatcatcggttttatgcaacagcatcgtcgatgtctgcacgatgacgccgctactgctgatggccgcgccgttcgtattgaatgcgccggcatcggaccatggcgagttggcgaattgcgcggtgttcgccacgtcgaatccggcggagcctttgaacccgtactggtagctgatggtcaccggcgtggaatcgggaacgtacaccgtcaatacgccgccgagtttggcatcgttttcctgatatacgatcgcatccgaggatggttggtacgttttgccggccgggcaggactgtccgttgcctatccaggcgaggcacacggtcacgttgcccaggaacgtgacctgcggattgctgccttccggtatggcgggcacggtcagcgtgtctttgatgggcagcatgtcggtatcggggacatcatcctgtttcgcatgcgtggcatcgatgttcagtccataccggttggcgcgcacataataggttcgggtgaagcttttgccgtcggaggaccagccgctgtcgacgttctgcttgtcttcgacgccggtattggttttctggaaattatcgacgaaggtttccgacgtggacacggaaggtatgctgccggagcccatggaaaccgtattacggtatttggccgtcaggcaatcgccggcaccgtttttcagcgcgggatcggcgacgcaaccccgtttgccgtcgtatttgccttccgcccagtacttgccgtcgttgatgtcaggagtgcgtgcggccacatacagatacacgttgccgtcgttcatgagatcggtcgcctgttgggggatggtgatctggtacgtgcggtcgccggtctgcttgacggtaacgacatattgcacaccctgggtattggtgaaccgcgtctcccccacggtaagccactgtttgcggtcgccatgatcggagaacgcgaacttcacgtcgtgcaggccctccggcagggtttccgtgaagacgagcggcgcgcgacgccaattgtcggtcacgtgcgcgctgatacgccatcccacttgcctcacggacaccggatcgggggtggcggtacgtgtgtagtcggcaccgttggccgagcaggaggtgaatttggggttcccctgtccgtcgaccggatcgccgcaaccgtctttgaccaaagaggcgacttgcacactggaggtgacgggtttgacgaacgctccaccgacgccggttcccgcggtggctgaattcttacgcacggtcgtttcactggaatcgaacaggctttgataggtgatcgccgcggttttgccggtggcaagcgcgttgtcggccacgaaccggaaggacgtgtatcgctgtgattcctgcgccttgttaaggtctatccaggtcctgccgttgtcggaggacacttgcgtcgctccggccagctgcttaccgtcgacggtcacgcgcagactgtcctgcagcagttgcttcgtgtaccagacgccgctgccggtgtcctgcatgacccatcccgccggcagttggcccttgccgtcattgcgcaccgagacattccacgacgcaaggccgcaatggccttccgccacgcccatggtctggcactgctccgccgagggggtctgctgcccgcccgccgttttggtgagtgagatccttggccgcagcggattccaagcgactgcgttgttggtgaaatagtcgcctccgttattggaacggacgaaccgcgaaatgtttttcgaagcgggatacagcacgtcattggcgaacgtcgaatcgtattgcaacgtcaacgtctgccctgcgggaatcgaatacgaatccggctggaaaacccatttccaataggttcccgtggccaatcctccggccggccatgtgacggcgggtccgcccttgtagctcggcagcgtgaccgtatataccgtcaacgtgccgtgccccatcgttgtggtcaacgtttggtacagatcgttgatgttctcagccgtgtaccatcctcggcttgacgaggtggaaccgttctgttccgcaacgttctcatacgccatccaatcctcgatcttcacgattggctggtcgatggttcccgtgttgacgtattgcgcctgccatctggtactgagcgttccgtccggttgcagcgtcggcgtgccgacgacctgcttggaggtgctgccgcttctgcggtacatggtgatggtggtggtatggccgttgccgaaatccaatacggtctgccctggattattgccggtcaccttgttgcgatcggcttcgatgtacaatcggccattgtccagtggggcggcggcgttcttgctgatggcgtgctcactgaagacgatggtcaccaatccgtcgggagcgatcgtgtacgtgccgagatcgtcgttgagcgtgcccgacatggcggtaccggtgccgttgaatcccgcgatgtggtatcggaacacgtggttgtcttcggtgatgcttcctttgggtatgacgaattgcgcgtcaaaacggaattgggctattttcgtgctgtaatcgaacgagacattgccgtgttcatccacgggaacgttctgccattgcgtcgaattctgcaatcgatattgcactgcggcattgctgatgcagccgaccaatcggccggaaggctggctagaatcaacgacggtgccttgctcgtcctgattccaaggacgtccgcacgccggcgtctgttgcgcggcatcgacaaccccccccccgtcgacggcggcggccgtggcgaccggtacgatcatgccgacgaccagcgcgacagccgtcgccaaccgcgttaaacgtgtgaccataccagaactccgcacatactgacggttcatcgcttcgcgcgaaccatcgtgagatagtgaccgcaagggatgcgcttgtttgaatgcgcgccgaagcacacgtccctaaacgcgaaaacgtaaccctttattcaacaaatgttatcacttgtatcatatgtcggcatatctttgtgccgggatatggaaccggtatacggccgcgcctccggccgcgcgcgtatacgaatacttcgcgccgctttccgcttctatcaggaacagttacctgaataaaccgggttacctgaataaaccggacagttggctccatagcgacggcttgcgcagcaaatcatcaccctcgccctcgccaggcgcggtttggttcaccgcataggtgtaggcgcgtttggaactgggcttgcccaccagttcgccaaactccagcaattgcgtacgcggctcgtaagggtgacggatatcaaattcgatcaatcgcgtggcacgtttggccggagccggtccgtacgtattgaatccgcaggttggcgtagcgataagcaacagaccctcatgttcgccgacgaaaccgttgcgatgatcatgaccagctacgacgccgaaatacccctcgcgcagcgcctcaaactcgtccgactcatccgggcaggaaatgccttcccccagatacccgccggcttgagtgcgatcctcgtccagcacataataggtatccgcatgcttgcggtagccctgcatggcgaaagccgcattggcggccaccggtttgagtacctggtaatactccggcagcggcatgtgctggaacaccattgatttggctccgatatgttcgggcaaagccttgaggaaggccaatgtctcgggcgaaggcgtgccgaaaccgcctccatgcgcatagtcaccggaattcaccagtaccagtcccagtacgttgcgcgtgcaatccacatccatcaccggcaatgcaaaagtgccgggaatggtggacgcggaaatcggcgcatcggtttcttcaccattggttgccgcaggcgagccgtccttatgacacatatatacggtctgcttggccagcgcatcgctcggcggattgatgcaaccgggaaactcgcggtagattccgtcgagttcggcattgctcaaaccgcactggaaatcgtggttgccgtaggtcaccgcccacggtatgccccgtgacgccaaaggagaggtaaattgaccgatggccttgcgcaccaattcacgcgtatggttcaacgcagattcaggaatcgcctcttcgcaccaacggcgtttgcggaagctcttggcaaaggccggatcgtagccggcgatctggttgccggagaaaatcaccagatcaggccgtgtggcatcaaggctggcctcaatcagggcgatggtgtctttggagactttcggcccatcctgaatgtcggcaatctgcagcacgcggaacttgccggaatagtggaattgcagtcgtccgagacgcgcagagatagagaccgggcggccgtcttcggcatcggccggcttgatacggggtttcgacgacatcccctctggcgtacgctgtgtttccgtcatgccctccactgtacacacaaacgaaaaggcccgccggagcgggccttttctacaagttcaactactggagcagaatctctgcacaacatcatcgtcgtaacggtaagtctttccaatgcccgtccaacgtaacagtcctcgtgaccatacactatttgtgggctctgctctgttcagttgttcttgtatctcataatctattcatcactcccgtttctcgcaacctgcagagagtcgttgtgcgttttttatcacaactgttcaatcgcactttctgactatcggaaaacgagctgaaccgttcacatcgaacccgtctgatgttcggtttcgttcgtttcaccgccgctcacggcgtgtcgcgagcacgctagcacactcaaaaccaaccaacaccgaactaacatgaacacccgttgaattctggcgcgttcagtcgttttccggccacgccagagcttacgatataagctatggcacagatatttgacgcaccctcgaaggcaattctgcgcagccaaatcgcagagcatattgccgaaaacgacaacaacgaccgccgcgtcgatcaggaaggcgaggcaccgctgcccaaggaccgtttcttcgaccgcgagctcagctggctcaagttcaaccagcgcgtgctcgaatgcgcggagaacgaagacatgcccctgctcgagcgcgccaacttcgccgcgatcttcgcctcgaaccttgacgagttcttcatggtccgcgtcgccggcctgaagcgccgtatcgactcgggcatcgccgtgccgtctgccgccggcctgagcccgcgtcagcagctgcgcgcgatcagcgagaccgcacaccgtctgcaagacgagcacgcacattacgcgatcgacaccattctgccggaattggagaaggagcgcatcgtcctgctgacgtgggacaagctcacctcctccgagcaggagcgtctctcgcgttactaccgccagcaggtgttcccggtcctgacgccgctcgccgtggatccggcccacccgttcccctacatttccggcggttccatcaacctggccgtgattgtggagaacccggcctccggcaagtcgcacttcgcccgtgtcaagatcccgggcaacctgccgcgcctggtgccggtggacgacatgaccgacgaggagtccaaggacgagcgttacggcttcatcgccatggaaaagctcatcgccgcgcatctggaatccctgttcccgggcatgatcatcaaggaagcccgctccttccgcgtgactcgtaacgaggacatcgacgtggaagaggatgacgccgagaacctgctcaacgccatggagaaggagctgctgcgccgccgcttcggaccgccgatccgtctggagatcacggacaccactagcccgttcctctcccagctgctcgccgaccagctcggcgtgagccaggacgaggtataccgtctgcccagcccgctggacctgaccgtgctctttgagctcggcagcgtggaccgcccggacctgaagaaccgtccgttcgtgccgaccacgaaccgtcagatcgccgaggtcgagtcctcccgtgcgcaggacattttcgccgccatccgcgagcgcgacatcctgctgcatcacccctatgactccttctccacttccgtgcaggccttccttgcgcaggccgccgcggacccgaaggtgctggccatcaagcagaccctgtaccgcaccagctccaactcgccgatcatcgacgccctgatcgacgccgctcatgccggcaagcaggtgctggctttggtggaaatcaaggctcgtttcgacgaggacgccaacatcgcgtgggcccgcaagctcgaacgcgccggcgtgcacgtggtgtacggcatcgtgggcttgaagacccactgcaagctcatcgaggtcgtgcgtcaggaagcggacggtctacgccgctactgccacgtaggcaccggtaactacaacccgaagaccgcgcgactgtacaccgatctgggtctgctgacctgcgacccggtggtcggccaggatctgactcgtctgttcaaccagctctccggttacgcgccaaagtccagcttccaccgtctgctggtggccccgcgcaccgtgcgcaccggtctaatccagcgcatccgccgcgaggaggacgccgcccgcgccggcaaggaggcctggatcaagatcaaggtcaactccatcgtggacgagaagaccatcgacgccctgtaccgtgcctctcaggccggcgtgaagatcgacatcgtcgaacgcggcatctgcgctctgaagcccggcgttcccggcctgtccgagaacatccgcgtacgttcgattctcggccgcttcctggagcactcccgcatctacgccttctgcaatgcggacggcccgcagatcggcgagggtccggcttccggcccggaggtctacatcggttcggctgacctcatgcaccgtaaccttgaccgccgtgtggaggctctggtgcgtgtcaccgccccggagcagattgacgggctcatcaagtacgtggacctgcagatggccgactccaccatgagctggcacatgcagcccgacggcacgtatgtgctgcacaccaaggacgacgagggccgcccgctggtcgacagtcaggaatacctgattcgcaagcaccagcgccgccccaattcgcacaactgatttcactcgatgctccctgtcaacgcaagctgactgagggtggttacgatgcccggctcctctttcgagaggatgccgggcatcgtcgttcagcgcgcaaaactacgtagcagcggtccaacgtgacctacaatacaagagatgggtacgaacagtatgagacgaatcgtggaagccgccggcggtattctgtaccggtggaaggatgatgccgagccgacgcaggcatcatctccatcagcgaaatccaatattgccaccgatggcaccatcatcgcgaacaccacggattctgacggcaaggccacggcagcacacggcgcatcggacgcggctcccaccccggacctggcgcaggccgacagcccggccgcggcggacaacgtactcaaccgcatcgaactgtgcgtcgtgcatcgcccgaaatacgacgactggagctggccgaaaggcaaggtcgacccgaacgaatcgcaccggcatgccgccgtacgcgagatcggcgaggaatcgggcctgtccgtggaacttggcccttatctgggcgacatcgagtacccgctgtccgaagaaggcagcaaacagcgccataccaaggatcggtcggcggataccaagcatatccagttctggatggccacgccgatcagcgccatcgacaacctgcggcgcacccatgcgtttggcccggtgcatcgggcggacatcggcgaaatcgacgaagttttgtggctgacgccggccgaggcccgcaagaagctcagccattccaccgataaggacatcctcgcgctattcgttgatcgggtcgaagaaggtgcactggacgcggtgccggtgattatcgtgcgccacggcaaagcggaagcgcgcaagctgtggaagggttcggacgcgaaccgtccgatcacgccgcgcggcgcggctgcggcatacgcgctgaaccgcgagctggcgtgtttcaatccgacccgactggccacgtcgccttgggtgcgctgccaggagacgttggagatgttcgcgtggcagaccggacgagacatggttcatctcgatccgctcaccgaagatgcatacgccgctgcgccggacaccgcatgggagtgtctactcagcgaaatcgagttcgcacttgagcgccgtcagcccatagcgatatgcatgcaccggccggtgattggtggtatgttcggacacctgcgcagcatgtgcgttgcgccgtctttgagcaaacgcctgatcgccaagacaccgttcatgccgaccggcacggcggtggcgctgttcgtcactccgacgcctcatggtcccaaaatcatcgatattcagaaggttcaaccgcttgtctactagacccgcatttcctgattcatccaactcctcggccgctgccgctgcagctcatgccgcgcacaatggtgccgccggcagtctgggcccgggcttcggctcgttgcgtgcggccggagcggcattcggacctgctcgcatgggttcttcacgcccctcgcgcccggctcagctcgacccggctgtggccgatggattggccggtggcatggacccgcaggcgttgagcgagatgagtcatctgtctgctgccgcattgctggatcgtgtgcgccatagcgaagacccggcggttgttgagcgggtgctcacgttggtggagacggtcggcgtggatgaaatcgccgaactgtggagcgatgc

SEQ ID NO: 356 - DNA, 14547 bp, Unknown
  R42_10m  MAG No. k141_23188
gaggcttccgactcgctgggcagctcgtcgagcgcgctcagcaggccttcatagatatcggtgccgccgctggcatcggtggcatcggcctcatgcagcaggtcgctggtgcttgtgccagtggccttgaccgggcggtgggcctcggtttcaaacgggatgagaatgttcacgtcgccgctggcgggctcgatgtacgacttcttggcctggtccgggtcgagcgccgcgttcaggcctttgaccacgccgttcttgccctctccagacatcgaaccggagtaatcgaccacccaaatggtccagctgggtttcctgagcgcggtctggtagacgttgagcgcgctgtcgatcaccgtggcggaggtcatggagaacgtgagtttgccgtcgctgaccgcggcgaggatgtccgcggtggagacgggcttggtggcgccggtgtcgtcagcccagccgagtttgacggccttggatttggcgatgccgaacacgatcggcgtggtggaggtgctggccgcgtctttgacgatgtgcttggtgtctcccatcgaaatccacatcgaggaggcaggccagacggcgtcgtgatcctggccgccggccttgagcgcgttcataatctccagcgaacccatgtagtgcatcgtcacggctacgttggattggtcggccgctttctggatggcgacggcgacttccttgttttcggagccggaggcaatgctcagggtggcagtcggtttgccgccggacggctggaaggtctgcgtggtggcggacgtgccgttgccgtccgctgtgccgtcatcggaattattgaacgccgtgcaaccggtcaacgcgagcacgccggcacataccgcggccgcaaccgcggcggcggagagaagacattatgcccataattccatggctctcccgccatctaaagcgggccgggccacaaggtgaccgcacggtgaacaatgggtgaagagctacatcagtacgcggcgcaggcaatcatggggtcgtcgtagaagccgaggatcttttcgaggtagggcttgtaagtgctgttgggcatggagaagatttcgtggcgcgattcggggaagcgcacgatgttcgcctcgccgccgccgtccttgaccagttggacgaagtgattctgcggcttattgagtacccagatgtcgcgtccggactggaagagcagcaccggcgtctccacttcggcgcaggcggacggattcagtatggcccggttgagcttcaacgcctggcgcacccattcgaacgccgcgcagtaggtctggtattcgctattctcgcaacgcagcttgaagtaccagcgttcacgcgcctcggaagcgccctcgttgccttccatcgagaactccggcgtgaagtccgactgcccgaacacacgcttcttgccgaagccgagtccgcacagcgcgccgaccagcacacgggccacgcccagcggcatgccggtggcgggggcgaccatcggggcggagagcaccgctttgtcgaacagggtggggtatcgctccaacacggccgcgccgatgccgccgcccatcgaatggcagaacaggttcagcggcatgccggccgcgtactgctggccgatggtttcggcgaagccggccagatcggccacgtagcgctgccagtcatcaatccacaccatgcagcggttgtccacgtcgcgcgcggacttgccgtggccgcgatgctcgagtacacacaccgagtagccggcaagcaggaagtaccagacgagctcgtcgtacttttcggcgaactcggtgaagccgtggctgatgacgatggccccgcggaaggtggcggtggcgccttgctcgcgaatcgcgtcgaatttggcggagtcgtagcacaggtagtgcagctggcccgagcggccgccggtgtccataatgccggacagcggctcgatcccggccgaacgttcggcggcggacggatcgaaccagccctcctcgcagcattgttcgagcgcgggcagcaccacgtcggtcatcgtttcggcgtacttgttttcgtcgatcatcgtcacctgcatggctcccatcttaggacaagcctcacgcccacacctcgcacccacaccacgacacattcccgggaatgcgtcgcaagcctgcgcgccactgaccgcacaggcgcgtaggttgtgaggtatgagcgaaaccaatgatgtcaatgacgcaatcaagcatttcccacgcctcagggcgcgcacgctgcggttcggctgcggcgcaccgcgctccgcacagaccgtgggcgacggctcgcgggccctgttcctgcgctccgacggccccgaggatctggtgaccgcactgtggctgagctggttcgacgagtccggcgaacaccatgagaccaagctggccgacccgcgcgaactgctgggcgcaaccgccgacaacgaggacgtgccggccgaggagaaggcccgccgcgagcgtgcgcgcgaaggcggcaccggcatcgtcggatactccgcagatgacgacggcaatcgcatcgtgttcaccatcaacggccgcctgttcctgaccgacatcgattggaatgacgagaccggcgcacccgagccgcacacccgtgaactggccggcgaatggctcgatgaggacccggcgatgtacacgccggtgctgaacccgcgcatcgccccggatggcgaacatgtgctgtacaccacgggcagctacctgatgctggtcgatatcggcggcgaactaggtgaccgcatcaccgccgtctacggcgtgagcgtggaggatgaggacggcaatccggccgaaaacacgtggaaaatcggtctggccgagttcgtggccggcgaagaaatggaccggtacgacggtttctggtgggccccggattcgcagcatgtgctgttcgagtctttcgacaccgccgacgagccgacctggtacatcagcgatccggccgaccccgagaagccggacgccggccgccgctacccgcgcgcgctgacccgcaacgccgacgtgtacctgaccgtgatcacgctggcgttcgatgagaacgaccggtacgcgggcatcaccggcaacgccgatgtggattgggatcgcgaggcgtacgagtatgtggccgccgtgaactggcgtcgcggccacgatccgctggtgctggtgcagaaccgccgccagacccgcgatcaggtgcttgaggtggcagtcgcggcggatggggccgcgctgggtgccacgcgtgtgcttgaggagcacgcgaacgagcagtggatcgacctggttcacggcacgcccgcctacacgccggatggtcgtctggtgtgctcgctcaacgatatggccacggacaccaaccgtctgacaatggacggccgcccgttcacgccggctggctggaacgtgcgcacggtgctcgccgtgaccgacgaggatgtgctggccgtggtgcagcgcgcgcccgaaatcgcgcctgaggtgccggacgcttgggccgatgcggccgccaccgagtccgtattcggcgaccacgacgcccgcagtttcgacgtggtgagtatcgattacaacggcacgatcacgccggtcacgaccgatcccggccagtggaccgcctcgcgcggcgagcgcggcatcgtggtctccggccgcgatatgcgttccgcccgcgcccagatgcggcatattctgggagaacagagcgccactatcgcgtccacggcggccgaacccggctttacaccgaacgtcacgtttacgcgactgggcgagcaccagctgtacacggcgatcatcgcgccgagcccggaaagcccgtacgcgcacgccgagaagctgccggtgctgatgaagccgtacggcgggcccggcttccagcaggtcatcgcctcgcagtccttctactgggagggccagtggtgggccgaccaaggcttcctggtggtcacggcagacggccgtggcaccaccggccgcggcccggcatgggaccgcgagatcttcgaggatatgaaggacgtaacactggccgatcaggtcgaggccgtcaacgccctgcccgaggccgtcgcccggctcaacgccgatgtggaatcacgtgcggcacagccggctgcgggcgatcaggcagacgccgagaaccacccaccggcgcttcgcgccacctcccgccagcgggaggcgattcccatgccggacctcgacaaggtgtgcatgatcggctggtcgtacggcggcttcctgtccgcactggccgtgctggacgcgccgaacgtgttcaaggccgcgtgcgccggcgccccgcccaccgattggacgctgtacgacacgcactacaccgagcgctatctgggcctcgacccggatgtctactaccgcaacggcatcgtgcaggacgcaccgaaactcgagcgcccgcttatgctgatccacggtttcgccgacgacaacgtcaccatcgcccatagcctgcgcctctcgcaagccctgatggcggcgggtcgcccgcacaccttcctgccgttgacgggcatcacccatatgaccaacgacgagaccgtagccgaaaacctgctcaccctccagcgcgacttcctgcgcgacgccctggcctgaccggccccgggcgcgccgtgggccgtgacgtccgcggcacgcccggggcccgcgcccacacggcatgcggaaaaacggcgcaggtggtgcgccgcacccatttccgccctgaatttttggatatttttggatattttgcacccatcgtcatgtgaaagaccggttttttgcctcatattcccatcaccgcgtaggatgggtgaggattagaaagggaggactatgagcgttctcgaccgttttgaaaaaagcgtggagggtgcagtcaacggagtattcgccaagtttggctccaaagacctgcagcctgtcgatctttccagcgccttggagcgcgagattgacgccgaggccatgcccgtgggccgtgaccgcacggtggccccgaatgaataccgtttcaagctcagtactcctgacttcgaccgtatcgaggcatggggtagcgagaccctggccaacgaactggccgataacctcaccgagtacgcgaagagccagcattacgccttcgtgggcccggtgatcgtgatcttcgaggaagaccttgacctgtccaagggcaacttcaacctcacctccgaatccgtgcagggcaatgccgtgccggtcaccaccgatgcgcagaccgaggatagcccggtgctcgaggtgaacggcaaccagtacctgctcaccaaagacaagacggtaatcggccgcggttccggttgcgatatcgtcatcgacgatccgggcatctcccgcaagcacctggaaatcgacatcacggataacggcgtgatcgcccgcgacctgggttcgaccaacggcacgtacgtggagggccaccaagtgcccgccgccacgctgctcgatggcaacaccatcaccatcggccgcacccgcatcctgtactgggcctccgcccaagcccaggagtagtcgagcacacgcccgaaagccgcccacccatgaccgaactgacattcgccctgctcaagtatggattcctgatcctgctgtggatattcatctggctggccgtgcgttcgctgcgcaaggacatcgagacgttcagtccgcgaccttcgcgcgcacgccgccgccgtgagcgtgaagtgcataaggccaaggccgaaacgccacaggcagctgcgccgcgcccgcatcgccggcccagcgcttccgcgtcgtccgtcgcctcggcgcagcctaccctgttggtcatcatcgatggtccgcttgccggcagctccgtgccgctggccgaagccgacatcgcgcttggccgcgccgcctcgaacaccgtggtgctcgatgacgaattcgtgtcttcccaccatgcccgcgtctaccgtgacacgcgctccgggcagtgggccattgaagacctgaactccaccaatggcaccgtggtcaaccagcagcgcatcaaccgccccaccatcctgcccgctcgtattcctgtgcgcatcggcgccaccaccttcgaactgaggtagccgcatgccaaaatccgccgcttcacaaccgctgttcctgtattccaccacggtgtccgatgtgggcactgtgcgcgcgaacaatcaggattcctccttcgccggcgagcatctcatcgccatgtgcgacggcatgggcggtcacgccggcggcgatacggcatcctccatcgccatccggtcactggcccacatcgagcaggacgacaccggcggcaacgtcgagacgatctcccgcatgatggaaacctccgttatggccgcgcatgacgccatcgtcggcaaggccaagcgcgaacgcaagcttgccggcatgggcaccaccgttaccgcagtggcattggtggccggctactgggtcatcgcccatatcggcgattcgcgcgcctacctgctgcgcgacggacacctgagccgcatcacgtgcgaccacagctacgtgcaacacctcatcaacaccggtcgtatcaccccgtccgaagccaagaaccacccgcagcgcaacgtcgtgatgcgcgtgcttggcgactttgacattgacccgcgcccggatatttcgattcgccgagcccaccccgccgaccgttggctgctgtgctcggacggcctgtgcggtgtgctggaagattccaccatcgaagagacgatgaccacgctgtccgatcagggcgaatgcgcgcagcgtctggtgcagatggcactgcgggcaggcagcaccgataatgtcacggccgttattgcggatgccacgttggcgttggatgccgatgcgttcgatctgccgcaccaaacgccgttggtcggcggtgccgccagccgtaatcttgagccgatcgccgacatcgtcaacgagccggtggctaccgcgcccgcgctgcgtgaggatgattcccccgcccagcgcgccgcagcattgattcagcccgccagcgcgcacgagacggaggccgcgcaaaccacggccgaaccgtcgtccacacgcgtggtgcagccgtccaccgtccgcgaggagaccggtgaacgagccaatcccgataccggtgagattccggtggtgcaaaagccggatgggcgcctgtccgccgaccccaacgacccggatgtggccaaagccatccgcgatgagcagatcgagcagaagaaggccacgcgcaccaagaagcgccgcaataagcttgcggtgattattacctgcattcttgccgtgctggccttggccggcgctggctggggcgtgtacacgtggagccagacgcactactacgtgggagatagcaacggcaccgtggccatttatcgtggcgtgccgaccaatctctttggacttgagctttcgcacgaagtgcagaccaccaatatcgccaccgcggacctgcctcagacatggcgtgaccagctgagccaaggcatcacagtcggttcgttggacgaagcgcagtcgcatgtgggtatcatccgcaccgaaatgcgcaaactggccaagcagcaggaagccgacgccgccaagaaggccgaggcgtccaattccctggacagttccaaagacagttcccagagcgattccaaggacagcaccaaggattcgtccagccagtccggttcgtcaagctcatctgattcctcggataaatccggtatcggagcggccgacaacgcggccacgggggattctcaatgatcgctacccgtctacgtcagatttccttgttgctgattgccatggcgatcagcgcgttggcgttcatccagatgttccaacgcaccgccggcgaattccctatgcaatacgccggcatgctggcattggtcgtagtgctgtttctggtgctgtgggggctgattgtgcgcttccagccgtacgccagccagtcgattctgccttgcgtgctactgctgaccgccaccggcgtgaccatgatcgcccgcatcgaccagagcgaaggttgggcggtggcccaacgccagctggtgtggctgtgcatcgccatcgtgctttccgcgctgctcatcatcttcctgaaggactaccgcgtgctacgacgcttctcctatgtgtcgatggtggtgggcctggtgctgctgctcgccccgatgctgccgttcatcggcatggaggtgaacggcgcgcgcatctggatcaggattccgggattgggccagttccagccgggcgagttcgccaaactgttcctcgcgttcttcttcgctgcctacctgttcgatcatcgcgaccagctggccgtgggcggtaagaagatgctcggtctgcagctgccgcgtatcaaggatctcggcccgatcatcgtggtgtggatcgcctcgatgggcgtgctcgtcatgcagcatgatctgggcacctcgcttatgttcttcgccatgttcgtggccatgctgtacacggccaccggccgtaaaagctggatcatcatcggtctgatcgcgttcgccgcgggtgccgtgctggccgcaggcatgttcagccacgtgggtcagcgcatcgacgcctggctgcacccgttcagcaacgagcaatacaacaagacccccggcggctcctggcagctggtcaccggcattttcggcctggcatcaggcggcatgctcggcaccggtctcggccaaggccatccttcgctcgttacgttcgcgaactccgatttcatctacgcctctctgggcgaggaactcggtctgatgggcgtcctggccattttgatgctctacctgctcatcattgcctccggcttcatcaccgccatgaaaatcaaggatggcttcggcaagctgctcgcttccggactggtgttcaccatggccttccaagtgttcaccgtggtcggcggcatcacgctggtgattcctctgaccggtctgaccctgccctatatggcggccggcggctccagtctgatcgccaactatattctcgcgaccctgctcatcatcatctcgaactcggccaatgcgcccgagccggagctgacctcggatacgttccagtacgaggctttggccgtgctgcgcaacaaggaacttgaggcccgagcccgcgccactgagccgatcgttcagcctcgcagcgcgtcggctacggcgtcgcagtccgaggcggaatcgtttgacgaccccattgtggatgccaccactccggcgtatgccggcgccgatgaaccgtacacgcctaccggtacgattcccccgcttcctcccgttaacggaggcactcgcgtatgaacaaatatcttcgtcagcttttcaccgccgtggtcgcgctgttcgtgattctcggcctgtcgtccaccatcatcatggcggtacgggccaacgcgctgaacaacgatccgcgcaacgcccgttcgctgtaccaccagctcggtgcctaccgcggtgccattctggcctcggacggcacggtcatggccaaatccgaaccggtcaacgacgcgttcaaatacctgcgcacctattccaacggtccgctgtatgctccggtcaccggcttcttctccatcaaccagaccgccgatcgcggcctggaagcctcccgcagcatgctgctcaacggtgaggccgattcattgatctggcagcgggccaaggccatgctcaccggcactacgaatcagggcgcgtccatcgaaacctccatcgaccccaagctgcagcaggttgcctacgatcagctcggtacgcgcgatggtgcggcggtggccatcgaagtcaacaccggccgtatcctcgccatggtgagcacgcccagctacgatccgaacaaactggcgacccatgacgccaaagccgcgtctcagtcctacaacgaactctctgcgggccaaaatcaaaatagcccgctaatcaaccgcgccacctcgcagctgtacccgccagggtccacgttcaagaccatcgtcgccttggctgcgctggaaaccggcgattatcagacggacacgaagattcctgcaggctccagctataccttgccgggaaccgccacacagctgccgaacgacgaggcacagggcgatggcgtcaacggacagatctccctgcaagaggccgtcgcatggtcgtccaacaccgctttcgcccagcttggcgtgaaactcggcgcgagcaaggtttcggacatggccaccaagctcgggttcggcagcaccatcaccattgacggcaccgaatccacgggcaccccgatgacggccaccgcgtccacattcccctctgatccgaccgacgacaagcttgcgctggcatccatcggccaaggcgacaccacggccacgccgttgcagatggcgatggtcgcgcaggcaatcgccaacaatggcaaactgatgcagcccacgctggtcgatcgtgtgcgcgccgccgatctcaccgtactttcgcagaccaaaccgcaaaccatggccaacgcgttcagcaaggattccgcagacaagctcaccacgatgatggagagcgtgatgaccgaggccaatccgcagctggccatcgacggcatcaaggtggcgaccaaaaccggtaccgcacaaatcggtatcgacaactctgccatcgacggctgggcgatcggtttcgcgccggcggacaatccgcaaatcgccgtcgcggtgttggtgcataacacagatgtacacggttcgctcgccgctggcccgatcatgcgcgcgatgatgcaggaggctttgcaacagtgaaacttatcgaaggacagcttattcaccgccgatatcgtcttgattcgcgtcttgcgcaaggcggtatgggcgaggtctggaaaggctacgatattcagctcggccgtgaagtggccatcaaggcgctgcgctcggacgtgaccaacgccgaggccaagctgcgccgcctgcgtgccgaagcccataattccgccaatctggcgcacccgaatatcgctgcgttgttcgaatactacgagcatgacggcatcggctttctgattatggaatacgtcccctcgaaatcgttggcggatctgttccatagcaagggcgcgatggatcccatcgaactgctgcccattctgattcagaccgcgcgaggcctattcgtggcccactcgcacggcgtgattcatcgtgacgtcaagccggccaacatcatggtttccgacaccggcgaagtgaagatcaccgatttcggcgtgagctactccaccggccaaggccagatcacccaggacggcatggtggtgggcaccgcacaatacatctcccccgagcaggcgcagggccagcaggccacgccgcaatcggacatctattcactgggcgtagtggcgtacgagggccttgccgggcatcgtccgttcaccggcaccactccggtcgatatcgccgcagcgcacgtgaacaatcccgtgcctccgctgccgaactcggtggacgtccagttacgcgaatttgtcatgtcgatgctggccaaggacccgttggatcgcccgaaagacgcgctggtggtgtcccgtacgctggcacgcatcgaacgccgtctgctggatcagcagaccgaaatggccgacaccgccatggccacgtccggcaatcgactgccgcgccgagtgaccagcacgccacgcattgttttggaggccccggcctcaagattgggagggaataagcaatgagcaccagtatgcccaccgcattggccggcggacgctaccagcttggccagctcatcggtcgtggcggcatggccgaggtccacgtggctcttgacacccgtctgggccgtaccgtggccgtgaaaatcatgcgcgccgatctggccaacgacgacatcttcctggcccgtttccgccgcgaagcacacgccgtggcccagatgaacaacccgaacatcgtgaacatctacgattcgggcgaagaactggtttcttccgaaagcggcgataccgagcgtttgccgtacatcgtcatggaatacgtcaagggccagaccctgcgcgacatcatcaaggtcaacggcgcactcagccagcgcgactgcgaacaggtgatgttgggcgtgcttaacgcgctcgactattcgcatcgcatgggcattatccaccgcgatatcaagcccggcaacatcatgatttccgagcagggcgcggtcaaggtcatggacttcggcatcgcccgcgctctggacgattccgcaaccaccatgacccagtcgcagggcgtggtgggcaccgcacagtacctttctcccgagcaggcgcgcggcgagaccgtcgacatgcgttccgacctgtattccgccggctgcgtgctctacgagatgcttaccgggcgcccgccgtttaccggcgattccgctgtggccatcgcctaccagcatgtctccgaagtcgccacgccgccatccgccgtggtgccggggctgccgaagatgtgggattcaatctgcgccaaggccatggccaaggaccgccagaaccgctacgccacggcctccgaattcaagaccgacatcctgacctacatgaacggcggcgtgccggtggcggccgcgttcaacccattgacggacctgtcgaatatgaaggcccgcaaggaagccgaacgtgatttgcccaccacgccggtggaaccgcagcagcagcccacccaggcattcaacccggtgaccggtcagttcgagcagattccaccggccaatggtgccaactcagcggcgttgcagtcccgtgcgcagcagcgtgcggcggcggccaaggccaagaagcgcaagaagatcatcatcggttcggcgatcgcggcgattgtcgcggtgctcgtcattgtgggcatcatgttcgccatgaacggctccgacaacaagtcctctgaagacaccgtcaccatccctgaagtgtgcaacgcttccacgtccaaggacaacatcaagctcaagcttgagagattgggcttgaagatgaccgaaaagcaagacaccgactccaccgagccggaaggcacctgcaccaagatgagcccggacgccggctccaaggtggccaggggatctgccgtgaaggtgtggttctccgcaggcccgcagtccactcaggttccggatgtcaaggagcgcagccaggaagaggcgcgcagcattctggaaagcgccgggttcaaggtgaacgccaccgtcaaaaccgaagacagcgccgacatcgccaaggatatggtgacgagaaccgatcctgccgccggtcagtcggttcccaagggcaccaccatcaccatatatgtttcttccggcatgaccaccgtaccgagcaatttggtcggtcagtcgaaggacagcgtgctacagcagtatgagggcaagttcagcttcaccgtggagcaggaaagctccgatacggtggaggccggtctgattacccgcgtaagccccgattcgggctcttccatcgcgcagggcgggtccatcaccatctgggtgtccacgggcaaggaaaaggtcgctgtaccgaatatcaccgctggcactgactacgccaccgccgaactcatgctcaaggccgtgggcctcaaggctcaggccagtggcccaaccgacagcaccgctgtggtagtcagcatcaatcctggcgctggcagccaagtagatgcgggatcgaccgtcaccattaccacgaaggccggcagcaccggaggcgacaccggtaccggagacggtggcaatggcaacggtgccaacaacggcaacggggggcggaacccgtgagtgagtgagcgccgggcgtgtgtgttgcgcatacgcaacgcacatagcgcaacacatgcgcaacacatgcgcaacgtaaacacgcaacgcaatcacacaacgcaaaggggaggggcttctgcacccctcccctttgctgtataaagagctatcccagcgcaacattcccgggaaagcgtcgccgcgcgcggaaaagctacttcgtaaccttgggctgaaggccggcggacttggccacggcgttgtcttggccgcagaccttaagccagttggccaatagacggtagccgtcctgggtcatcaccgactcgggatggaactggacggcatacatcggcttgtccttgaccttgatgccctgaatggtgtggtcatcctgcgtccacgcggtgaccaccagcgtatccggcaccgaatcgggctcaacggccaatgaatggtagcgggtggcggtcatgggattggccacgccctcgaaaatctcgtcatcggcatgctccaccgggctggtcttgccgtgcatgatggtgggcgcgtggcccaccgtgcagccgtacacctcggcgagcgcctgcaagcccaggcacacaccaaacatcggcacgccgctggccgcgcacaggcgaatcatatcctcactggcaccggattcggccggagcgccagggccgggagaaatcagcacgccatcgtaa

SEQ ID NO: 357 - DNA, 66632 bp, Unknown
  R42_10m  MAG No. k141_23413
ctgtgaggcctgtgaggcctgggtggtctgtgcaagccgtgcaatcgaggagacgccggacgcatcgtctgcggggccggtgatgagctggttcaaaagatagacgccgattagcgcggcgagtacgaacgacgcctgcacgcaggtagaaaccaacagatgcttggcccggttctcctcgaatcgccggatgatgcgcccgccgataagcgcgccgaccatgaaggagacgagcgtcagcgccgacgtccaccagacgaagccttgggcatgggcgatcgaaaacccaagaaacacgatgttgccggtcacgttggccacgaacacatgccccagcgacaggtagctcagcgcgtccaccagcccggcgacgaacgtcagcaccaccaaggcgggggagagcagaccgtatctgtcttccttgcggggaaccaacgtgcgtcctgcttcggcaagatgtgatgtcatggttgcgacgaggctccttttcgggattgaaattatggcgagaacatgcgtcggtcgacgccgccactctactccctactcccgtacggtgacggtgaactatcgacgctttggccaatcagatgcatcggcataccagtggtgcactggtgattacgcatttttgaggctcttcgggtgtttgtgtggatgtgaatcatctgtcttgcttactgtctattggcgtccggggagtcggaggttgagtccgccgcatttgagcatgaccagggcgatgcggttgccgaggttccggtagccgtagccgatcttgatggtggtcttgatcctgttgttcacggcctctagtcgggcgttggacagtccggaccggatggtgcgcaggatgtcgaagcggcgtcggtcgatcttctcgccgagtttcgagaactcctcgatgcccgacagggaagcgtccgcggcccactggcgcggcatgggcgcggcctcgtccgccgtctgcctgaggatcatgcgcaggcgttccttgagcttgcatgcctcccagagggtctcgttggtgttcgccacgcattccagttgtgcccgttgggtggcggtcaggtccggcccgttcttcggcagcgcccggcgcgcgcccttgaccgggtccttcgcgcccttcccggccgtgcccgtcttcctggcctcgcgccatgcggtggtgcggaccttgtcgagcgcgtcggtggcccaggagacgatgtggaagccgtctaggatgcgttcggccatggggcaccagcggaacacgtactcgtcgatccaccgcgccccgtcgccggcggccacccggatggactcgcgccgggccggcgtcaatgcctggaagaacaggtcgaacaccttctgtccgcgcccctggtgcatccagatgacacgcccccggtcgtggtcgacgaccacggtcatgtacgtgtggcccttcctgtagccggtctcgtccacgccgatggaacgcagcccgtcgaacaggcccgcgccctgttcgacgcgcagttcgtcggcgacccgttcgcagatcgggcccacgctcttccggtcgacgcgcatcagcgccgataccgcgctcctgggcgcgtgcacgctcaaccatgccgtctgccgctcgaagtcacgcgtgtacgcgctcttgcgtttggcccacggccccatcgcgaccgtcaccccgtgctccgcgcaatcgaccctccggggcgcgtgctccagcaggagcctcgtgcagccgatgtcgaggtgccgccagcggcgcacgcccagacggtcgtacggccggccacgctccccacatctggcgcaccgatccatgtcgcccgcgtaagggcggaccggaacggccacgacgttggcgggcaggttgagcatgcgcttgagcgcatcggctgatatggtgggcacaggcgttcctctgttgttcggttttctttcttggcggaaacaaatctaacagacgaatgccctttccacatccgatacagaaaccccggcgacgacgccgaacccaactcccctcaccacacaaactggcgaaggctctatttggttgccgtcactgcatattcatagagctgcttgttgctgttacgcttacgtattgcggtggccttaacattatggtagccgagtgctttcatcatctctgcataccatgtatgcgatggcacctcgataccggagaatgtggaattgcctacgatatagcataggtttccaccctctttaaccactggcgtaatggctttgaagtgtgaccacatatcgtcaaaatacttatatacatacggggatagaatctctccgctcttcccttgaagtatcttttcgcatacttcactaagtgtggtgtcgataggtgattcatgcggagagacgcgggcgcgcaacttagtgccgaccgaaccccatgtgccgcctattgtcttccagtccatctccccggcctgttccccggaagtaagatagcgcatccaatacatatagggacgaagttcacggatatacgacatgcgattcgcatacggtggagacgtgatgactagatcagccggttcatatcctgtaaacggtaacgtggaatcaccatgctccacggaagctttccccacaggggtgtcgttcatagctttcgccacgacatccttcacttcggtcgcatagcttctgacgttatgaagaaaatcctctcgtgaatacccaaagagggattcttggtctttaaacgacatgctctggtgattgaaagcggctgcgctaagacctatgagcaggcggcagaaagctatatcaagaagggtcctcaccttgccgtttcgctcgtctatctcgtgccggagagcggccagagcctccaatgaggcctgatcccaccacctagtgatgttgtgcatgggaggagcccataagccatccagcccctcgaatttagaagcctcggctatgaccgaatgcgcttcttctatactggcttcaccgtcttccttgctataggaattcagttttgcattgcccaaccaaacaaggaacgggttaatctcccgtgcattgcaggacaaccccagttcggacgcagccaacggagttgtaccactacccgaaaaaggctctataacccggcttccttcggacagcttggagagttctccataaacaaggttgatgccgtatgcgggagtaagacggagccatccatgacgacccgccttaatgtttgccttgtaggtgtaatcagatcgctgtcgtaaggcagttcggttcacttggcctccagaatagatgtaagaatggcgtgggtctgatcgcggaacacctgcgagttcctctcgaagaaccccgctaggtcgtagccgactacttgcctgaagaaagcataggtgctggttagggggccatcgtcttgtaaattgcccgtcatcacgcagatattcgagcgttcatagcggctacgcaccgcattaggtatctgcatactcatcaccatgacgaacatctggtaggccgaattaagggcatgggagccgttaactatatcgcctttggcgcgcttgctatcttggctcttgtagccttgccgaatctcaaataccgccccttgcagatcaaactgagtgccctgagcctctttcacggagttcaaccagtcagccaagatctctgctttttcagtagacctaatcatgcttaggtcaagacggccatccagtgtcctgtgcgtctgagtgccattgtcctcagtgatgacataaccccagttcgcttctccctccgtaagttggtactcatctataaagatttgccgtaccagacgctccatgccgtcaccaaggtgcctatagatagaggtctgaccgccgcctgctttcgcggcgaggtacattaactcgttgtcaagtcccatccagtgatacaaggggtctgacgagtacaaactgataaagtcaggcagcgatacagccttatccgttcccatcttgggcttgtacttcattgcatcacggagaggcgcaagtactatctccctatagtgctcatctctggcgctccaagagcctactgctcttgcctcttcgggtataccatcctcggccatgtgtgttctaatgctattggagtgcatgcccgtgccctttcgtcggctcatctactacccacaagtgtacgtgccaagcatcaccgcgattcgctgagcgccgaaaacccttctcccgactgggaaacagggaaccgcgacacgcccgacaatacccagagcggggcaaagtacggaacaacgacaaaaaagcaatccccctcgaatcaaaggagattgctcgtgagaaataccctaggtgggatcagtcctcgtcgtcctcgtcatcatcatcgaaaccgccgaacggaaccgggcaggggaatccgaatggaggcttcggctgctcgaccgagtatgagaggcgtttcttgatgtgcttaatcgtggagttgtacagtatggcaacctccggaagagactcattgctctgccagtaggagattggtttggcgttgatgcgctcgatggtgtccacggtagccacagccttgcctcggatgacggcaagcacatactgctgttccttggatcgtttaagcatcaccatttgaactccttcataaagggaagtactggcgggggattccgacaacacaggagccattgaccggccatgctgatgaatttatagaaaatgcacgggaatggtcgtggtatacgaaaagaagaatcccgtcctccagaagaagagggcgggattcattggttatggattggtgaggctactgcttctcccaagctccgcagccttcggaactgaatccggccaccccgtcagggatggtgatggtctgggctattcctgcggacacgaagttgttgtcaatggtctgaccgtttgcgtcctgcatctcccaatagcagttctccaccttgtcgctcatggttttccaagtgccggtggacatttcgtcagggactttgtaggtccccgcatcctttattagaccttgttggcgtttggtttggatttccgccaatcttgctgtatcggctccagctttttgtctgatttcttcagcacgcgggtgatcggggcacagtacaagtgctcccagcagttcttttgcttggccttcacccattgttggcaaacttagcggaatgaatgaagtggaagcgcattcactgtacagaacgcccatgccgtattcggtatcgtcagcatggtctccatacgccgtctttaaagcttcgtaatcagtcgtgctcttttctccggtggctgttgaatcctctccttcagaattgcaactaactgatttaccggtcttccataccgtgtctctgaagttttggctagtgacaccatcaatgcgttccgtatgtgccgacaaatctccatcacctgaagtgacgtagcagttcatgccaatggtgaaaggctgtggctccgattcctcttcggtggtatcagaagattcttcttctttatccacaaaatctttcaaggtcgatttaatcttgaaagcacctccgccggtacccaaatactgtactgtaaccgtggcgtacatggtgtcgtcatctatcgtccatgccgccttccaatctgtccacaggattgatgcgttctcctttgaggaagatgaataccctatggtgtctacggtgttctcactcattccggtattagccgctatgcattcaagaatctcgcggtcagggatgctgctccaaaccatttgcaaagcaggctcctcggaataatcgccatcagacagcactttaatcttgccatctcgattgcaagcggtagacactttctgaacgacttcgagacgttctccaacttgaacgttatgagatacaatagccgcaatcgaggtaaccagtatgattgctgcgactacaaatgaggctatcactaccggcaagcgatacttattccaaacctcctccgcctttgacttgctcgcctcttgtgcaacgaaaggctgggaatccgcctctgccttagcctctgtaataccctcttcgtctggagcgggttccggtgttagctcttcctgcgtctgcgtctcctctggtttctgaggaagcgtatctgctgctggggctggttgctcttgtgtgacttgtgagggttctgcgctaccggcagaaagaactccagacactcccgagaagaattcgtccgcaagggagatgctatgtgagttctggaagccagctgccgttgaccctatctttcctgcgacggtgagcctgactaaagtgccgtcaccgctgggtacggctgaggccgtcagattctcgccccaagtggtcaggctaatacccgatgagaacgtgcatgagcaggacaaatcgtcggcgttcttcaaggtaaagcgggactgatcggattgcagacagcgcttcatggcttcatagacttgtccgattggcgcgttgtagtagcgctccagctgtgtggtattcaacgccattgtttcttctccctcaggtgaacaggcaactgcctccattctattgcaatgaaggtggggggcggcacttgatgagaagtgccgaaaagccttctcccgactgggaaacagggagccgcgacacgcccgagaatacccagagcggggagcgacggcaccgaagtacggggaactggaacgctaaaggaaccagaggggaaacaagagggtacaaaaaagccggaagccttagaaaaataaggcctccggcgagggcggaggatacgagattcgaactcgtgaggctgttacaccaacacgctttccaagcgtgcgccatagaccactaggcgaatcctccatgctttgcagtgcgcagttgaactgtgttccgcaggcaactcgaataggctaccacaggtttcggataagtgcacgcttcggcgtggcgcgtgtcgcgacgcggatgtgaagaatgatcactgcgagtgaaagactcactggaaagtcccgcgcaacacccgcacaaggaccgcatgcttgtgcagggcccacacacccgcgcgcacctacacaacccccggtaaagaaatcaccgtatccgggtgaattttcgatgttcgcccggcgcgcgcccgcaatcgcgcctaggctgttgagtcatgaacgaggggacagcggccgacgtaaccgcagcacatggcggccggtcgcgccaatcgaagaaacactcaaagacgtaccgcagcgtatccgcgatccttagttggctcacggcccgccgcccgaccacgttatccacatcgctgcgcgcgcgattcctcccttacctgctcacgctcgctatcgcttggctgccgtggctcatactcacctggccgggttcgatgcgcgacgatacgcttgcccaatatctgcaatcgtccggtctgcaccactactacacccagcatccgctgtttgatactctcacgttcggcctgttctggcatatcggcagcgcactcggctcccctctgatcgggcaggccctgtacaccgtgacccaagcggttctactcgccgccgggtgcgcgcttctgctgtgctacatccgcaaaatcggctcgccgcgctggctcatcggtctcggcctcgtctatcttgccgccaactatgtggtggtcggcgcaatcaccacgatgggcaaggactcgttgcacgccgtgttctatctgccgttggccgtgctgttcgtggaggcttgtctgacgcgcggctcggtactggctcgccgcccggtggcattcgcgttcgtcatcctgttgttcgccaccatcgtctccaagcggacggcgctcataatcgtgctatgcgccggctgctgtttgctcgccgtctgcacgcccaaaggcgcgcggcgtcgtgcgttcgcgtgtcttgcggttgccatcgttgtggcgcagggcgtgtggacgccattaagcgcggccgccacgcatgcgaatcggtcgcccggacgtgaggtgtggggcctggtcacccagccagtggcccggctcgcgcacgatgatcccagcgcgatagacaagattcagcggcagcggctgaacgcgatcatggacctcgactgggccgccgtcggcatcaacccgcaccgcaccgatgagaccttccgcactctgcgcgagcaccctaggccaaccgcggcgcaacaactcgcggccctgcaggtctgggcgcagctcggcctcgcgcatccggttgaatatgccacggcctatgccggggtgactcgcggatggtgggacccgcgcgtcaatttcgcgtaccccactgattccgactacctgttcacgcctagctatctcaggcaatgggcgtctttcctgactgaaggtgcttggaagcatacttccgacggcgatgccgataccgtggcggccgaacggcttgccgccatcgaacatgaccttgcgccgctgaggggtacctccgacaagccgcaatggcagaaaaacatattgcgggcgattcatcggtgggtgcgttcggatggtcgcgtcggtgttcgcaaaggcaatccgctgacttcgatggccctgtacgtcacgtggattccgctggctgctggtcttgcgctggcggtgcggcctgcgcgacgacgctacggccccgcactggccgcttacggcttgctggcattcacggtgctgtcgctgtatgcctcacccgtggcactattttggtatccgattccggtattcctcacgttgccgctttttgtggtgttgccgttcacattccgggaaagccatcctctctgagcatagttatctcagatagtgaaataattgcggggttgaaaagcactaaaacgccttctattacctcgcacccgtcaaaaaatcaagactgttgttcaagaatttttttctatagagttcatagttgtttttggaccattcgagtacttgaagtgagaggaattcagcatggttcgtcgcgcctgcgcgcagtccgctgaaatgaacacgatgcgggaacgtgatacgcgcgttgccgtttctcgcgtgcgcgcgaagtcgggcagcaccggtcgtctgcagtcggccacggtctcggctcgtgcatttgcggtcatcgtttttctgtttgcgatgatcgccgcgaccttcctcccctccgccatcattccgcagtccgcgttcgccgtgacgccggcaaccactgccactgctgccaccgtcaagagcgacgacaccaccagcgtcgattacgcgacctgggccgacgttgccaaggccgtcgaagcgcagttgcaggaaggccttaaggaatacaaggacggcaacccaatgggtgccaagtccgatttcggggctgcatacaccaccgtctacgtgacgtccaacttcaacaaagtggtgagcgacaccatcggcacagacaagcagaccgcgcagcagcaggccttccaggacctgcaaagccaggtgttcacgtcagaccaggccgatcagcttacccagaaggtcaacgacctgaccaccgacctcgacgccacggcccagcagctcgacgccaacaccagcctcgccaacccgaagcagtactccgaagacctccagaagcagatcgccaaggagcgcaaggagctcgacgccaagaagaagcgcaccgaggaaacggccaagacttggaaggaagtcgcggatgcgatgcttccgatcctggacaacgcctacaaggcctatgagggtggcgacgccgccaagggcgccacgctcgtgaacgacgcctactaccagcactacgagaagctcggcttcgagaagaccgtgctgagcgccatcagcggcaaccgcgtctcccaggtggaataccagttcaagctgtgccgctcctcgatgaacaccggcaagcctgcttccgaagtcaagaagtacatcgacgacctgaagaacatgctggccaccgatgccgccaagctcgacggcggcgcggccgatgaggagggtggcttcctcaagttcatcaccagctcggtcggccaggcgttcctgattctgatccgcgagggtctcgaggccctgctcgtggtcgccgctgtggtggcctacctcgtcaagtccggcaacaagcgcttcaccaagtggatctacgtgggcgtgctcgccggtctggccggcgcaggcatcgtggcggtcatcttcatgctcgcgttcggcggctccggcccgctgcaggagatcatggaaggcgtgtgcgcgctcgtcgccatgtgcatgctgctgtggaccagcaactggatgctcaacaagtcctcggtggaagcgtggaaccgctacatcagggaaaagaccgaagccgcggtggcctctgtctcctcgcaggtcgaatccggcgagaaggtggcttcccgcacggtgatttcgctcgccatgctgagcttcctcgccgtgttccgtgagggcgccgaaaccgtgatcttctaccagtccatctacacgatgagccaggatacgcatggcatggtggtcggcgcactcgccgccgccgtggtgctcgtgatcatcttcctggtgattcgcttcacctccgtaaagattccgattggcccgttcttcctggtcacctcgatcctcatgtccgtgctggtggttgtcttcgccggcggcggcgtgcacgcgctcatcgagggcgacctgctgcccgccaactatctgccgggcgttcccaccaacgactggctcggattctacccgtacgccgaatgcatcatcgcccaggtactggcagccatcgccgtcatcgcgctgttcgtggttggctttgccaaacagcgtaaggccaaggcccggcttgcggccggtgcgagcaagtcggacgcgaaggctgacgaggagagcgcgcaggcgtagcacaacgcccggtgcgaccatctcgcgcaacacaacttgcgacatggcaatggaagcgattccagcccacgccgccacaactaaaaacagataagtcgtgaataatccattcaccacaacagaaggaataagagaaatgatgaagaacaagaagcttgccgctctgctcggcgtgctgctcgccggctccatggctgtttcgatggctgcttgcggttccaccaacaacgcttccgataccaagtcctcgaccagctcctccgacaccgccaagaaagacgactccaagaaggccgacgccccgactgagacctccggcttcgaagaggtcccggtcggcccctccggcaccgccaaggagcaagacaaggccgctggcccgctgaccgtgggtgccgtctacttccagcccatcgacatgtaccctgcttccatgggtctgaaggctgctgacgcttccttccacctggaagccgacatccacgcctcccaggaaggcaccgactacggctacggcaagggcgacttcgtccctgacctgactgtgaactacaccatcatcgacaagtccaccggcaaggaagtcgagggcggccaggccacctccggtaccttcatgcagatgaacgcctccgacggcccgcactacggcgccaacgtcaagctcgacaaggccggcacctaccaactcaagctctccatcgagtcccctgagaagaacggctggatgctccacgttgacccggagaccggtgtcaagaaccacaagttctggaccgagcccatcgaggtcaccttcgacaactgggactacaccccgcgtcagtggtgattgactaagcagacagccccctcgtcagagggggctttacgccgctttagggagataattcttaggacggtctaaaaactcccctcagtccgctttgcggacagctcccctcagggaggggagcctaagatgaacagagaaaggacgcgaatgcttgaacaattcgtggcagtgatgccgggcaccttggcccccgcattgctggtgatgagcctgagcgtgatgctcacggtcggcgaggggcgagataagccgataagctcgcattggcgtctcatcggcctgaccgtcggcctgatcgccgctatcacattcgccggcctgcgcgcctcggccgtgatcaaccagcgcacgttcgtcaactatccggtgctgtggtgcgcgatcattgccgacatcctgaccatcgtcgtggtggtgttcgcacgccgcatcaccaccaattggcagcagcacaaggtgttcatgcacattgcgaacgccgtggccgccatcgacatcgcactcaccctgttctacgcgctgccggacgtgatcctgcagctgaccatctgggtggagcccggcgacccgatcttcacgtccgacatgttgctgcgcgcgctcggcttcgcgctgggcctggccatgtcgatcatcgtggccgtgatcttccgcacgatgcgttcgaccgcggtgcgtgcctcgttcaccgccgccgttctcgcggtgctggtgattctgttcgtccggcacctgaccggtgtcatgcagatcctgcaggcacgcggtttcccgatgggccacacgggattcgtggccctcgcctggtcgatcaaccacaacgactggatgatcatggcccaggcgttcgtgttcctgattccggccgtcgcctccgtggtggccggcttccgcatgccgctgaccggcgcgaacgaagccatcggccgcaagcacaaggcgttccgccgccgcgccgtggcctccgccgtctggagcctcgtggccatgatcggtgtcacgctgaccctcaccgtcggcgtcgccgcgacccatcagaccatcactctttcgccgccggaagcctactcgctcaaggacggcgtggccaccattcccttcagccaggtcgaggacggccacctgcaccgtttcgaatacaaggccaaggacggcaccgtcatgcgcttcatcatcatccgaaagaacggtggcgcgtacggcatcggcctggacgcctgcgagaactgcggcgacgccggctactacgagaaggacggcaagatcatctgcaagaagtgcgaggtggccatcaacctggcgaccatcggcttcaagggtggctgcaacccgataccattcccgtacaagaccggccacggcaagatcaccattcagactacggatctggacgcgctgagcgcccacttccagtgagtcaggcaggagacaagaatcatgttctttctgcgtatgattactcgctcgttcacccgacagctgcgccggcgcctgcttatcgcgctgaccgtatgcctgtcggcgaccgtgtccgtatcgatgctgggcgtcgtgttcgacgtgggcgacaagctcaacgccgagctgtccacctacggttcgaacatcaccgtgcagcccaaggcggacgcggtcgtttccgacctgtacaacaccgagtcgggcggtgcggcgtccaccagcgacccgaccgcctttctgaaggagtcggacgcggccaagatcaagacgatcttctggtcgttcaacatcaccaacttcgcgccgcagctcaacatccacgccatggtgaacggcaccaacgtgccggtcgtcggcacgtggttcaacaaggacctcaagatctccaccggcgagaccaccgtcgtgggcgtggaaggcatgcgctcgtggtggcagctggacggcaagtggcccaaggacgattccgaccagggcgtgatcggcaagacgctggcctccgaactcggtgtgaccaccggcgacaccatcaccctcaacaagaccaccgcctcgggcaagaagaacgagcagaaaatcaagctcaccggcgtctacgattccggcgacgaggacaacggctcgctctacatcgcctcctccacggcccaggtgctcgccgacctgcccgattcggtcgacaagatcgaggtcaaggccctgaccacgccggagaacgacctggcccgtaaggccgccgcgaacccggccgcgctgagccaggaggaatgggagacctggtactgcaccgcctacccgagctcgatcgcctaccagatcgaagaggtgattccgggcgcggtggccaagcaggtgcgtcaggtcgccgcgttgcagggcaatgtgctgcagaagacgcaggccgtgatgattctgatgaccgtgctgagcctgatcgccgcagccgtggccgtggccaacctgatggtcgcctcgatcggcgaacggtctggcgagctggcgctgctcaaggcgctcggtgccaccgatgccgcggtatcccgcctgatgctggccgaaacggcggcaatctcgctgctgggcgcgattgtgggcgcgttgcttggttccggcgtggcccagctgataggccgggtggtattcggttccggcatcacgatgcggccgatggtgttcgtgctggtgttcgtgctgctggctgtcaccgtgctgctggcgtccgcctcctcgattcgttcgattctgaatctcaagcccgcggaggtgctccatggccgctgagtttatctacgtaggtgtggaaggaggaaaccgatgaccaacaccggtatgttcttcagaatgctgttcagcgccgtgttccgccggcgttcgcgcgcggtgatggccgtggtggcgtcgctggtcggcgcggccacactgttctgcctggcgatgatctgcctcgccgtgccgcagcagatgaacgaggagatgcgtgcgtacggcgcgaacctgattgtcacacccaccgaatcgaccaatgccgacggcaaggccggcatcgacaaggcgatggtgcagcacaccactgaaatggtcaaggccaagggttccgcgaaatacgccacttaccgctacgagaacgtgcgcgtcaacgcctcgccgtacgtgatggccggcgtgaatgcggcgcaggtcaagaacctcaaccatcactgggtggtcgacggctcgtggccgaccgacggcaaggtgctggtcggacgtgacatcgccgacgccatcggtctgagaatcggctccgccatcaccatcggctaccgtgcatccgataacgccagcaccaacggcacttcgtcgaactcctcgatcgaccagcaaaccaaagacggccgcgtttccagcgacatcatggacacctccggcaccgaattccgcgtggccggcatcgtggacaccggcggcagcgaagactcgatcatctacgccaccaacgccgacgtcaacaagctcaccggcatcacgcgcggcgtggacgtcatcgagtattcggccggctccagtgacctcgcaggcctggtgtccagcatcaacgacatgacctccatgcacgtcaaggcgcagcaggtcaccaagatcaccgcctccgacacccgcatcatcaccatgctgcagacgctgttctggatcgtctcgttggtggtgctggtgctgacgctcgtcggcgtcggcaccacaatcagctcgatcgtctcgcagcgacgcaacgaaatcggcctgcgcaaggccctcggtgccagctcgcgtgccatcggcaccgagttctacatcgaatcatcgctctacggcctgatcggcggtcttatcggcaccgcaatcggctacggactcgccagttggctgtgcgtggcggtgttcgaacgctccatcggattcaactggtgggtggcgctgatctccgtgctgttcagcgcgctggtcgccatcgtcgcctccatcccgcccgtccaccgcgccacccgcatcgaccccgccgtcgtgcttcgcgaagaataaagaaagagaaacgtcatgctacttgaactcgaccacatctcgaagatctacggcgacctgcatgccgtggacgacctcaatttgaccgtgccggaaggcgaatggctcgccatcgtcggctcctccggctcaggcaagaccacgctgatgaacatgatcggctgcatggacacgccctccaagggctccgtgaagctggaaggccgcaagctggaggacctgaacgccacgcagctggccgacgtgcgcaagaacctcatcggactggtgttccagaagttctatctggtgccgcacctgaccgccgtggaaaacgtgatggtggcccagtactaccattcggtggtcgatgagaagcaggccatggaggcgctggaaaaggtcggcctgaaggaccgcgcccaccacctgcccggccagctctccggcggcgagcagcagcgcgtgtgcgtggcccgcgcgctgatcaacgacccgaagctgattctggccgatgagcccaccggcaacctcgacgagaagaacgagaaaatcgtgctcgacctgttccgcaagctgcacgagcagggcaccacgattatcgtggtcacccacgatgcgcttgtcgccagctgcgcgcagcgcgagatcatgctcaaccatggcgtgctcgtcggtgagaagtggaatgacgaggatgcgcgcaaggcctacgaggcggccggcggcaagcccgcctccacgggcgcgcaggtcgagggcgcgcagaacggcgagaccgccattggtttcgctgaccccaccaaggccgcgaaaaccggcggcgaggagtagggccgtcaggggcatcgagcagtatgtgaggaatacatggcaagctgatggtctctcccccagtcagcttcgctgacagccccctcgtcagagggggcttaaggagcgtgaatatgaccgaaaagaatacgttgaagaaatccgcgacattggcggcggccggactggtcgtggctggcgcgctgctggccgggtgcggcgaatccaaggccacgccgatggacgatgcgtacgccggcaactcgggcgagaccgagaagtcgcaggaagagcagtcgcaatcccagtcgaacggctccgatagctccgacggctccgattccggctcatcgcacaacgacccgtccaccaccacgtccgacaagaaggacaccggcaactacaaggacggcaactactcgatcaacggccagtacggcccggtcggcgaggattccatcgacgtccatctgaccatcaaggacggcaacgtcgagaccgtcaaaatcattgggcacccgttcaccacgatttccaagaaccatcaggacgacttcgccaaagccatcaacggcgtagtggacggcaagcccctgaagggactcaaagtggacaaggtcgccggtgccagctggacctccgacgccttcaacaaagccctcgaagtcgcccgccaggaggcttcgattcaggagtaagaccgctacttcagcaatgctggccacagcagatcggccatgcgcgaggcccaggcggtgtcgtcgtccatcgctttgccctcgatggcctcatacgccaccaaagacccgataatcgtggacaacagcaacttctcgtcaacgtcctcgcgaaacacgccctgcgcgactccctgcttgaggaacgcccccacatgctccagccacggggtcaccacctggtcgacgatgtgctggaagaactcggcctcgctggacaatacaatgcccacgcgcttgacgtcgatgtcgttgtcgcgcacccaatcgaccaatcgctgcaatagttgcgtgaaatgctcacgcgtggggctgggcactgggtcggaatccgggatggccagatacatcgcgctgatctcgcgcagcagctcgtcggcattatggtatcggcggtaaatcgtggttttggccacgccggagcgccgggccacctcctcgatggtcacgccgctgatgccgcggtccaccgcaatctgcagcgtggctcgcatgagcttgcgatccgtcgcctcgcgcgtgcgctcaccgcgcggtgtcgccgtcgtacctgtcatctccgtcatctcttctctccgaaatatgctcccgtacgctcccgttggcgggagctggctggcaaagccagactgagggtggtaagtctatgccgtttgtaggcaacccccggataatacctactagcccagcactttagtgctctcgactttggccacataccactggttgaaccgcaccagtggcttcctgagcaacagcccaagcaacagcagcggcggcacgaacgccagcagcattccggcggcccgccagtaatccatgtcgtagatgccggcgatggccgcacgcatcatcgtcaccgcatgggtgagcggcaagaacggactgactttggcgatgaagtcgggcaacatctgcaccgggtaggcggcgttcgcacccgaaatctgcacgatgagcataagcacgccgattgccttacccacattgccgaaactcaccaccatcgtataggtgaagaacgagaacaccagcgaggccagccatccggacaacataaacagcagcggatgcacggcctgcacgcgcaggaacagcagatcgccaccgagcgacaccgtggattgcagcagcgcaatcagcgcgaacaccccgtaatgcccaaggaagagccgatgcggccgcggctcgcccaatgctttgcgtgtccggcgagacacggtggttttcagcgtcaccaccatcagcagcgcgcccacccacaacggcagcagcgtgtagaacggcgccatcgacgaaccgaaattcgccaccgggaatacggccttgcgcctgagctgcaccggcgcggccaacgtactggccagcgtttcgggatcattgcccagcacctctttgaccatgctcatatcgccactgtttagtgcgtcgctcagtgtgctgttgaacgaagccagttcggcaccggcggaacgcagtttgccggacaccttgcccaaggtggtgcgagcgtcgctgagcatatcgctggcgtcgtcggaagtccttttcaggtcgccgagcgtggagtccaactgggtggcgccggaactcagtatgccggaggcgtcagagacggtggacgacagggagtcgatttgcggtttcaccgtggccgtgaaatccgacttgatattggcgatactgttctgcgcttgatcggccagatccttgacctgcgcatgctgatcctgcgcgtcctgattaccttggcgaatatcggtcgccgccgtattcagcgcttgccgcagcctgttctgccgtgcgattgaacggtcaatcgccgtgatgatggatgagtcgttgcccagtatgccggccaacgtgttgcgaatttcagtgtatttctccgtctgcttgccaatggccgtggcttgacggtccaattcgtcggcggccgtggtggcaccatcattcgcgtcggaatacagcttgtctatggaatcggacaccgcgccgaaactggaggcgctcgcgtccagtgagctgctcatcgcgtcagcggtggtgcccagggctccgaccacgtcggtgactccctgcttggcgctggcgagatccttgcctccttgtttggcggcagaggaaacctgcgtgatcagcgagttcgaggtgtcaagcaaggcgccggccgtatcggtcaatgcgctgtatgtgccaagcaaatccgccgtatcgtcaagccgtgtggcgaaatcggcgatattggcgttgaaggtattcagttgctctttggcttcgggcttggacagctgatcggccagcgaagacgcgatttccagccctgccgaagtgatggtcttggcgaacgtggtgttgatttccgccgccacctcgtccgtgccctcgttgagcagattcggtgccagcgcgttcttcttctcgttgcggtaataggtcagttcggcatgctgcacatcgtcggagaagaaggtcatcatgtctttgctgaacgacttcggaattacgatggccgcgtagtatttgccggatcgtgcgccctcgacggcatcggctttggacgtaatcgtccaatcgatctgactgttggcgcgcagcgcgttcaccacctgatcgccgaccgtgactttcaccgggatcaggtcggaacgatacccctcatccacattcgccaccgcgaatttcaggttcttcatattcgagaacgggtcccagcatgcggccacgttgaaccaggtgaacaggccgggaatcatcaccaagccgatcacgatgatgatggagaccacgttgctggtcaggcgtttgatgtcgccggtaaatagtttccacatggtgttcatcgtgcgtgcctgccttccttggtcggcggaatagtggggatgattgcggtaacggcggcgctcgggtccgcttcttcgtggcgttcggcggaggtgtcgcgacgcttggccttatgcccgtacagcatggcgcggatcgactcgtcggagaggttgccgagctcggtttggcggcggatggaatcgcgcatgaattccacgaccatcaggaagcccatgatgatgagcacccatgccagccatgtgcccatgaccacgattttctcgctggtggtcagcacaaacacgataatgagcgcggccggcaccacgaatccggcgataagcgcacccagcagcagccggggataacggtaggcgaatttggcggcccgacgttcgatggcatgacggtattcgtcgcggtcggccagtgccgcaatggcctgagtgacacggtattcgctgccaggcaggtgcaccggctcgccgataatcatgtcgctttccttgatttcccgcgcgaacaggcggttgagattggccagtttcggccgggcgccgaggccaagcgcaaaggccagaaccgcgaaaaccagcaatttgccgatataggcgaaccagtggccgtcgtagaagccgccgatggtttcacgcattgcgtcaatcgaataggtgaacggcagcagcgggtagatggcgcggaagaacgcgggcatcatttcaatcgggtacaggccggaggcgcccggcacctgcagaatgaccagcgccacgcacacgcctttgcccacgtgcatgaacgtggtggagagggcgaaaatcaccgacatatacaccagtgaggtgatgacgcaggtgagcagaaacaccggggcgctcgcgcattgaatgccgatgacaagatcgccgatggccgtgaccaggccttggacggcggccagcgtggccagcagcaggaaacggccgagatagccttgggttggcgtgagatcgtcgatgccctcgtcgtcggtttcgagtttgggaatgaccacgagcacgaacgcgcccacccacaaagacagggtggtgaacagcggtgccatgccggaaccataggaggcgaccgggtagacggcccgttcgctgataacagtgggggagagcatgaagtcggcgattgtggcggcatccagtttgccgtcggtgccgatcagggaactgagtgaactggagatgctcagggctttgatgtcggtggtcagcgtatcgagcttggtttgcacgccggccagcgccttatcggtgtcgtgcagggcggtcaccgtggtggaggcggctttgtcgagttggtcgagggtgtgcttcgactgatcgatgagtgagccttgcgacgtgatgccggtcgacagagtgttggcggtcgagctgagggtgttgaggccggtgttgagctgaggaatggtgccggaggtgatggtgccgcgagcggtattggcctcgcgcaccgtggtttgggtggcggtattgagatgctgcgccaatccggcggtgtctgtggaggcattgccgatagtggtgttcaggctatcgaggttgcccagtgcgccggcaagctcgctattgcggctttccagtgtggcaatggcggattgcagcggttctcgatcggcgttcggcagccctttgagttggtcgatgatgtcggcgttcgcttggttgatgtcttccgccgtattgatcagtccgcctacctgctgattggcggcgctgatggttccggctaccgtgcccacgctttggttggcctgtgctgcggcctggctcagcaggcttgagccttggtcaagcgcttcggacgtggaggtgacgaagccgttcagactggcttgggtagtgccgatcagggtggagacgccggccagaccttccgcggtgtcgatgccaagtgcgcgcgcgtcgtccagcgcctgacgtgcggtgcgtgtctgctccggggtatcggtgagtttggtggtgagcttggcgatggtgctgcgtgtgtgctgcacgtcgccggaggcctcggcaagggccgtgagggccttggctttggtggtgtcttcggtgctgatggctttgccgccaaccgtattgatgacttcggtaagtacttcggatacggtggagacgaatgtggaattgaccgtgcggtccacagtggacgcgcctacgtcggtgactttgggggcgatggcgctggctttttcgttgacgtaatactccagagtgggccgactcttgccgccggtcaccacgccggcgagatcgtcggaaaagtctttggggatgatgatggctgcgtatgccttgccggattccacctggtccatggcctcggcttcggtgacgaaggtccagccgagctggtcgttgcttttcagctgcttgacgatttgatcgccgaggttttgcttgccgatgagcgcgttgtcggtgccgtcgtcattgttggcgatggcgacggtgatgcctttggtattgccgtacgggtcccagaagccgacgatgttgtaccacgaatacagtggcgggataaacaccatgccgaacaggatcacccatgcggccggcaccttgaacaggcgcaggaagtcgcgtttgaggaccttgaagatattgcccactgatacctccggagcttggtgttgcttgattgctacgttttccgtagcgatacgttaatcgtagcgctacggttgtagtagcgtaatacggctgccggagattattggggtgattgatgatggttttggcggaataacgccgctgcccagcggcttatcgtgtgtcgctgggcagtgtgcctaattttttgtggctggggtgctgtgtggccgggtgtgctgtgtgtgttggtgtgaggctgccctccatggggcggtaaaaccttcattgggtggtaagtggcccatggggcggtaaaattcccatggggcggtggcttaaaatggctttattccgcggaatgcggttttgggctaaccgccccatggggtaattaccgcctcatgagagagctaccgccccatgggtaaaccgttgtatcagctttcgatggtgccggattgaccatcaatggccgactgctcgttctggctggatgactggtcggagttggagttaccggaagtatcagaacctgtgccggagctgctgccggtgccggactggccatcagtgccttggctggagcgaaaggcgttctggaacttattgacaagatttctggatggtttttggatgtttcctgaaagcgagcgggctcggtgtccggcaatgtagacagacatgtaccggctatccatcaagttcggcaaaactgcaatcgggtgatagtgtaaggggacgctatgtggggaggaaaccatggttgaattcaaggacgatggcacggccactacccctggcaagccgcgggagaaccgtgacgccgagtccgcagtcgtggctgatctggtggccgtcgaactggacgacgccggcttgaacctgaacgccaagcggttaccgattctggcgcgcatctatggcgcggtcgtgctgctggacggactcgccacattgccgattatggtgatttccatcctctatgccgtgcgtgagattctggatggtcatgtgcacgtcgatgcgatgagcctgactttcatcctgtccgcgattcatgcggtggtgctggtagtcagtgccgcatgcctgattgtgttcggcgtgatgctgctgcgcaatcatcgccggtatgccgcgcgctggacctacgtgctgatgccgttgacgttggccgacggcatgctgtcgctggccctgaccggccttggcttcaacctgctgctgccgctgattcagatgattattctcgtcgtgatttcggtgaccgctgatccctccctgagcgaggaacgccgtttgcagcgcgcgctcaaacgcatggacgatcgcgatgattatgaatcggcggtggcggccggcatgctgggccgcgaccaatccggcaagggctatattgcactggacttcttcaatatcttctggctgtttaccatcgcttcggtgggtggcctgattatggagacgatctaccatatggcgctgtataacggtgaacttcaggaccgcgcgggtttgctgtggggcccgttctcaccgatttacggctgtggtgcggtattggtaaccgtgtgcctgaatcgcctgtggaaggcgaatccgttcttgatcttctgcgcttcggcggtgatcggcggcgcgttcgaatactgcaccagctggttcatggaagtggcgttcggtattaccgcgtgggattacaccggccgttggctgtccatcgacggacgtacttcgggccaattcatgttcttctggggactgattggtgtggtgtgggtcaagtggctgttgccgcgactgctggctctgattaatcgcattccatggaaagtacggtattcgctgactgcggtatgcacggtgctgatggtgatcgacattgccttcacgctgatggccttggattgctggtatgggcgcatggccggccagccgcaggattcaccggtcgcgatgtggttcagcgaacgctacagcgacgcttacatggccaatcgcttccagaccatgcatatcgacccttccaaggccgggcgtatgtgaatggctggcaagtaattacgcttcgcgggcagaaggtgcgtagaacctaagacagccttcgcgtgtggggtggtaagtgggatacactttcaagcgttgaaggaatgattccctccgctgatgtgctgttttgtgacgcgcgtgatgacgatgggacaatcaaacgaaaggcaaggcgcatggccgaagctacagcaaacattggtgtgattggactggccacgatgggctccaatctggcgcgtaatctggcgcaccatggcaacacggtggcgttgttcaaccgtcactactcgcgtaccgagaagctcatgaacgagcatggcgccgaaggcaacttcgtgccggccgaaacgctcgaggaattcgccgcgtccctgaagcgtccgcgtaccgccatcatcatggtcaaggccggtgctccgaccgacgcaactatcgcgcagctggaagaggtgttcgaaccgggcgacatcatcgtcgacggtggcaactccttcttcaaggacaccatcaagcgtgagaaggaagtacgtgccaagggcttccacttcgtgggttgcggcgtgtccggtggtgaggaaggcgcgctcaacggcccgtctctgatgcctggtggcactgtggaatcctggaagaccttgggcccgattcttcagtccatcgccgccaaggtgaacggcgaaccgtgcgtgacccacatcggcaccgatggtgccggtcactttgtcaagatggtgcacaacggcatcgagtatgccgatatgcaggtgattggtgaggcgtatgacattctgcgccgtggactcggcatggataccgaggagattggcgacgtgttcgctgaatggaacaagggcgaccttgactcctacctgatcgagatcaccgctgagattctgcaccacaaggatgccgagaccggcaagccgttcgtggacgtggtcgtggatcatgccggcatgaagggtactggtacttggaccgtgcaggctggtctggaatttggttctcctgtggctgctatcggtgaagccgtgttcactcgtgcactgtcttcgcacggtgagctgcgtgaagacgctcagaaagaaggtctggctggcccgaacaagaccatcgatctggccggagaagacaaggccgcgttcgtcgaggacgtgcgcaaggccctgttcgcttccaaggtcgtggcctatgctcagggcctgaacgagattcaggacggtgctaaggaatacggctgggatatcaacctgtccgaagtggcccgcatttggcgtggcggctgcattattcgcgcccagttcctgctcgaccgcatcaccgaggccttcaagggcgataatttgccggcttccctgttgtttgatccgtacttcgagaagatcatcggcgaatcgcaggatgcatggcgtcgtgtaatcgtgcgtgccgtggaggccggtatcccgaccccggtgttctccagctccctggcgtactacgatggtctgcgctccaagcgtctgcccaccgccctgacccagtcccagcgtgacttcttcggtgcccacacctacggccgcgtcgacaagcccggcgtgttccacaccctctgggcgcaggaaggccagcccgaggaacagcaggcttgagcgtctgcgacaatctgtgggccgggcccctcattcagggtccggcccacaggaggcgccatcacaactcggtgacggtttcttcggtggagaaccaggtgaactcgtccactccgttggcgtaggaggacgggtaatccgggttgttgggccgctcgaagacatgggccagcgattcggctttgccggcaccggcggcgaagaaccatgtacggcgcgagcgggcaatcagcggcgcggtcaacgagacgcgcaacggcggcatcttgggggagtggttcacacccacggtgagcctatcggtaaccttgacctcatcatgacccgggaacagcgatgcatagtgaccgtccggtcccatgccgagaatcatcagatcgatgaccggttccggccccaattcattcaccaactcgcgctcatagtcgctcgcggcatcgtccagcagcgcatcattcgcggcatcggcggcggcgcgaacggaagcgtcatcactatcggcctgatccatcacatcggcgatgtcatcggctgaacgggtatcggccgccatctcatgaatattcgattcaggcagcttgccatccgccaccagctggtcaagcagcaggcgacgggcctccagagcattgcgatcggtgtcgtaagccggcacaaaacgttcgtcgctccaccagaaatgcacgcgcgaccaatcaaccgcatcagccagtggatcgttcagcgccaaacccaacggctgtgcggccgaaccgccagacagcgccacatccacacgtgtgcgatgcgtgccatcaggcaatcgttcggcgagcaaatcgagtagcgccaagacaaaacgttgcgcgccagcctgaatcatcagatctttattcggatacacaatgagttttcgagttgccatgtatggtccttatatggggtatgtgtcgtactttgcaatgtggattgtgttgtcagttgacaacgcataatacgggtggcatgccgggaatccagccatttgcagcaatgaaatgtgttgtcagttgacaacacaatgtacattgtgcgacatcgcatatgtcactttattactccgcggtcatgagcttcggcatcgcatgaggtaggaaacgatgagcaacggcgttggcatggctcgaccacaattgccgaactcatgccaacgccgctgtggcaacggttctaccgacttcagtgacgaatcagatcccagccttcgttgatgacctcggcgtagatctcatcgggatcgatgcggcgcagttcctcggtcagacagtcctcgatggtgcgcatcggcacggacacttcctgcggagtctggccgggcagcgagatcagcgcttggtcctcatacgggcgttccagtgagatcacaccgtcctcacgggtcaggtacacgccggtcacggcctgcgcgtcgggcacgaactcagtttcgactggtacaccgagtttcagacgcagccatgcgcacagcatttccagaggcaggaagtcggccttgccggtcaccttcacggcggtgatgggcaggtgcggcggctgatcgagcatcgaggcgagcattgcgcgccagacggtcagtcgtgtccaggacaagtcgatgtcttccggtgtccaattgcggcgcaaacgctcgatcgtggcctccggattattggagtgcagcgcgtcggtgatgcgactgcgggccatcgcacccatcagatccttggccgggttcgacggcggtgtggtcggccaccacgccactacaggcgcatccggcacaagcagcgggataaccagcgtatccgggtggttgataaggccaccgcgcggacgcaagatgataatctcaccggcaccggcgtccgcgccgaatcgcacttgggcgttcaggttggaatcgttcggatcgttcgggccgtcggtcaaatcgacggccggattatcgcgattcgcgctcacctcggcggccacttcggtctcgttcggttcgccttcgccggactgatcggcaggattggtatccggtactacggcaatcacgcggcacgggtgctcacggctggccgagttcgcgatttccagcgcatgctctaggtccgcgtcctcggtggcgatgagtagcgtcagcacgcggccggtcgccgattcgccgcgctcctcgtgcagctgttcgattttgtgcgcaatctcgcgggtgcgggtgttcggcatatcgatgatcatggcatcctccagtggcggccgtcgcgcgccagcatttcgtcggcctgtgccggaccccacgtaccggcgcggtaggcctgcggctggccaagcgtggaccagaattgttcaatcggatcgaggatctcccagctgaggttcacctcttcggtggtcgggaacaacggcggatcaccgagcagcacgtccagaatcagtcgctcataggcttccggcgagttctcggtgaaggagcggccgtagctgaagtccatgttcacgtcacggacctccatggtggagccgcccggcaccttggctccgaagcgcatggtaacgccctcgtcgggctgcacgcgaatcacgatggcgttcttgccgagttcgcgcacggcggtctgctcgaacggcagatgcggggcgcgcttgaacgccacggcgatttcggttacacgcttgccgaggcgcttgccgcaacgcaggtagaacggcacgccagcccagcggcgggtgtcgatatcgaggcggatggcggcgtacgtttcagtggtgctcttggggtcgatgcctttttcttccaagtagccgaccacttcgtgcgagccctgccagcccttggcgtactgaccgcgcgcggtgttggcggcgaggtccttgggcaggcgcacggcggaaagcaccttggtcttttcggcggtcaggtccttggcggtgaagctcaccggctcctccatggcggtcagagccatgagctgaagcaggtggttctggatgacgtcgcgtgcggcgccgatgccgtcgtaatagccggcgcggccgccgatgccgatgtcctcggccatcgtgatctgcacgtggtccacatagttggcgttccagatcggctcgtacatggcgttggcgaaacgcagggccagcaggttctgcacggtttccttgccgaggtagtggtcgatgcggaacacggagctcgggtcgaacacttcggataccacgctgtcgagttccttggcgctggccagatcatggccgaacggcttctcgatgatcacgcggcgccatgcgccctcggacgagcgcgacaggccggaggcggccaactgcttggcaacctgcgggaaggcgcgcggcggcaccgacatgtagaaggcatggttaccctgcgtgccgcggtcgcggtcaagctcctgcacggtggcgctcagacgctcgaaggcctccggatcgtcgaacgtaccctgcacgaagcggatgccggcggccagattgcgccaagtcgactccttgaacggcgtacggcaatgcgcccggacggcggccttgacgaattcgatgaaccgctcctgtgtccagtctcggcgggcgaagccggtcaggccgaagctcggcggcagtaggccacggttcgccaggtcgtagacggccggcagcagtttcttttgtgccagatcgcccgtgacaccgaaaatgacgaggctgcacgggccggcgatacggggcagtctgaggtcgcgcgaatcgcgcaggggattgctccaattgggggattcactcataatgtacaagggtagtcgccggcggctatctatcgttagaggcgatatgcgatttgggctgcgatttgggccacattgcgtgtgctgtgccgtgcgttgggccaatcgcgtacgcaaacgtgtacgcaacgccgtagttgaaatatcccaaaacggtgtgtattttagaagagttgcccctttagctcaacggttagagcagcgtccttttaagtcgtgggttgtgggttcgaatcccacagggggcacaacaaatccttggaatcgcaatggttccaaggattttttgtttcgaccagcctggctcctagagtggtgccccatgtcatgcaccacgattcttgtcggcaaaaatgccagttacgacggttccaccatcatcgcccgcgatgacgattcgggctcgggccgttacgatcccaagcgcttcgtcgccgtcgcccccgacgaccagccgcgccactaccgcagcgtgctgagccatgtcgaaatcgaactaccggacaatccttgccggtacaccatcgcaccgaacgtgctgaataatcgtggcattctggccgaagccggtgccaacgaacacaacgtggcgatgagcgccaccgaaaccatcgctgtcaacgagcgcgtgctcggtgcggacccgatggtcgagttgcggccggctgtcggcgggccggacagcaccgattatcaggccgagcagcccggcggtatcggtgaggaagacatcatcacccttgtgctgccgtacgtcaccaccgcgcgcgagggcgtcgcgcggttgggcgaactgctcgaaacctacggcacctacgaatcgaacggcgtgattatttcggatgcggacgagatctggtacgtcgagaccatcggcggccatcattggatcgcccgccgagtgcccgacgactgctatgccacgatccccaaccagctcggcatcgacgacttcgacctcgccgatgcgttcggcgagcagcgcgaatacctatgcagcgccgacctgcgcgagttcatggccacgcatcaccttgaccgcacaatgggaacgtcggtctcttccaacggccgtcacgtgcatagcgccggattcggaataaccgttgcccttcccacccgcttcaacccgcgcaaggccttcggcaccgcgacgccgaaggaccatatctacaacacgccgcgtgcctggtacatgcaacgccgcctcaaccccagcgaggactgggattcgccggccgcccgctacacgcccgaatccgacgacatcccgtggtgccgcgtgccggaagacaaggtgagcctcgaagacgttgatttcctgctgtcctcgcacttcgaaggcacgccgtacgacccgtacggcacgaccggcacggcggaatcgcgccaccgttaccgtccgatcggcgtgaaccgcaccggccatatggtggcgattcaggtccgcccgtatgtgccggcggccaatcgcacggtgatgtgggtatcgttcggctccggtccgttcaccgccgccgcgccgttctacgcgaacgtcaacgacacgcctgcctacctgcgcgacaccacgcccgaagtctccaccggcaacctgtattggacgaaccgcctgatcgccgtcgtggccgacgcgcattggtatgagacgaaccggttcatcgagggctatgcggaaggcgtgcgcgcgttcgggcaccggctcatcgagcgcacggatgagcagttgcttgctcgaagcgatgccgaatcgacgggtacgaatgcatggccgctcgatggcggccacggcgatgagaaggatgtgcagggcgtggcggatgtgctcgaagcggccaacgacgagatggccgactacctgcgcgagcatacaaccaagctgctgaacgacgtgctatacacctccagcaacctgatgcacaacagcttcgcaatgtccgaccgttgggccgagtagcaagacctcggctggggaggtaatagggatgccctgctgataacgcgtcagcagggcaaagccgcaatccgaatcagttgaagccgacgatgtgttcggcgatgagatagccgttgcgcacgatccagcggccggttttaccaggcagattgagcgcgcgggacatcagcttcgagcgcacatccttgccgatggccggagaataggcgtcaatcgcatcccacagctcggttttcttaacgtagttggccggatcgcgcgagagaatcaggaacgccgaggtaacgcatgattcgatcgtcaggaagtgaatcatgtaccggtacagcccctccggcaccgtaccacgttcgggcgtggcctcggtcatcagccgattgacgagccgcagctgatccacacgcttaatcatcacgtcggtctgcacgctctgaccctcgcgcccgatgaagtagtggtagaacggcacgtcgagatactggatgcgcttcacccacgggaacggctggtacgagtaatagaaatcgacgtagaacgtatgctccggcagcttcagcccggaatcgcgcaccacctgcgtgcggaaagtgagcgcatgcatgatgatgtactgcgccagaccgaacttgcccaggtcatcccagccgagcacgcggccggcctccatcacatgacggaagttcaccacgatcttgtggcgcttggtcactttgtcatacacatagttggtcaccagcatgtcgatcggctcgctggcctcacgttgcgcgcgcaacgtggccagaaccgtgtcgatggcctgcgggtcgacccaatcatccgcatccaccaccttgacatacatgccggtcgccgccgtgataccggtgttcaccgcgccgccgtggcctttgttctcctggtgaatcgcgcgcacgacacctggattggtgcgttccagtttgcgcgcgtactccagcgtgccgtctttcgaaccgtcgtccacaatcagcacctcgaggtcgctggtgtcgttcgccgaaagcagcgagttcacgcaacggtcgagataggactccatattgtatgcggggatcacaaaggtgagcgtctttgccgtgttggccatgaaagtcttacgtcctcacatatttagtcgttctgttcagtttcctgttcaaaccgtagcacttcggcttccggcgcggcagagtgttgcgcaacctgtgcccctgaactcacattctgcaaccctgaatcttccctgagcgtgtggtcgaggtccgtctgctctaagggcgatgatgccttgccgtccggggccggtgtttcggcatcgatcccgcgcttggcccggcgctcggcctccttccgggccttgacgccttcaaacaacagctgcggcttggaatcgagccggctcaggccatgccatgccaggtccacgatgtacgcggccagctgctccttgctcaccttgggccggtcggcccagtactgtccggtgaacacggtcatgcccaccagcatctgcgcatagtacggcacgcctttggtggagagtttctgccgtttgaatgtttcggaaaggatgtcttcgacgcgcacggcgatgtctcccagcagtgagctgaacgagccggacggttcggtgctgggcgagtcgcgcgccagcacctggaatccctcggcgtcctcttcgatataggtgagcagtgcgagtgcggtgcgttccacgatctggcgtgggtgcacggtcggatcgtcaagcgcggcggtgagcacactggtcaacgcgcgcatctcacggtccacaatgacggcgtacaggccctctttgccgccgaaatgctcatatacgatgggtttcgatacttttgcggtggcggcgatctcctccacgctcactgcttcaaaacccttcgacgcgaacagcgaacgaccgatttcgatgagctgctcgcgccgctgatacgacgtcattctggatgtattggccatgctgtccagtttttcacgccccgtggatagctccctgaccgtccgcccccacgtatcgtccgattctggtgaatcggacatgtgtgtcatattgacaatgcttcatcgcggctttaatatatttaataaataataaattttattaaagggggtgatgtggatcgtctaccagaatggttggccagccttacggaggaggatttggccttcatcaagaacttcgtgctatcgtcaggatctctgaagcaaatgtcccagctgtatcaagtctcctacccgaccatgaggatccggcttgacaggcttatcgaaaaaatacggttgaacgacaacgatacggaggatccattcatcctcttggtgaagagtctcgccattgacgatagatacgacgtcgacacggctcgaatactcatagacgagtacagaaagagaaaggatgaatcatgagctggacatggattgcattattgattgagatcctaggcgtaatcgccgtattcgttctggtcttcctcatcgcgaggagtctgattcgctacgcaaattccctaaagaaaggaggcagtccttcaaagcaggcggcagaagacaaaaaaatcactcttcatgatctataaaaacgtcaccagatgtatcgaagtcaagatcgcattatcgatgccttgcatggcagagcaccttatccccctggcgaatcggacattcgtggtgcgtccgcggggcggagccggtgtgtccgttgcgcttcttaggctggagccatggatacgaatgtgattattgcgattgtcgccgtcgccgtcatcgcggcaattctggtgatcggcggatggtggttcggcaagagccgcaaggctgccgtggccaagtccaccgaagccgcgaaagccaaggccgacgcccgtcttgctgcggaagcggagtcggccgcatctgattcttccacggtgaagccgtccgttgattccaatgttgatgcagctgaaaaagctccggctgaaagtcagcagaagtcctcagctcaagcttcctcttccgaaacggcggctcctgcaccagccaccgaagccaagcccgaaccggttcatgacacccccgaatccgccggcacacgcatgcagcgtcttaaggcgcggctgtcgaaatccggcaatccgttcggcaaggccctgttcaacattcttgcgaaggatcagctctccgaagccgattgggaagacgtcgaagacacccttctgctcgccgatgttggcgcggaagccagcgaacagctcgtcgaggaactacgcaacgacgcccgaatcgcaggccagtccgatccggccgaagtgcgcgcggcgctgaaagacaaactgctcaagctcgtcggcactgacatcgaccgccggctcaacgccgacaaggacggcgcgaacaagccgagcgtcgtcatcatggtcggtgtgaacggcaccggcaaaaccaccaccgcgggcaagctttcccgcctgcttgtttccgaaggcaagcaggtcatgctgggcgccgccgataccttccgcgcggcggccgccgaccagttggaaacctggggcgccaaggtcggcgttccggtcgtgcgttccgacaaggacggtgccgacccggcatccgtcgccttcgaggcatccgccaaggccaaggaagcgaacgcggacgtgctcatcatcgacaccgccggccgactgcagaacaagtcgaacctgatggacgagctcggcaagattcgccgcgtcaccgaaaagaacctgccggtggacgaggtgctgctcgtgctcgacgccaccaccggccaaaacggcatggcccaggccaaggtgttcgccgaagccatcggcattaccggtgtggtgctctccaagcttgacggttccgccaagggcggcatcgtgatcagcgtgcagaaggagctcggcgtgccggtcaagctcgtcggtcttggcgaaggcccggacgatttggcacctttcgatcctgaaggtttcgtggacggcattctcgcgtaagccaacgtccacgttgtgagagcgcaaaacgcgcgacttacctataaaccaagccccgaatcatgctcgaaacatggtcggggcttcgtcatatccgttggaatcgcgccaaaatttcctcgagcggtcgcacgtacgcttccagccacgcttaacaatcgcgtaacttggcgtaacgaaaccaaaacgagaccggctttaactgacaaactgttagcccccataagggggacggcattgtagagacaaataagacgccggccgcacaaagcccccggtgccatgaacgaaagagagggaggtagacatgggagcgattgattccggtaacaccgcatggattctgacatccgcgtccttggttttcctcatgacgcctggtgtggcgttcttctacggtggtatggttcgcgccaaggccgtactgaacatgctgatgcttgaggcggccgcgctgtcggtcaccatgattatttggactttgtggggttggtccatcgcatacgccggttccgacatcggaggcatcttcggcgatccggccagcggcttcctgctgaaggactccatggtcgcgcaggacggcgtgttcaccgccaccggtctgaacggcaacaactacccggtttccgtggacgtcgccttccaggtcgccttcgcgatgattaccgtaggcctgatctgtggcgccatcgccgagcgtgtgaagtacagcacctggatgatcttcgtggcgctgtgggttaccttcgactacgctcctatggcccacatggtctggaacggtggtctgctgtctgctgacggcgccatctccaaggctatcggcgcggccgcccacgatttcgcaggtggtaccgtggtgcacatcaacgccgcagtcgccgccctgattatcgtgctcatcatcggcaagcgtaagggcttcggcacgcagccgttccgcccgcacaacgtgccgttcgtgatgctcggcgccttcctgctgtggttcggctggttcggcttcaacgctggttccgccttcgccgccaacggcaccgctggctacgcttgggtctccacttccgccgccactgccgctgccatgctctcctggggcttcaccgagaagattcgctccggccactacaccgctatgggtgccgcctcgggtatggtcgccggtctggttgccatcaccccggccgccgatgtggtttccccgctgtgggccatcgtgatgggtgccatcgctggtgttctgacctgcctggcctgcggtctcaagttcaagttcggctacgatgactccctcgacgtcgtcggcgtgcatggcgttggtggtttcaccggtactgtcctcgtcggcttcttcggcgaaggcaccggcctgctggctggcggcgactggaagcagctcgtcgttcagctggtcatcgctctcgtcgccatcctctactccgcggtgatcaccgcgatcatcgccttcgctctggagaagaccatcggttggcgcgtcaccgaagctcaggaagtcggcggcatcgatcttgccgaccagggcgaacgtgcttacgattttgctggtactgccagctctgttctcaaggaggtgaggtgagatgaagctcatcaccgctatcatccagccccataagctcgacgacgtcaaggaggccctcgcggccgccggagtgcacggtctgaccgtgtccgaggccaacggctacggccgtcagcgcggccacaccgaggtctaccgtggcgctgagtacaccgtggacctgattccgaagattcgcgttgaagtgctgtccgatgacgcggatgccgagacgctggtcggtgtgatcatcaagtccgccggcaccggcaccatcggtgacggcaaggtgtgggtcgctccgctggactccgtggcccgcgtgcgtaccggtgagaccggttccgccgcgatctgataacacagacgtccatgcctagaaggggatggactgcatgggaaaggtccccgcacgccgcgaattgacgccgtgcggggacctttttggcaatgaaagatgaagcaatgacttcagcagtagatggcttgaaacaacgattcatggatatgagccagccggatgacgatggtgtctaccggaatggtgcgaccaagcgtaaagcccgcacggaactggccatgcaatgcctcacggagctgtggaatgcggcctgcaaggatgtctctttccccgtgcccgactccggcatcggcttcgccgcggtaggctcgctggcacgtggtcaactgggccccagctccgacctcgacttggtcatcatctacgagcctcgcacgttgaacgaccagcagctcaacgagttggccaacaaactctggtacccgctatgggacagcggtctggacctcgaccactccatccgcacgcgcgcccaatgcgaggaagtcaccgaccatgaccttcccgccgccatgggctggctggacgtgaagcccatcgccggcgacactgctctgattaccaccaccgccacatccatcctcgaacgctggcgcaaggccgcccgcaagcgcctgcccgaactgctcgactccgccaaagcccgactcgacgaattcggccgcctccaatacgtcaatcagcccgacatcaaggagacccgtgggggtttgcgcgattcggtgctcgtctccgcgctcgccgtctcatggctggccgaccgcccgcacggcatctacgacgaagccgtggaacgtctgctcgacgtacgcgactgcatccatctggtggccggcaaggataccaacctgatgctgacgccctatcaggccaaagtggctgccatgcttggccttgccgatccgacttggcccgaaaacgagcgtgccgcctactcgatcgacgatttgcagacgctgcttgcccgtatcggccggcgcatctccttctcgcttgattccaccgcatcccgcgctggacattcgctgacccacgaaaagccgcgattcgcgttcttccagatgttctctcagcgctctggcggcaagcgtgaagccccgcaattcgacgtggtggctcccggcgtggccaagcacgaaggcgaattggtgttggcacccggtgccgagcctgccaaggatgccaagctggcgttgcgtatggccgtggcggccggcgaattcggtttgcccatcaatccgtctaccttggttaatctgaagcactgcccgattcacgacaaccagtgggatgacgaatcgcgcgagctgtttattcgcctgcttgcatgcgggccgaatcttatggaagtgtgggagagcatcgacttcgtggacattccgggtcgatggatgccggaatggctcggcgtccgcaaccgtccgtccgcctcggccgcccaccggtacaccatcgatcggcatatggtggaggtcacgtcgcgtctgggtcgtgagacaccgtccgggggacggtatgatgacgatcatttcaaggcgttgctgttggccggtattacccatgacatcggcaagcgcgcgttcgtggccgatcacgccgccgagggtgcccgccatgtgccggtgattctcaagcgtatgggctacgcgccggacatcgtcgactgggccaccgtgctggtgcgtgagcatttgaccctatccgaatttgccacgggtaaggacccctatgatccggccgtggcggaggagttggccgaccgcttgcaccacgacaagatgctgttggatatgctgttcgacctgacccgggccgacggctcctcgctcggtgccaccgccggtgagaccatcaccaagcaatacggctggtccaagtggcgcgaacaaatcgtgcgcggcatgtattccgccgctcgcgccgcgatgtaaacggaatcgcccagcacttcgcgcggccgatacctacttcatccatgcgtccgagcgcacgcgcagcccgttggacaggccgcgcccgcccatgagcaccacgttgaacgcggcccagagcacggcggtacgcatcaggtcgctcgtcagcgccggcgtcaccatattggccagtatgagtatgagcgtcacatacaccacggcggtcagcgtgcaggtgcctgccagatagcggtagtcgcgcgcgccgataagaatgccgtcgattgccatcatccagccttgcagtgggaagaagatgcccatcgtcaccatgccaacggcaatcaacgtctgaatatttggcgtaggggagaagaagtgcccggcgaacaggccgactaccgcaaaagccgtgccgattaccgcgccggtgaccagccccgcacgcccggtcgcccgcgtcaaccgccgcgcctgctgcacgctgccagcgcccagcgttgtggccaccagcgtctggccggcgatgcccacggaatccagcatgttcatcgcaaaattccaagaggagttcacggcctgaaacccggccaacacggcagtacccatgcgcgcggcacaggcgaccgtagccaccatggccgcacgaatcgccaatgtacgaatgaacaatggcagtccgtcgcccccggctgccgcaataccggccaaacgaggccgcagactcgcaccgtccgcccgggaccacagaatggcggggattaccaggaacagccccatgaaccactgagctatcagcgtcgccactccggagccggcaatgccccaattcagcacaataacgaacaacacatcaagcgccgtgttcaccaccgcgccgcccaccgcagcgatcagcgtgatacgaaccttctgcaatcctcggaaaatgccgttcgccgcatataccatcagcatgcctggcgcacccagcacgattgcgcgcgtataggtcacggcttgttccaacacttcgccctgaccgcccagtgcccggcataatggctcggcagccgcgaacaatcccaatcccagtacggtgccgatgctcaaggccagccacaggccgtcaatgcctgcctgcagtccctcgcgacgacgacccgctcccagcagatgcgccacctgcgcagtggtcgagtaggccaggaatatgcacagtccgactgccgtgaggatgatggtcgatccgatggacagtccggccaaagcggcatcgccaatgtgaccgacgatggcggtgtcaataaggataaaagtcggttctgcgatgagctgcccaaaagtcggtagcgccaacgcaatgatttggcgatgaatgctggtggagttgctatgcacgctcacacgcatatcatgcttagctacgttgcgcaagcacctagtgcagccgtacaaagttatcctcagcttgtccaccaagttatccccaatatgtggataaatgagtggattatccccagacttatccccaaaatgtggataactattttttctatccacatttgacgcttcagcgtgtcgccgcgctgaccgcaaggtgaaccaacgatgaaattggtgcgcgatgattcggcacgacttgcactttcatgcgttcattaggtcgattgtgcattcattaggtcggtggactttaagagatattgatcgagcgcctcagaatgccgccattccaagcgcatggtttgtggtgttaccaagcacagtgacctaatgagtgaggaatcgacctaatgaacgtagtcgtgcgatatcttccgctcgccacgccacctcctatacttgagggctatggcagaaggaagtgaacactcgtatcagaatgggttcggcagtggctcggatcgtggcgatcgtggcgaccgcgcgggccggggcggcgcgcaggcggcggcagctggcgacccgattttcgaccgcgtgcccccgcacgatgacgacgcggaaatggccgtgctcggcggcatgctgatgagtaaggatgccatcggcgaagtttcgcagaccattgacgtcaccgatttctaccagcccaagcatcagacgatctataacgcgatcatcgatctgttttccgccagtcagccggtggacgtggtgctcgtggccaaccagctgttggcggatggcaacctcgacaaggtcggcggcgcggactatctgcacagcctcgtcgcatccgtaccgaccgccgccaatgccatgtactacgcggagatcgtccatcagcgggccattttgcgcaatgtgatcgccgccggcaccaaaatcgcccagctcggttattccgccgagggatcgcaggctgaggatgtggttaacctcgcccagtccgagatctacgagatgtcgatgggcaaggtgcgtcaggactatgccgccatcggcccggtggtccacgacgcgctcgaccagctggacaaactgcagcagggtctcgtcaacaagggcgtgccgaccggattccgcgacatcgacgacgtgacccagggcctgcagcccggacagatggtcgtcgtcgcaggacgtccggccatgggtaagtccacgctcggcatcgacttcgcccgcgccgccgcgttgcaccacaacatgacttccgtggtcttcagcttggagatgagcaaggtggagctcgctcagcgtattatctccgccgaaaccaatattccgatggccgccctgcgccgcgccgacgacatcacccccgaacgctggaacaccctgaaccagttctggaccaagatgcagaatgcgccactgttcattgacgacagcccgaacatgagcctcatggagatccgtgcgaaatgccgtcgtctgaagcagaccaacgatctgaagctcgtggtcatcgactacctgcagctgatgacctcgggcaaggccgtggaatcccgtcagcaagaggtgtccgaattctcccgtgccctgaagctcttggccaaggaactcgaagtgccggttgtggccttgtcccagctgaaccgtggcccggaaatgcgtaacgacaagaagccgcagctctccgacctgcgtgaatccggctcaatcgaacaggacgccgacgtggtgttcctggtccaccgccctgacttctacgacaaggaagaccgccccggcgaggccgatatcatcatggccaagcaccgtaacggcccgaccgaaaccttccacctcgccttcctcggtgccacgtccaaattcaaggacatgccgcaggactacaacagcaatcagggggtgtgatgatggcaagcaacgtttcacgcgatgtttcgcaagaccaatcgtccgtggtgcagacccgcaaaccgtggtatgcgttcgccaccgtggccgcaggccgcttcgtgcggtttgcatcccgcgtcaccaaacatggcggttcggctttgcccggcaaagtcgtagaaaagattgaccccggcttcctgacccgtacgctcgggcagttgccgcttggcgtggtattggtgtccggcacgaacggcaagaccaccaccacccgcatggtcgcctcgatgctctccgatctgggattgaaggtgttcaccaatccgaccggctcgaacttcgtgcgcggcgtggtctccgcactgctcaccgaagtcactttcggcggcaaattggacgcggacatcgccgtactcgagctcgatgaggcgtacgccgtccacttcgtcaagcaggtcaagccccgttatgcgttgctgctgaacgtgatgcgcgatcagcttgaccgattcggtgaaatcgacaccacggccaaactgctcagccatgtggctgcggcgactaccggcactgtggtactgaaccgcgaggacccgcgtatcgccgcgctcgccgcgaaggccccggctggcaccacagtgcgatacttcggcctcgccgacgatttgcgccactatttcccgtccgatgacgacatggccacgaccgtgtcggtggaaggtatggccgggccgctcccttcagtcagtactcccctcagtccgcttcgcggacagctcccctcggagaggggagcttccgcaggcacggcagaactccccgccgacgtgacacttaccgccgtgggcgaccacaaggccaccttccagatggacagccaggactacgccaccgacgtcaaacttgaaggcgtctacaacctgtacaacgcggccgccgcgctcgccgtggtacgtgcggtgatgcaagacaatgccgccgcatccaaggccactgccgcagccaacgcctgcgccgtgtccgccgacgagctcatcgccgccgtttcccgcgtcacgccggctttcggccgtggcgaggtcatcgacgtcaacggttccccggtcgaactgctgctggtcaagaacccgatgggcttccgcctctcgctcgccagcttcgacccggccaacgcggacaccatgatcgccatcaacgacgaatatgccgacggccgcgacatgagctggctatgggacgtggacttcacctctttgcgcgcgtccggtgtcgccatggtctccggcgtgcgcgcctgggacatggcactgcgcttggggtatgaccaagtgccagtcgccgatacgaacaccgacctcgaacaggctgtcaccgcattcgtcaacgccaatcccggcacacgcaagcacatctactgcacctacaccgccatgctcaaaacccgtgccgtactgggccgcatcaccgaagtacgggatgcgggcgtgggcaagtaaccaccctctagcgcccgcgcgccacctctcgcctgcgggaggacatggtgaggaataagacttccccttagcgggaagacatcgacaaggagaacgcgacatggccagaacaatcgatgtggtgtccctgtatcccaaagacatgaacatctacggcgattccggcaacgtgctgactatccgccgccgtctggaactgtacggttacgaaccggtcgtccaccagtacaatcaaggcgacgactggcccgaccaggtggaccttattctgggaggcggcggccaagacaccggccagaagaaaatcatcgacgacttctaccatcgcgccgacctgctgcgctcgcttgccgcagacggtacgccgatgctgatgatctgcggcctgtaccagctgttcggcgagtactttgaaaccgtggacggcacccgtctggatggcatcggcgttatcggtgcttataccgtgggccagaacgtgcgtatgatcggcaatcttgttgagcattccgaccagttcggcgatgtgattggctacgagaaccactccggccagaccttcctgcgcgaaggcgttcagccactcggcaccgtcgatcaggacagccgaggcaacaatggcgaagaccataccgagggcgcgcgcgtgcacaacgtgatcggcacctacatgcacggctcgttgctgcctaaaaaccccgccatcagcgatttccttatcgaaaccgccgtgactcgtcgttacggtacgttcgatacgtccgatcagacccccgaacaagccaaggagctcgcccggatcgatcaagtagccaccaacgcgcgcaaggctgccgccgaacgtcctcggtgaattctcggtgagtcctcggtaagtaccaatcagcgaaaaatcagtcgaaatcagtctgagggtctagtacattgccctgttgtttgcgctaggcttggtggtacgagacatggcaccaggccatgtcggacctcgaaggaggggtatcatggctgattttgatcttctgggtgatggcctgcgcaaggtcctgctggcgggcatcggagcccttgctaccggatatgagaagagcagcgagctcgtcgacgaactcgtcaagaagggtgagattacggtcgagcagggcaaggcgctgaacaccgagctcaagcgcaaggtgagcgagacggtggatgacgccaagaaggccgccgccgaagccggcgacaaagctgctgccgcagccgacaccagtgccgccgacaagcccgccgacgagggcaaggccgagtgaccaagcccacacgcactacgccggaatcagagtcgaccccgctttccagcagggtcgaccctattctgacgcctgcgaaagccgaacgtgaggcggcggcgaaccggtccgtcgacacgccggacacgctcaagcgggccgttaccaaggcgactccgagcgtatccgacgaaacgctggcactgttcggacgcaggaacgatttcgccacgcgctaccatctgacgcgccgtggcaagatcaaacgattggggcagatcaccagaatcgtcgagcaattcgacgtgctgcacggcctgactccggtcaagatgcgcctcatgttcgaggcgctcggtcccacgttcgtcaaagtgggccagattctgtcgatgcgctccgagattctgccgcaaagcttctgcgacgaactcgccaaactgcgcgccgacgccgacccgatgccgtattccacggtgttggatgtgcttgccgccgaatacgggcgtcccgccgacgaggtgttcgcgcatatcgatcccaagccgttgggctctgcttcactggcgcaagtgcatcgcgccacgctgaaaaccggcgaagatgtggccattaaagtgcagcgcccgggtgtgcgcgaaatcatggcccaggacgtctccatcatgcgctccatagccaaggctgccactaaggtgattcgcacctcacagatcgtggacctgaagggcgtggtcgaggagctgtgggacaccttcgaatcggagactgactttctgatcgaggcccgcaatctcgccgaattcaagcgtttcgccgcccgattcaaatacatggactgcccgacggtgtacgccgaactgtgcaccgagcatgtggtggtcatggagtacatcgacggcatctccgtctcccacccgggccagctcatcgacgccggttatgacttgaaggagatcggcaccaagctcgtcgacaattacgccacacagattctcgacgacggcttcttccacgccgacccacatcccggcaatatcctcatccggggcggccagatcgtacttatcgacctcggtatgaccggtcggctcgaccagcgcacccgtgcagtcctcaaagaaatgattttcgccgtcgccaaacaggattcgcccgctctggccgaggggctgctgcgatttgccggcaccgaggccgatccggaggactatcccgcgctattggccgatctggacgtgatcgtcaaggaattcggcaccgtggatctggccgaactggacatcgccgctttcctgaccgcactgacgcagatggccggccgccacaacatcgaggtgcccagtacggtgaccaccgtcggccgcgcgttggttacgctcgaaggcttgctggacgagttcattcctgatgtgaatatgatcgaaatcatttccgaccatatcgccacgtcgaaatcgctgaagaacgccaccaaagacgagatcaagtcgctgggcgttgaggggcatcaggctttgcatgccacgctcggcaccatgaccgaactcaagaccgtggcccgtatgctgacccgtggtcagttgcgcgtcaacatggaactggtcggctccgaagagccgttccagctgctttcggatatggcgaatcgtctgacgatggccctgattgtggtcggtttgttcgttggctcgtcgattgtctactacgccggcatgaagccgattatcttcggcattccggtcatcggcttcatgggctacgtcgtggccttcgccctcggcgtatggatcgtcatcgacatctacttaaagggccgcaaaaccaagaagcggtagggtatcgattgatatcagtccagcgggagggtggattcgcgctggataaggcggcagggtacgtagtcgacaccgtgatgggggttgccttcgatggcatcgaccaagtatcgtgccgcgcggcggccgatggtctcggtttcattgtcgatcgacgtcagtgcgggcctcgagctggaggtcagcacagaccagttgtcatggccgataacagcgacatcatccggaatgcgcaggccctgctgcttgagcgcatcaatgcagcctctggccagctggtcgttttgacagaccacggcgtcgaacgtgacgccctgatcgagcagcagacgggtggcggcgcggccccaaccttcgtcccacttgccgtaccggattggcccggccggttcgatgcccagctcggccagtgcctcgaccgcacccttggtgcggtcggtggcggcggtataggtttcgtcgccaccgataatggcaatgtgccggcgaccacaagagatgagatggttgatggccatgcgcccggcgtccacattgtcacaggtgaccgaacaatcttcgatatcggtggaggggccgtagacgtagaccagtggcacgccccagtcatggccaagcgtgggccgggggttggtttcgcactgcacgatgagcaggccgtcgaccttgagggacagcagtttcttgacatgctgacgttccagcgcggcgtcgccacgagcgttggccaacaatactgaggtcgattgtgctcgcaactcgttctctgcgccgataagaatcggtgtggagaaacggccctgcagatcggaggtgaccaggccgatagtgccggtggtgccgcgggccagggattgggcgagtttgttgggggagtagttgagctggcgggcggcgtccagaacgcgctgcttggtttcttcgctaatgcggggcttgttgtgcagtgccttggacgcagtggccaaagagactcccgccaaagcggcaacgtcttcgagccgtgccgcgcgtccggtcaatgtctgggccataatgcctcgattcctcgtttctttctcagcagtatattgctgcactctttcgtgcgaaagtagtgattgtaccgatacccctttgtattgttttctattgtagacatgacgcgaaaactttcgcaagtctattttttggcgtggcgcagtgatcatttttgtgcgattgaaaagagaatgaaagaaagcgttgtgttcacgttcgaatatgttggcttttggcgacacgccgtaagaaagcgctaaaaataagtgtttgtttgagtcaaacaatcgcgcaaaatgcatatcaaacctgttcgatatgcgaaaatatgcgaaagtgcgaaagcgtttttgcaaaaatggcgatgttcgtttatattgagaaaaggctttcgcagtgttacctgttccgagcaaaggagcgagcagggcgaagaccaaggaggcggaccgtccgccaccgcctctcatagttgagcggataaatagagaaagaagcgaacatggtgtctttcaataaactgacccgtactcttgctggcatcgctgccgccgcgttgattgttccgctggccgcctgtggtggctccggcaatggcggtaccgccaccgccgaaggcatcccggccaagggcaccgacgatggcaccgagatcaccctgtggacccgttccccgctggagcgtcaggccaagaacgtggtcgaggcttacaacaagagccacaagaaccaggtcaagctcgagatcatcccgaacgacgatatggaaggcaaggtcggcggtgcttcgcagaccgactctctgcctgacatcctcgccggcgacgtggtccgtattccgtactgggcttccgagggcatcttcactgacatcaccaagcagatcgacggtctggacaacaaggccgacctgcagcagggccacattgaggccggcaccgtggacggcaccgagtacaccctgccgttcatcaccgatgtttccgtgatggtctggaacaaggccctgtacaaggaagctggcctggacccggagcagggcccgaagtccatcgctgagttcaccgagcaggccaagaaggtcgccgccctcaacaaggatggcgttgccggttcctacctcgccggtcagtccggtggtgctctggtcttcgacctcttcccgtccgtgtgggctgacggtgaatccgttatgaacaaggatggctccgaggccactctggacaacgactccatgaagggcgttctggacgcttacaaggaactggccaacaccaccaacggtttgggcgcaggctccaaggaagagaccggtgccacttggaccgctccgttcgcgaacggcaagatcggtgtcatgccttacccgaacacctccaccactgctctgttcgatgctgagaaggacggaggcttcgaggtcggcgtcgctccgatcccgggcaccaaggaaggcaagacctccacgttcctcggtggcgatgccatgggtatctccaaggactccaagcacgttgctcaggcctggaacttcctctactggctgatgcagtctgacactcagaaggaagttttcgctgaccggggcgacaccgcctccaacatccagaccctgaagaccgcttacaacgacgctgacccgcgcatccagaccatcaactccgtgatcatcgacggcaacggccagaccccgaagtccccggccttcaatgaagccttcaacgccgctggctccccgtggcagctgctcgtgcagaacgccgtgtggggttccggtgacctcaaggccgacaacaaggccgtcaccgacgtcctgtctgcccagtgattcggtggtgatgctcctcaccatcgctcatcaaatcacagcaataactgaataacaactgaacagattgagccggtcccttccttgtgagggcaggggccggctcaaccacataattgaacttctatcttcttcttcattccttttcttccttcatcattacatacctcttgaatgcggtgtgttggcggggcttcggagtcctccttcctcgaagccctgacatcggattgcattcggattccgtgattaccatttcacagttattccccaaaggagagagaaacatgtcgagtgtttccaagagcgccggggcggtgcccgtgcataagtccaaggcgaaggcggccgagacgcgtcgcggcctgttgtactcgctgccggactggttgatgatcgtcgtcctgttcttcgtgccgatcgtgctgctggtggtgatggcctgctcgcgttggagcctgctgggcggcaaccgcggcgtgaacttcccggacaacttcgtcaaggtgttcgagaacaaattgttctggccctcgatctggttcacgttggagtacaccgtgatcgtcacggtcttcctgctggtcctgggcctgggcatggccatgatcgtgcaggagagctcgaagtggaacaacgtgctgcgtacctgcttcctgctgccgtccgcgacgggcctggcgtccgcgtccctgctgttctacgcactgtattccccgcaggtgggccctgtcaccaagattctgagctcgttgggcctgatgcaggagggcggttcggtgctggccaccggccagtcggccctgtgggccacgattatcgtgattgtctggcgattctcgggctactacatgctgctgatgatgatcggtctgcaggccatccccggtgatctgtacgaggcggcccgcatggacggtgccggttcctggcgtatcttccgctcgatcaccctgccgctgatgaagccgaccatcgtgatgtgcctgatctactgcgtgaccggctcgatcctcgccttcgatcagttcttcattctgaccaagggtggtccgaacaactccaccatgaccgtggtgcagctcatctacaacttcgccttcgattccaagaaggatctgggtatggccgcggcgctctcgctgatcgtgctggtggccctggtcatcatcaactccatccagatgcgcggcatgcgcgacaacaccaagtgagaaaggggaggtaacacattatgactaccccattgtggaagcgcgtcatcgctcgaatccttgaggctctgctcgccatcatcttcatcagcccgctggtctgggtcatcatctgctcgttcagcccgcaggccggttcggcccagtccaagggctggggcgtggccaactacctgaccctgttcggttatcaggaaggtctgcccaagtatctgttcaactcgataatcgtgaccctggtcgcggtcgtgttctccgtggtcgtctgcacactggccggctactcgttctcccgcttcgactacccgggccgtaacctcggcttcatggtcaccttgtccatcctgatggtgccgtacgcctcgctgctgatcccgctgatggtctggtacaaggacatcggtctgaacgacagcctgctgggcgtcggcctagtcatcaccctgttccagctgcctatgagcacgttcatcatgcgtaacgcatttgacgcgatcccgaaggacatggaagaggccgccatggtcgacggctgcaacagcctccaggccttgttcaagattctggtgcctgtggtcaagccttcgatggttacggtcggcctgctcgccttccttgaagcatggaacaacttcatgattccgctgtacttgagctcttcgtccaagtccaccctgccgctggcgatggtgaacatgcgtcagcagaccatgggtgttatcgactacggtgccactgaggccggcgtcgtgatcctgctgattccctgcgccatcctgttcctcgcactccagaagtactacgtcaagggctttatggctggagccgtgaagggctgatcatgaacgttacaatcacttccccgttctggaagcggcgtcgcgaccagattgtcgaatccgtcatcccctaccagtggggcgtgatgaacgacgaaatcgacaccacagtgcccgacgacccggccggtaaccagctggctgacagcaaaagccacgcggtcgccaatctgaaggttgccgccggcgaattggacgacgaattccacggcatggtgttccaggattccgacgtctacaagtggcttgaggaagccgcttatgcgctggcctaccatccggatcccgaactcaaggcgctgtgcgatcgcacggtcgatctcatcgcccgcgctcagcagccggacggctacttggacactccgtaccagatcaagtccggcgtatgggccgaccgcccgcgcttcagcctgattcagcaaagccacgagatgtatgtgatgggtcactacatcgaagccgccgtcgcctaccatcaggtgaccggcaacgagcaggcccttgaagtcgccaagaagatggccgactgcctggatgccaacttcgggcccgaagaaggcaagattcatggcgccgacggccacccggaaatcgaactcgccctcgccaaactgtacgaggaaaccggcgaaaagcgttacctgacgctctcccaatacctcatcgacgtgcgcggccaagaccctcagttctacaccaagcagctgaaggccctgaacggcgacaacatcttccccgacctcggcttctacaagcccacctacttccaggccgccgaacctgtgcgcgaccagcagaccgcggatggccacgccgtgcgcgtcggctacctgtgcactggtgtggcccatgtgggccgactgctcggcgatcggggactgatcgacaccgccaagcgtttctggaagaacatcgtcacccgtcgtatgtatgtcaccggcgcgattggttccacccacgtgggcgagtcgttcacctacgactatgatctgccgaacgacacgatgtacggtgagacctgtgcttccgtggctatgagcatgttcgcccagcagatgctcgacctcgagcccaagggcgaatacgccgacgtgctggagaaggaactgttcaacggttccattgccggcatctcgctcgacggcaagcagtactactacgtcaatgcactggagaccacgcctgacggactggataacccggaccgtcaccacgtgctctcccaccgcgtcgactggttcggctgcgcctgctgcccggccaacatcgcccgactcatcgcctccgtggaccgctacatctacaccgagcgcgacggcggcaagaccgtgctgagccaccagttcatcgccaacacagccgaattcgcttccggcctgacggtcgagcagcgttcgaacttcccgtgggatggccatgtggaatacacggtgagcctgcccgccagcgccactgacagctcggtccgtttcggactgcgcatccccggctggtcgcggggctcctacacgctgaccgtgaacggcaagcccgcagtgggttcgctggaagacggcttcgtataccttgtggtcaacgccggcgatacgttggagattgcgctcgagctcgacatgtccgtgaagttcgtgcgcgccaactcccgcgtgcgctccgatgccggtcaggtggccgtgatgcgcggaccgctggtctactgcgccgaacaggtcgataatcccggtgatttgtggaactatcgtctggccgatggcgtcaccggtgcggatgccgctgtggctttccaggccgacttgctgggtggagtcgataccgttgatttgccggcagtgcgcgagcacgccgacgaggatgacgcgccgctgtacgtggatgccgacgaaccgcgtgcgggtgagcccgcgacgctgcgcttggtgccgtactactcgtgggccaaccgcgagataggcgagatgcgtgtcttccagcgtcgataaatatcggcgatatgccggcctgcgcgcaactggccggcaaaataatacttatgccgccatcgtctgcaataagtcgatgacggcataggccggatgtcagtatcgattggagccgaaaacacatccggggaatgaggtctcctgtgtggggtaatacccgtgcaggagatttttaattatatgctcccgctgtgagagctgtcggcggagtcgactgagggtggtcataagcggtaccgtgtaagccaccctcagtctcgctttgcgagccagctcccgccagcgggagcctgttggttcctgattcagcgaggctgaatcggcgcgccgtaggtactgcgacacggcgaaacgcagcaatgctctaatgcgaaagtaaatgcgaaaactgagaaattgccgggtttttgttgtataagatggttgatatcgctgagggaaagttgcgaaaccgtattcgctcggttatgatgtggaatcagcttcggtgaattgctccaaccgtgatatccatggcggatatcacaccagattcactgaagatactcattccggtgaacccaatagccaataaaggaaactgacggagaacgggctctgcggcccagcatccacagaagaagtcctggtcgcatagatgcgacgtagcctgagcgaagacgcgaaagaccggggcggagaggtccaagcaggaatgcatcaatcaacacgaaagcggtggcttgcgtcaatcggcgcggttgcagcggtcgccacactggccgccggcggtgcagtcaccgcgcaggcagccgatgcgcccgtcatcaagaatgcggatgtggcatatccgtcgttcaagggatctgatgatccgatgaagacggcggcgaacaacaccacatataaccctgccgtcagctatctgcaggagacattcgataacgacgtgaagaacctggccggcatcgacaccgaccatgacttctggatcgataagattctcacccgtactggtgcacagccaactggtaaaggcacgaacgtcaagggtgcttactcgtatgaaggctccgacggcaacaactacctgttcacccgtggtcgcgccgcctacatgtacacgcacacgcctaatcagctcggttttgtgggtgataccgcctactgggaccagaccagcaggagcggcttcaccgttaccgtaaacgctgatggatcaaaccagacccttaacgaagacgcctcccagcgcaagcagacgccgagctacttcacctccctgttccagaccggtggcaagagcctcaagatcaaggaagtcaagtacatcacctacaacaacgtgatggttgcgaacctcaccgtggaaagcacgcaggaccgcgatgtcacactgaccacggcctcgccgttcgccgccgagggtgctgatggtgccaccgaacttactggccgcgtgaacgtcaagaacaacctgacgaccatctatccgcgcttctccgccaacaaccaggacggttccaactggatcgtcagcggtggcaaactcaccagcacgttgagcctcaaggccaacgaaccgcagaccgtcaagattcagctcggcctgatcgccaacgaactgcctgactccaccaaggaatatgaggcccgttacaccggcgaccttaaggatgctgccgcctcctacaaggattccgtgaccacctacaacaagtggtgggtcgataacgctccctacgtggacactccggaagacaatatcgataagaccgtggtctaccgctggtggctgagccgtttcaacatgctcgacgccaacatgcctggcaacaccttccagtacccgacctccatcgagggtgtgctcggctacaacaaccaaatcgtgctcacctccggcatgttcatgatggacaccaagtggttccgcaaccccgagtactcctacggcacctggctttccgccggcgataccgccaagaagagcaaggcgggctattactactaccacgacaatccgggcgacccggccaactggaaccatagctacacgcagtacatcacgcgcgccggctgggactcctacaaggtgcacggcggtccgtccaccgtggccgaggagctggccgaccagggtgccgaggacgtgcaaggtctactcgcttccaagagcgagccggacaacaacgacaaccagaacaacaatgacaacagcttgattgactggtcctggtggtcgatgaccggtaacgatgccgacgccgtttccttctctgagccgggtcgctccggccagcgcatggatcgcgccgatggttccgccaatatgtgggccaacgccaatgcggctgctcaggcctacaaggccgctggcgataccgccaacgccgagaagatgcaggccatcgccgacaagatccagaaagaagtcaccactgaactgtgggacaagtccgacaacctgctcaagcacaagtggctgaacgacggtgctttcgccaagtacaaggagatcaataactactacccgtactccgaaggcctgatgcctaccggcaacgaagattacaacaaggctctgcgcctgttcgaggattccaacgagttcccgatcttcccgttcttcaccgccaaccaggcggacaaggcggcgctgaacttccccggttccaacaacttctccattatcaacgcacagccgctgctgcaggtctattcagccggcatccgcaattacgatgcagccaagaacggttacatcaccaatgagcagttcaagaaactgctgtactgggtggcgttcgcgcactatcagggcggcgataacaactaccttgatcaaaacgagttctggaacgaggataacaacaacgtcggcgatgtaaacggtgacggcgtgatcaacaacctcgacaagaaccttgacgccgcacagaacggcggcaagatcacctaccgctcctggatccaccacacccagctcggcaccacgaactggacgatggtcgaggatgtagccggtatggtgccgcgcgaggataacaagattgagctgaacccgattgagatccccggctggaactacttcacggtgaacaacctgagctaccacggtcaagatgtttccatcgtgtgggataaggacggcagccactatggtggacctgctggctacagcctgtacgtggggggcaagctcgccttcacttccgacaagctcgcacacctcatttacgatccgtccacgggcaccgttgaggatgccgacaaggccggcgtaaccatcaccaatgccgctggttctgatatcaaggccgccaaccaggttgccttcaccgccgaccagcgtgtgaccgacctgttcgccaagtccggtgccaacgtcgactccgcttccaagtccaccacgaatgtggccaaggacgcggacgtgaccggtaccacctacgccgagaaggacaccaactacccggccaagaacgcggtggacggcaagaccgtgatggaatcgttctggggtaccaagggttctgagaacaagaccgacacgctcaatatcaagttcaaggacggcaagcagaagatcgacgacctccgcttgtacttctaccagagctcgtccagccagaccatctccggctatgccgagcccgccaactacaagttggagtaccagaaggatgacggcacatgggccccgattgcggatcaggtgcgcaccccgaactacgcgggcgcgaactacaaccgtatccagttcactccggtggagaccacgactatccgcgtcaccttcacgccgcaggccggcatggccgtcggtgtcaaggagatcgaagcctacaacaccggtatcaaggctgacggcacttccgagaaccaggctccgcaggtggatgcttacgtgtcttccagcacctcatccggtgccaagctcgtcggtacggtgaaggatgacggtctgcccgcagaaggcgacgtcaccaccaagtgggagctggtttccggccccgagggcggtaccgcgaagttcgtggacgatactgctgccagcaccaccgtcaccttcaacaaggaaggcgactacgttctgaagctcaccgcttccgatggcgagaaggaaggctccaaggaaatcaccgttcacggcatcccctctgacggtaccgtgaacgtagccccgcagtcgagcgcctctgccagctacaccaacggctaccagccgaaggacaacgccaagaaggtcatcgacggccaggtggtatacaccaacacgccgaacgagacctggaacaactggggcgacaacactggtgtggagccgtggctgcaactgaagtgggccggcaaggtgccactgaagaaggccaaggtcttcttctggaccgatggcggtggcgtgccgatggcctcatcttggaagctccagtacgctgacgctgacggtaactggcaggatgtgaagctggctgacggccagtcctacacggtcaatcagaacgaaggcaacgaagtgaagttcgccgacaccgtcgaaaccgacaagctgcgcgtggtcttcccgaagggcgccatcgtgggtgcttccgagttcgaggcgtacgccatcgagccggtgagcgtggacgaagtcaaccgactggtgcagaccggttccaaggccgatgatctgaagctgccctccaccgtgagcgccgtatacaccgacggttctcgccgtgacctcgccgtcacgtgggataaggtgaccgacgctcagctggccgccgatgccgtattcgatgtcaagggcatcgtcgctggtgcgctgagcggtacggttgcacacatcgcagctcgttccgataccgcattgcagaccgtgggtaatgcgcagccggttgagcagaccgtctaccagaacgccaagtccatcgacctgcccgccacggttccggtgaagttcccgaacggatacaacgacgaccgcaaggtcacgtggaaggatgccgacatcaaggccatcgacctgaccaaggttggtgactacgaggtggctggtaccgtcgacgacggttcgtcttccgcagctgccaagctcactgtccacgtggttgccgacccgaacggttcctccactcctgagcctgagcctgagccgttggtcggttggattgaaggcaaggcgaccaaggccaccatttcgcctgattccgaggcgacctggtcaccggccgaaggcaagctcaacgacggcgtagtcgtcgatgatacttggccgaccacggatgatcagaacgtcaacgacaaggtctggggttcttggggcaaggcaaaggacggcatgtacgcccagtacgacttcggtcagtccgtgaccgttgaccagagccgcgcccagttctgggccaacttcgctgagactgacgattcgaagggtggtctggaagtcccggacgcttggaagattcagtacctcgccgaggatggttcttggaaggatgtcgagcccaccgaggattacaccattgtgcgtaactcgccggcttctcgtgcggataccgatgccaaaggttggagcactgtgaccttcaagccggtcgccaccaagtcgctgcgactcgtgctcactccgcacaccggcagcagcaccttcggggccgccgtggccgagtggggcgtgcatggtattgacggcaccgagcctgaacctaccccggtcgacaagaccgcgctcgagtcggctcttgacacagccaacggcctcgatgcaagccgctacaccgccgcttcatgggctgagttccagcaaatcattgacgctgcccaggctgtgtacgacgatgccaacgccaccgcagaacaggtcgccgagcaggtgaccaagctcgaggacggccagaaggcactcgttgcgctcgccaccgacgtggagaagtccacgttgcaggcggccatcgatgcggccaaagccgaggccgcttccggcaagtacacggataagagtgtcgaggccttgaacaaggccatcgaggctgcggaaggtgtgctcaaggtcggtgaggtcggtgaggtcactcaggccgccgtccaggaagcgtccgcttcgctgaacaaggccgtcaaggccttggaagagaagcccgccgccgaaacggtgaagaaggagtccctcgaggcttccatcgagcaggccaagaaggctgacaagtcgaagtacaccgaggaggcatggcaggctctgcagagccagattgccgccgctcagaaggtgtacgacgacaaggatgccaagcaggccgatgtcgatgccgcacaggatgcccttgacaaggcattttgggccaccaaggttgagcagaagcccggctcccagcagcctggtgtgaccgacactgataaggatgataaggacaacaagggtgatcgtgtgcctccgactggtgccgcggtttccgtagttgctgcggctgccgtgctgctcaccgccgcaggcgtgaccatcctgaagcgtcgccagtccggcgaccacggttcggctcgccactcggcctgacccgcaacggagtcattctgccgagtgagccccctcacagagggggctctagccttttccttctacccatcattactcttttcactcactcaatgaggagcactatgagtttccatgtatccgcgcaatcggttcgcgcggtggccggtggactcgtcgccgcagcgacattgctgtcaggccttgcccttgcgccgaccgcaatggccgccgattcagccaccgctgacaacgcgcccagcgttgccggtcacgcgtataacgaactgccgtataacaatcctgatgtcaccgtcacccaaatcgacaatagcgcactgcccagctacatgcgcaaccccatcgggcagaacgagggtattgacaccccgaacgatctttcgcagaactactactctgcagatgcatccgcgctgagctatgacggcaaactcttcgtcttcaccggtcacgatgaggcttcgcccgactacggctccttcaacatgaaggactggggcgtatacgtcaccgatgaagacggcctgaatcaaggcaaatggacacattacaagaccatcgccaaggcagacctgttcagctgggccaccggcgatggcgcgtacgccggccaagtcgtagccgacgataacggcaccccgagcgacacttccgatgattggttctactactacgtgccggtgaaggacaaggcttctgaggcggctggacaggacccgttcgccatcggcgtggccaagtcgaagagtccgctcggcccgtggaaggatgccatcggcaagccgctgctcaccacatcgcaaacccagattgaaaccatcgatccggcattctttgtggacgaggatggcgccggatatttgcactttggtacgttcggcactcagctcgccatcaagatgaagaaggacgccacaaccggccgcacctcatacaccgaggtggaaaccaaggctgatggcaccacgccgaacctccacaccatgaaggacacggacagcaacgcgaacggcccgaagggattcttcgaggcggcgtgggtgttccgtaagggcgatacctattacaacgtgtacgacggcggtaagcccggttcgggcacggccacctgcgtggaatcgaactatcaagcttgcatccagtactccacttccgacagcccgctcggcccatggaagtaccaaggcgtaatcgtgccttctggctcggccaccacgatgcacccctcggtgctccagttcggcgacaaatggtatgtgacctatcacaccggcgacaaggaaggcggcaccgatttccgccgtgccgtgtgcattgatgaagtcgattggaccgccgacggccagatggtttccaccgcccatccaaccaaggccgagaaaacgcagccctccaccaacgtggctccgtacgcaaaggtgagcgccacgttcactgaaacgcctgcttggaagggttcggtgaacgacggccgtgtgttgcaaaccgctgtggtcccgccgaatcactggaccaactaccgttctatcccgcaatcgcagtccggcgattctctggtctaccaatgggatggcactgtgcgcgtcaactcgtctaaggtttggttcgacgtggattccaacgctctgcgcgcgcccgcctcgtggaagattcagtacttggacgcggacggcacatggaaggatgtcaccaacccgagtgcctatacaacgaccacaggcaaggccaaccccaacgccgtcaccttcgatgcggtgaccactactgccttaaagctcgacatgaccggtcaagctgtggatggcggctatgcctccgtggccgttgctgaatgggaagtcggctccgactccagcgaatcgccggcaatcactgcgccgaagagcgtgaccaccgccaccggtactgcgcctactctgccggccacagtggatgtgaagtacgggaacccaaccgttgcctccccagtaatttggcgtccagttgatgcttcctcgtatgccaaggtcggttcgtttacggcctacggcgtggtcgccggcgtgcccggtgaggcaagcgagcagggcaatgtgtcggtaaatgtcaccgtgcaggacggctaccagcctgccgctgataccacgaagccgactgtaaccgttgccgttactgctaacgcaggcaatagcgagtggctcaccaccgctccgttcgccaccgtgcaggccacggacgacaccgcacctatcgccaagctggagatttccgctgatcaaggcaagagctggaccaccatcgccgcgaatgcaaacgcggccattgccacgctttcccagcagggcgatgtcgaagtgtgggctcgcgccaccgatcaggccggcaacgtttccgacgtggccaaggccggcggcaaggtggactccgccgcgccaaccgtgaccgccgccgccgataaggaggagcgcacgctgaccttgaccgctgatgacggcaccggttccggtgtcgcatcaattgaataccgcattggcacagacggtcaatgggccacgtacagcaagccgattgctgcaccgagcgcgtcgcgcgccaccgtgtactaccgcgccaccgataaggccggcaacgtgtccgcttcggcgaaaaccgacattccatccgacacttccgtgccgctgaccggctacattgagggcgatgccaccgccaccgatgtggacggcaaggcatccggctgggtcaagggtgccgccgcgttgaacgacggcaagatcattcccgatatcaccattgccaacgaggatgtctggggcacttggcccaacaccggtgagatgcgcctcgactacgagtgggaccgtgaagtgactatcgactctagccgcgtgcaattcacctcggatgatggcggattgggtattccggcatcgtgggaattgcagtactgggacgccttggcgaacaacggtgccggcaacttcgtggatattcccgacgccacctacactgtgaccgccaattcaccgtctgctggctgggccaccggcgatgccaaggggtggtctgatggcacgtggaacactccggtcaagactaccaagttgcgtatggttatcacgtccggctcggcttctccggctgttgccgaatggcaggttcatgccattgacgacagtacgcctgagccgcctgagcccacaccgatcgacaagaccgagctcaaacaggcgctcgctgactcgcctaaggctgacgatgcctccaagtacaccgagacttcatgggcggagtacgcggcggtattggattcggcgcagcaggtgtataaggctgaggatgccaccgaagctgcggtggtggatgccgcaacccagctgaagcaggcagcgaagaagctggtgcttgtagctacggtgcaagatcgtgccgcgctgagcgctcagctcgatgccgctgctgccgtggatcgcacaaagtggactgatgaatcgctggccgtgcttgattcggcagtcgctacggcgaatgcgctgacgagtgatggtcaggccgcccagtctgacgtacaggctgcgactgaggcaatcagcgatgccatcgcgggtctggttgagaagagcaccacgaagcctggccagggtggcgataagcccggttccggcacggacaagcccaaccaaggcaacgattccaaccagaacaagggtgatgcagactccggcaagcacaagaagatacctgacaccggtgcagccgtgcttggtgttggcatcctcgccgtggtacttgctgttgcgggtgtaatcatcctcaagcgccgcaagtccggtacctgctagtcccactcgctcggcctagcatcaccaagcccccgcgcatgaacagcgggggcttcacttttgttcaataacaagcattatgtgcgcgtatgagactacgatggtggggaatctacgaacaggggcagcaatgacggcatacatggaccataaggatctcgccaacgaagttatcgatcaggcgcgcgcacaagagattactgatggtgtgcatcgcgtgcttgaccggattgcctcagcggagtccgcagccgggcgtgctgccggttcggtccaattgctggctgccaccaagacgcgcgatgtcggcgagattctggcggctatcgatgctggtattcgcgtgattggtgagaatcgtccacaggagattactgtcaaggctgacggtctggcaaaacgactgggggagcgtggttattcgctaggcgtgattgatgccgctgaggctgacacggccaatgccgcagctgcaacgcatattcctttccatctcatcggccaattgcaggctaacaaaatcagtaaggtgctgccggtagtggacgccatcgaatcggtggattctattgagttggccgagaagatcgcccgtcgtgccaccatgcgcggcattacggtcggggtgctgctggaggtcaacgaatccggcgaggaatcgaagtccggctgcgcacccagccacgccatcgacttggctcagcgcatcggtgcgatgggcggactgcgcttgcagggattgatgactatcggcgcccatgtggatgatgagcgcacgattcgtgcgggcttcgcgcatctgcgccgcacgcgcgaccagattattgcctccggtgccgaaggcacggccgactgcaccgaactgtcaatgggcatgacccacgacatgacctacgccatcgaagaaggctccaccatcgtgcgcgtcggcaccgccatcttcggcgagcgcgccttcatctgattggagctatacgaaaaaacgccgcttgatcaatagacgggtgtccgtaaaacagttgatcctccgtatggcgtagaccatgcggaggatttgtttatgtctaatcttcaaacttgctggcggcaaacggtttgtcaaaaccgtttgccgccagcaagtccacaggggatagccgctttagcagcgcaagggggtgtagccaccttgacggaaggtcgtgacgcaacattctcggtcatgcagtatcctcctgctgacggagaatgaagcgacccaggacgcacatattcccgataggagagtatagaagtgcgccctttagttcctaaagggatttgctccgcttaacttctcgacaaatcggaattttcaaattagtctttgcaaataacctttgaatcttcaccatcaattacaattccctgacggttgttaattgggcatagattcaaatccgaaaactcagtcattattttctcggtaactttcttaaatggtgctgtaagataatgcggaagaacatagaaatcaatcaaatcaagccctgcatcatcttcttgtgagtagtcctccggcttttcatccatttgctcgata

SEQ ID NO: 358 - DNA, 13592 bp, Unknown
  R42_10m  MAG No. k141_23678
ccgcggtgggaggtcatggcggctcgctactattttcgctatctcgcatgttacgaaagtcttcaaggagtaagccatgaccacgctcgccattgatatcggaggaaccaagatcgccgccgccgtctgcgatgaaaatgacagcatcatccagcgctggcgcgtccccacgccgatggacgccgacgccatcaaccagcacatcgccgaggtgtaccgcgaggctgtggccgccgggcacaccgatatcgaggccgtcggcatctccgccgccggcaatgtgagcgcggatcgcaagacgctcaccttctccgccaacattccggcatggatcaactacgatctgtccgagcacgtcggcgcgctgatcgaccatgccgtgccggtcatcgtcgaaaacgacgccaactgcgccggatggggcgaattcgtgcacggcgccggccagggtagctccaacatggtcgcgctgaccgtgggcaccggcctcggcggtgccatcgtgatcaacggccagctctaccgcggctccttcggcatggccgccgagctcggccacctgccgatggtcccggacggcgaccactgcggctgcggcctgcgcggctgcgccgaacgttacacttcgggaacctcgctggagaacttcgccaagtccgccgtgcgccgtcgtcctcaggacgccaagcgtcttctggaactgtgcggcggcgacatcaccaaactggaggggccgatggtgtcccaagcggctcaggaaggtgacgtacttggcctgtatgcgttcggcaagatcggcgaatggctgggccgcaccatggccgccgtttccgccgtgcttgacccggacctgttcgtgatcggcggcggcgtggtggccgtgggcgacatcctgctggagccggcccgctacaactaccagcgtttcctggaaggcagcgcctaccgcggccatgccaagatcgtcgcggccactgcgggccaggatgccggtctgatcggcgcggccaacctggctctgcgctgacgatgtcgctccggcaacgggacgttagtctaatggtgagtcatggccggtgccatggctcactgccgcgctgatagtgcggtcgatgagtttccgctgcctgaccatggaatcgaattccgggttctcagcgatttcctcgtactcgtgttcggtggtcacgccggcgatttcggcgataatctcctcataggacgtttcgacggttcgatgcacgccggtgacgtgcccctgacgtatcacgacaatgcggtcggataccgcgaacacatccggcagatcgtggcagaccatcaccacggaccggccttcggagcgcagtctcttgatatatgcgagcacttccgccgactgcatcaccgacagtgcggcggtcggttcgtccagcagaataagctgcgggtcattgagcagcgtgcgtgctatggccacggtctggcgctggccgacggataaggatgcgataggggagccgacccgaatcgccgagctcagggtcttcagcacggaacgggcacgcgagttcatcgaatcgtcatcgcgtatgccaatctgattgatctccttgccgaggaacaggttcgaggccacgtccaggttgtcgcagaactcctgcccctggaacaccgatgcgatgcccatgcggtccgcctccctgatcgagggaatgatcacctgttcgccgttgagatagatatggccgaatcccggctgcagaaatcccgcgatgaccttgatcagagtggactttcctgcgccgttatcgcccacgatggcgacgacctcctggcgttggatggacagattcaccgatttcaacgcctcgacgaagccgaacttcacacagatgtcctccagccgcagcagaggaggtgtgctcgaattcctcatggtgtgttccttcttctcactcttctcctggtaccggtcactggctgacgtcattgcgaaccgagaactcgatggcgcataatgcgccgcctagcgcgcagttgtcgttcgggtgggatgacacgagtacatcgatgggtgccacggcatcagggaacagcatgcgctgcaacgcttcattgaacggttggatgaatacgtcgccggtcatggccagcttgccgccgagcacaatgacctccggatccacgctgatgcacagatcagccgccacctgaccgatacgcacggccgtgtcggcgatgatgcgacggcaaccggggtcgccttcgttggcaaaggacaccagatcatccagcgtcatattgccgtgtgtgacgctgagcaactgcaccagcctgttttccgccacgacggtgtcaaggcagccgcggttaccgcacgaacagatggcgcccagcgggtcgacctggatatggccgatttcaccggccaggccggtcacgccatgcatgatttcgccgttgatgacgatgcctgcgccaaccccgtcgttggctgagatatatacgaaattgcgtttgcctgccgccacgcccatacgggattcgccgtatgccgcgaaattcgcgtcattatcgacgtatacgggaacgttgaacgccgtgcgcaacggggccgtgatatcgacgccgtcccatccgggcagaatgccgggaatcgctatggtgtggtcgttggtggccaccggtgcggccacggccacgccgatgccgaccagctcgctggcttcggcgtcgatgctgctcagggtctcattgatgagcagcatggcgcgttccagcgttgtgtccgccttgtggcccaacggcagggggagcgtgtgctcagcgatgattgacttcgagaagtcaacgatagaaagcgtaagatgacgtcgcgcgatccaaagcccgacgccgaggccctgatgccgtgcaagggtcaccagagtggctctgcgaccgttgcgaacggtgtttttggtctccagctggtcttcgtcgacaagctgatggacgagcgtggacacggtcgcagtggacagtcctgtcacctctgccagttcgacctgtgtcatggcgccgaacttgtggatgctggccagcaagttggcgcggtttgcctcgcgaagcgaggtctgcgaaccgaaaagccttgttgccataagagttcagtgtagtcgttaccggcatgaggcacagcgaggcgcagagcgtggatttttcggcgtgtcgccttgtgatgcgcgaaaaatcgccattgcgttcattggttgaacataaacgacgggaaattcgctttcttgagtttgacaacttaactcaatacggtattctatgagatgaacctgaggttattctcaggttcgggcgaccaaggagggttcgccatcccctcgaagatgaaggagaacaaatgaagttcactaagaagatcgtcgccgtggtggcaggcgttgccatgtgcgcgggcctcgcggcctgcggtggcagccgtagcggccaggcaactggcggtgatgccaagatcgaaaagggcgccactatcggcatttcgatgccgaccaagtccgaagagcgttggaacaaggacggcaacaacctgaaggccaagctggagaaggccggatacaaggtcatcctgtccttcgccgacgataagccggcccagcagaacgctgacatcgagaacatggtcaacaacgacgccaagatcgtcgtggtcgcttccaaggacggcaccgcagtgggccccgccgttgagaaggcccgcgatgcaggcgccaaggtcatcgcctacgatcgactgatcatgaacaccgacgccgtcgactactacgccaccttccagctggagcaggtcggcgtgctcgaggccacgtggctcattgaccagctcaagcttaaggatggcgccaccggcccgttcaatatcgagctgttcaccggttccccggatgacaacaacgccaagtacttcttcaagggcgcttgggatctgctgcagccgtacttcgagaagggcgtgctcgtctccccgtcccagcacggtcagggtggcgtgaccaaggacttcaccgttgaggattggcagaagatctccgtgatgagctggaagaccgagcaggcgcagaaggacatggaatccatccttgactccacctacgcccacggcgagaagctcgacgcggtcctcactccgtacgacggcatcgcccagggtgtgatcaacgccatcgaatccaagcgtcccgacatgaagccgggcaccgactcctggccgtacatcaccggtcaggacgccatggagatcgcagttgccaacatcgccaaggataagcagggcgagaccgtgttcaaggacgtgaacaagctggctgacgccgtgtacgacatggtcgtcgagatcgccgagggcaaggaagtctccggcctgaacggcaagttcaacaacaacaacatcgacgtcccgtccaagctgcttgacccccagaacatcaccaaggacaacctccaggatctggtcacggccaactacatcacccaggatcgattcgacgagctgactaagtagtcctcatcaggcaatccgtaaacaaacacaatgacatgcggcgcatagccgatatgcgccgcatgtccatgaacacagaactgtgacgaggagtgatgacatgtcatcaaatgacaccatcttgacgatggaaaacatcacgaagacgttcggtccggtcaaagccctcaccgatgtgaatctttccgtcgatcgcggcgagatccacgccatctgcggcgagaacggtgcaggcaaatcgaccctgatgaacgtgctttcgggtgtgtacccatacggtagctattccggcaaaatcacctttgatggcaaggaatgcaaataccatactattaatgattccgaggccgacggcatcgtaatcattcatcaggaactggcgttgagcccgttcctgtccattgcggagaacatcttcatcggcaacgagcaggccaagggtggcgtgatcgactgggacaagacccgcgccgaggcgaagaagctgctcgatcgtgtgggacttcccgaagacccggataccagggttatggacatcggcgtcggcaagcagcagctcgtcgaaatcgccaaggcattgtccaaggacgtgaagctgctcatcctcgatgagccgaccgctgcactgaacgatgaggattccgcccacctgcttgacctggttcgtcagctacgtgacgagcagggcgtgaccagcatcatcatcactcataaactcaacgaggtcgccgccattgccgacaatgtcaccatcattcgagacggttcgaccgtcggtgtgatgtacgtgacgccggagacgccgctcgaccaggaagaactcatccgcaagatggtgggtcgtccgctgcacaacctgtacccgaaccacccctccaataccccgggcgaggaatacctgcgcgtcgaggattggaccgtgcatcatccgctcgacgcggagcgcgtgatcgtagaccatgcgaacatcaacgtgcacgccggcgagatcgtcggtctggcgggtctgatgggtgcgggtcgtaccgaaatggccatgtccatcttcggccactcttacggttccaacatctccggcaaggtgttcgtcaagggcaaggaagtcaagatgcccaacgtgcagtccgcgattgacgcaggtctcgcctacgccaccgaggatcgtaagggcaacggtctgaacctgctgcagaacatccgagagaacgcatccctggcctccctgaccaagatcagcaagggcggggttgtggacgacaaccttgagcgcaaggaagtcgaacagtaccgcaaggacttcaacatcaagtgtcatgacatcgatgtgaatgtctccaccctctccggtggtaaccagcagaaagtgctgctcgccaagtgggttatctcgcagccggacatcctcatcctcgatgagccgacccgaggcatcgacgtcggcgccaagtatgagatctacgaaatcatcgataagcttgccgatgcaggcaaggccgtcatcgtgatttcctccgagctgcctgagctcatcggtatctgcgaccgcatttacacggtgtcctacggtgtcgtcaccgacaatgtcgagaagaatggatttacccaggaatacctgatgaagggtatgaccaaggaaagggaggtggcagcctgatgagcgccgcaactgcaacacctgcaaagaaagaagaaaagaccggcctgctggccacggtcgccaacaatgcccgtcaatacggtattgtcggcgcactgctgatcatcgtcgtggccttcgagatcctgaccggaggtgtgctgctgaagccgaactccttcgtgtccctgatccagcagaacgcctacgtgatcatcctggccattggtatggtgatggtcatcatcgccacccacatcgacctttcggttggttccttggtagccttcatcggtggtgtgtgtgcactgctgatggaacgcgccggagtcaactggatgctcgccatcgtcatcgctctggtcgtcggcctgatcgtcggcgtctggcagggcttctgggtcgccgtcatcggcatcccgggcttcattaccactctggccggcatgttgatcttccgtggtctcgccaccgtgatcgtcggcgaatccgtgccgattacctccctcgaattccgtggcattgcccgtaactacctgcccaacatccttggctggtggggtccgttcgacggtctgaccattgtgctcggcatcctgtgcattgtcggctttgcctggagccagctgcgcaagcgcgcccgtgtggccaaggtcggcctggtgcccgagccgatgagcctgaccgtcctcaagattgtgcttgtcgcggtcgtcatcgccttcgtcacctacctgctggcttcctccggtaacgctgatcagggtggtaccccgatcatgctggtgatcgtcggtgtgctggtcttcatctacaacttcatcctgaccaagaccgtgttcggtcgccacgtgtacgccgttggtggcaaccgcaaggccgccatcctctccggtatcaacacccgccgcgtggacttcctgctgttcgtccacatgggcttcctgtccgcagtggccgctgtctgcatgctttcccgtctggcttccgcaactgctcaggccggtatggagttcgagatggacgccatcgctgcctgcttcatcggtggcacggccgtcaccggtggtattggtaccatcccgggcgctgtgattggtgcattcgtgatgggtgttatcaaccagggtctgtcgattatgggtgttgacaccgccgtggtgaagaccatcaagggcctcgtgctcctgctggccgtcgccgtggacatcatatccaagcgcaagaagagctgaccttcccctttctcctcctcgatgtgggattcgtgccggtgccgctggtgcggatcccacactgttatctgccgtcattcttgtaatcaaaggactttttccgccatgaaactcaccgcgcgctccacctcccgtatgtatgcattgacctgcttggcctgcgttatctggctctggcagtcactggtcgaggccaataacgatggctcgctgttcaattgggccactattgtcttctcgctgtgcttgctagtggtcatcggatggagtggttggaatgccgtcaccgggtggaacgccaaggagactgaggccgccacggcgggtgccaaggatgatgagggcagcactgatcggtaacgtatatacggctgttgttgccgggaacatataggtcccggcaaacctgcagcgatatgtgcattgcaagccagggatcccctggcttttttatgccgaaacggaactcgacacgggcgcgcaggtcgttgggtttgtctagagcctgcatgtagttacttatggtaatgactattggtaactaattggaggttgggccagcgatgtgcgattcccgaaccgataccaagaccggcttgcttccggtgaatgaggtgcggagcctcctggatgtctgctggaaggccaagaccatcaccgaactgatgccggcattgccgaaaggtatgaaaccgcgctatgtccacgtgatcgacgccgtctggcatatcaacgaaccgaatgggcaagataccggcaccgcgcgcgtgggcgacgtcagcgcattcctcggcgtcactacgccgagcatcaccaagctcgtcggcgaaatggccgacctcggactcgtcgtcaaacacgccgatgccgccgatcggcgtgcggtgacgctcacgctcaccgaacgcggcttggatatccgccgcatctatgtggaggaatatcacgcgcatttgagccaactgctgggcggattgacctcggaccagtgcgaaaccacggtacgcaccttgaccgaggctctgcgactcatgcaggaagacttccaacgtcgtagtcagaatatctgaatgaatggaggagagaacaagatcgtgactcattccgcaacacagctgcctaacggcggcaagcaaccggtctccaacaaactcgtcatcgcggtcgtctcgctcgcgatcctgaccttcctcggcatcctatcggaaacgtcactgaacatcgcctactccacgccgatggaggagttctccatcggcgcctcggtggtgcagtggcttgtcaccggttatctgctcttgctgtcggtgtcgattccgagctcgccgttcatggtgcgcaaattcgccaccaaaacactgttcatcatggccatcgtgattttcaccgccggcacattactgggcgcgctcgcggtcaacttcccgatgctgctcgccgcccgactggtcatgtcgctcggtaccggcatctccctgccgcttatcaccaacatccactggcacgaagaagcgtgattccaacatgcaacgccctattatgacttcgcggtcgtttttgcgcacaccgtctgaagcggctgggcccggcgacgaggcaactattcaggacctcgtggatacgttggaggccaaccgttcacggtgcgtgggcatggccgccaacatgatcggcgtgagcaagcgcatcatcgtcttcgtggacgaagatctcggtggccgtatcacggtgatgctcaaccccgtgatcaccgcttcggatggtgccttcgacacccaggaaggctgtttgtcgctgaccggtgaacgccgcacactgcgctgccgccgtatcgaggtcaactacgaggaccgtcggttccgcgcccgccacgccaccttcaccggctggaccgcgcagatcatccaacacgaagttgatcactgcaacggcatcgtcatctgattcattcggtgctcgttgcagcccacccccccccgaggctggtcatcgcgattacgatgcaattacatcgcaaccgctatgaccagtttttttttatgtgcactggtggggtgggtgttctcagcggtgttggggtgccatgcgctggccggttggcttcgctgaggggtgtgggtggtgtcatgttgccagcggttggctggttggcttcgctggagggtgtgggtggtgtcatgttgccagcggttggctggttggcttcgctggaggttctctcagcgtcggtgatgtgccaaagagtggcgggctggcttcgctaaggagcgttaccgtcggtggagaaccagtgcgtgacctgctgccgacgctaagcgttcattaagcgtcgttagcggccaaaacttggacgtgtaacgatgctgggcggttttagcgtcgttgctgtgccaagttgtggtcctctgccgacgctgccagtgcagtagcgtcggcgttgggacaggtgttgggcctttgccgactctataagcgagggaaaatcattcgccggtgcctaagtgggtctattgccatgctgaatacatctgctgagtgtagctatgcgttcgaaggcgatttcgggacctttctcagtagcaaatatgcctaatgcgcggagttatacacttcaccgtgcacttatacacgccaaacgaagcagaaatcgactgctgacagtggacgacacgccagagacgatgtggataacccagagacggtggataacagctgcgcgatcagtggataacctgcaagaaagtgcggttatccaccgacggtagccactgttatgcacattccataccccttggaatcattgggttttccacttatccaccatctcgccatgcgggcttgcgggccaccgcacgaacgtcatacagtgtgcctcacggcgggcaacgtagcccgccgtccacatcacatgaaggggaaacaccatgagcaccgcaaccactactactgccgaaaatgccggtttgccagcaatgctggacaccaaagacgtagccgagatgttcaaacgctgcaatctcgccgtctatgccgaagcgagacgcatatattatcgcgaagtgaatctgaacccatgcaaaaagtatccgaagcaggtgctgcaaaggatcgaatggtggttctgggattggtttgcctatgactgcgccgtcagcggtattggactgaccggcaatgaatccgaagatttacgtatcgaattgcagcacggtccgggcgcaggtatctcgccattcctagccttggccgaattcatgtatgacaaggacgaacgtatcggcacacgcgagatacgtgattttcgcgaacttgatgacaccaatttcgcttcgatgttctggattcgcgatgccagcgcggtcaaaggtcgtctgacagttgaggacatcattcatggtggtgtctacgaggtggcggacgtacatgccgcctcgcaatacgatggtgcgcacggcggcatgatcgtcaatcgcatcgcacatgtgagaggcgtgtggcgatcctgttccatcccgatctatgaggcacgaaggcctgatgacccgcaaatcggtgattcgctggcccgttcattccgggaaaccggatataaaccggactttgccggtctggtgcggtttttctacgggagggccaaagacaccggtctcgactgggaagatgtggaagccgcgcgccaagccggtactttggacgtgctgatcaagaaggccggcaatcggtgaaggattcgcctaacgctgctgtccaagtcggcggccgcgatcacgaatgaagagtgacgcaaccaaacagaccgcgcacacaatggcgaccgtgcggaacgaagcccgcacgccaatggccgatgccgccgcttccggcactccggtgcgcatggccgccgcggtgtgcgtgttcatgatggtgaccagcagcacagccgcagacgtcatgatcgcgaagcccagtaaggcgagcggccggccaccgatacggtcatacatcttgcttgccaccgggttcaggatgcccatggcgatgccgctcggcatcatcaccagaccggacaccagtgcattaacgccaagatcattctgcaaatatgcccattgcgtacaggaacagctggcgggtggtgaaggtctcgatgaggaacgcggtgatcgggatcatgatgccgttggtaagcatgaatccggtggtcagccattgcacggtgctgctgggcacgtcgaactcgtgcatcaacgtgggcagggcggagatcatcagcgtttggttgaggatggccacaaacgagccgatcatcagggtgatgaccatggcggtggtgttggcgggggtggtgctgttggagttggcggggtggtggagccggcctcagcggtggccggcgaggaattgcgtgacgtcaattatcaagtctcgttttcttggctgagttgtctttcttggcttgcccatactatctgtgccttgactgcattcgaaaaccattgcaatgactagcaacacgctgagacgcggcgtattaattcaatcatttgacaaacttagttcgttcgttttattattggtcctgcaatccgtaatatcgcctactgcaaaggagcgcccaaatgggtctgtgggatgttgacaagatcgagtacgtcggccgcgccaaaggaccgaaggaagacttcgccttccattactacgatgccgacaaggtcgttgccggcaagaagatgaaggattggctgcgcttcggcgttgcttggtggcacaccttcaaccaggaactggttgatccgttcggcaccggcaccgcgcaccgcccgtactacaagtacaccgatccgatggaccaggctctggccaaggtcgactacgctttcgagctgttccagaagctgggcgtcgagtacttctgcttccacgatcgtgacatcgcccccgaaggcgacaccctgcgcgagaccaacgccaacctcgacaaggtcgttgacaagatcgacgagaatatgaagtccaccggtgtcaagctgctgtggaacacctcctccctgttcaccaacccgcgcttcgtgtccggcgccgccacttctccgttcgccgacatctacgcctacgccggtggccagctcaagaagagcttggagatcggcaagcgcctgggcgccgagaactacgtgttctggggtggccgcgaaggctacgagaacctgtggaacaccgagatgaagcgcgagaccgaccacatcgccaagttcttccacatgtgcgcagattacgccaaggaaatcggctttgaggcccagttcctgatcgagccgaagccgaaggagccgacgctgcaccagtacgacttcgatgccgccaccgccatcgagttcctgcgcaaccacgacctgaccgacgtcttcaagctgaacttggaaggcaaccacgccaacctggccggccacacctaccagcacgagatccgcgtggcccgcgagtccggcttcctcggttccctcgacgccaaccagggcgacaagctcatcggctgggatatggacgagttcccgaccgatctgtacgagaccgtcgccgtcatgtgggaagtcctgcaggccggctccatcggacctcacggtggtctgaacttcgacgccaagccgcgccgtacctccttctacgaggaggacctgttccgctcccacatcgccggcatggatgcctacgccgccggcctgctggttgccgacaagatgaaccaggacggcttcatccagaatcttcaggccgagcgctacagctcctacgactccggcatcggcaaggacatcgacgagggcaacgtcaccttggccgacctcgaagcctacagcctcgacaagccgcagtccgagctcatcgccgccaccaagtccgatcacctcgagtccgtcaaggccaccatcaacaactacatcattgatgccctggctgaggtcgagtgaccatcggtctgaccgattgaattcgctccatcgggcgtgtacacatcaattatgatgccagtgcgcccgatgggctgattcgatagtttcgccatgtgcggtgttgtgttatgcccgcatggcacctttccattccttctttctcctttctctccttccgctggcctgtccatcatgggcgtggacgccgcctgggtcaagaccatcaagggcctcgtcgtcatcgccgccgtcgc

SEQ ID NO: 359 - DNA, 21947 bp, Unknown
  R42_10m  MAG No. k141_23715
gggagctccctcgtcagagggagcttaaattcggtctggttataggcccatgggcttcttgggctttttgtcgctcatgagcatgaggaagctgcgggactgggcggtgatcatgaagcccgcctcatagctcagttccggcccattcgggttgtgcgtatccacgaccagctgccatttgcggccgtatcgctcatccggcagggtgaacataatcggctcgtaatgcgcgttgaagatcaggatgaagtcattgtcgaccatccggttgccgtaccagtctacctccggaatatccgaaccgttcagatagatcatcatggagaacgcatgcgtgttctgccagtcgtccatatccatgatcgaaccggtgtggtcgaaccattcgacctgcggaatcatgttcgaatcgtcgccgggctcacggcctgtgaagaagcgacggcggtgcaacaccggatgatccaaacgcagatgaatgagtttggaaacgaaggcgagcagttccttgcgtcccttgtcaagatgccagttggtccaggagatctcgttgtcctgacagtaggcgttgttgttgccctgctgggtgcgggccacttcgtcgccaccgcaaatcatcgggataccctggctgaacagcaacgtggcgaacatgttgcgcatctgacgctgacgcaagtcgttgacgtccggaatattggtcgggccttcaacgccgcaattccaagagcgattgttgctctcgccgtcgcgattgccctcgccattggcttcgttgtgcttttcgttgtagctgaccaggtcgttcattgtgaaaccgtcatgcgcggtgatgaagttcacggacgccaccggtcgacggccgttgacctgatacagatcggaactgcccatcaggcgcgaggcgaattcgggcagcgtggagggctgcgagcgccagaagtcgcgcacggtgtcgcggtagcggccattccattcggaccagctggacgggaagccgcccacctgatagccgccggagcccagatcccacggttcggcaatcagcttcacgcgcgagatgatcgggtcctgctccacgatgtcgaagaacgcggacagcttgtcgacctcctggaactggcgtgccagcgtggcggccagatcgaagcggaagccgtcgacgtgcatttcggtaacccagtagcgcagcgaatcggtaatcaactgcagcgcgtgcggcgagcgcataagcagcgagttgccggtaccggtggtgtcgaagtagtgctgctggtcgccttccaccagtcggtagtaggaggcgttgtcgatgcccttgaagctcagggtggggcccatatggttgccttcggcggtgtggttgtacaccacgtcgaggatgacctccatgccggcgtgatggtaggccttgaccatggacttgaattcgttgacctgctcgccgcgctctccggaggaggagtaggcgttgtgcggcgcgaagaagccgatggtgttgtagccccagtagttcgacaggcccttctcctgcaggaaggagtcgttgacgaactggtggatcggcatgagttcgatggcggtgacgccgagcttcttcaggtattcgatgacgctcggataggccaggccggcgtaggtgccgcggatgtccggcggcacgtccatgttgaggttggtcatgccgcgcacatgcgcctcgtagatcaccgaatcgtgatacgagatgtaggggtgctggtcgttgccccagtcgaaatacggattgatgacggccgacttcatggtgtgggcggccgagtcaaggtcgttcatcgccgaggtgtcgtccgggcttttgaaccagtaggagaacaggctttcgtcgccgtcgatgttgccttcgatggccttggcatacgggtcgagcagcagtttgttggggttgcatctgaggccgtgcatcgggtcatagggaccgtagacgcggtagccgtagcgttggccgggctggaggccggggatgtagttatgccatacgtatgagttctgttcggtcatttcgatgcgcgtttccgcatcgtgctcgtcgaacaggcatagctcgactttctgcgcaacctgtgagtacagcgcgaagttcacaccggcgccgtcatagctggcgcccagcggatacattgatccaggtctgatctgcatagttttcagtatcccactttcttgtgtcactgatgtgccggggagttgaacgtcaggagaacagcgacggcttgtctttgtcggagttcctggcgatgagtctgcgtaacgcctcatgctggatggcgatcatcgaattggatgaggtgatgcgcgtggcggcaaggtcgctccacggaatccacgcggattccacgtgctcgtccgcgtcgaaatggcgctgctcccgtctgaacgggcccaaatgcaacaccatgatgtgggccagttcgtcggtcatgccttcggacgagtagaaatcgcccacgaagtcaacacccatggtgtcacggtccggcaccacgccggtttcctcggccagttccctcagggccgcgtccatgatgtcctcgccctcgtccatgagaccggcgggaagcccgtaggcgaacatgtccgatccggcacggtattcgcgttcgatgaggtaacggtcggtggacatgtcgtgcacgagcatgaccacacagggggcgtgacgcagcacctggcggccgatctcgtgttccttgccctgcttgtcggtcagagcgatgcgcatgtcgtccacgtggaagatgcgcccggtataaacggtttcgctactgatcactttggcgggcacgtccatgtcgatgccgtccgaggaggcgttcagcttatggtcgagccgatgctccagttgttcctgcttgcttcccccaaacatgtcatctcctcggaaaaaacgttttcgccacgtcactatagcgccttaatctcgatgcgcggtaatggacagcgtccatggatcggtcgtgtcgtggaaccactcgacttcaggccttgctccggtcgcttgttcgatggcggctggcacgtcatcgatcgcgtagttgaaccacatggattcgatggcggcatgaggggtgttgatgaagcagggacgcacatggctctcccccgccattccatggccgagcatgatgccttgggccctcatacgggcttcataccgggcttgttcgatggcgtcggtcaccgggtggtgacgcaaatcgctggttacgtacacgtccgcaccggtggcacgcacctcgttgaacagggagtcaccggagccaggcagaatggccacatactgaacaaaagtgtccgaatcgccgcatacctggatgccgagcgcggtggtcatgccatgatcggacacttcgtcgaatacacgctgagcgaaatccttcagggcaacaggcttcggcaaacgacccacacgccccaagccgaccggatgagaggcgtttgcatcgtcaatcggcacgagtggtttctggtcgatgagtccgaagtagtcggccgccgcctgccccacgccgcgatacgcagcgtcggcattggtgtgccctacccacagcccgcagccgtgctggtagagcctgcggacgatgtcgccccggaaaccgagtccgctcgtctcgtgtacggaacggaagaacaacgggtgatgggtgatgagcaggtccgcgccggtggcgatggccttgtcaatgatggcggaggtcgggtcggcggcgaacacgatgcggtgcacgtcgtggctcagatcgccgacgatgagacccggctcatcccattcctcggcgtagcgcaatgggtacagggtctcgagaacgtcgatgacttgcttgagattcggcatatgtcccattgtagtgggctattgcggcaagggactcattctgcaattgcggacaagccatgctcgtgctcttcattgctcgactatcggctcgccttcgcctacacacaatccactggactgtttgctcaacggctcagcacccctcacccgaggggagctagaaattgtcagtgtgcggcgagctgccagtcggaaccgatgccgcacgatacgtccagcggcacggcaaggtcgacggcgtgttccatggcgttgcgtaccagttcggtgacctggtcgccttctcccggcgcgatttccactaccagttcatcgtgaatctgcagaatgatacggctcttgacgtgggcctctgccaaggtctgctcggcgcgaatcatcgcgatcttcatgatgtcggcggcagatccctgaatcggtgcgttgagtgccgcacgttcggcggcctcacgcgcaacacgattggtcgaatgcagggccgggaagtagcgacgccgtccgaaaatggtttccgtataccccttctctcgggcattggccaccagcgattcaaggtaatcgtgcaccttgccgaaggtatcgaaataccggtttttcaacgcttccgcttcacgtggcgcgatcttgagctgctgggcgagaccatacgtgctcagaccataggccaatccgtagctcatggcttttacgtggctgcgctggtcgccggtgatctggtcgaccggcagcttgtagaccatcgaggccacgtatttgtggaagtcggctccggagcggaacgcttcgatcagcgcctcatcaccggacagatcggccatgatgcgcagctcgacctgtgagtaatcgcagctcatcagggcctcgtacccctcccccggcacgaacacgccgcgaatctcacggccggcggcgttccgattggggatgttctgcaggttcgggtccacggagctcaatcgaccggtggcggcaacggtttgctcgaaagtggtgtggatgcgttcatctgatgtattggtggcatcgatcagcgtttggacgatctgcttgagcttgttgatctctcggtggcgcagcaacgccccgaggaaaccgttggcccgctcattgtccactgatttgacatacagatcctgcaatgcggccgcattcgtggtgtatgagccggacttggtgcgtttggtgggcttcaaacccatatcttcgaacagcaccttctgcaactgcttgggactttgcaggttgatttcggtgccggcatactcccaagccatttcctgcgcctgacgagcctcggcggcaaactggtcacgcatggaaacgagtcgaacgctatcgactttggctcctgtgtgctccatgccgtgcagcacgcgggaaacaggaagttcaatcgcgcgcatcagccagcattgttcacgctcgtcgataatcggcccgagcgtgacggcaaggctgcggataatggccaaatcgcgcagacgatgttcgttcggatcttcttcgacctgatcgtcgtcgaagtccaacgtgccttgcgaaggctgttcggtttcggtgaagtggatgtcgaggaagtgctcggccgcctgcttgaggctatcggcgtggaaatccggttgggccagatacccggcaagcttggtgtcgaacatcggcaggtccatgtcaagatctaccgcgcccagaagatgcagcaattctttatacccatgcacgatggtgcgggagtgttcgcttttcaggaaccgcgcaagctgtgctcgcagggtatcggtgattggaaggggcactatggccgctgatgttgccgtggcaacggcaatggcttgtgccgtggcacgacccggcctttcgtcgccccatgcggccacggtccaagcgtggccgaccgcgtcgccgcagacggtatgccgctgcgatccatcgccatagtcggaaaccgtgaaatcggcgatttcaccgggaacattgatctcggcgcgatgggccttgacccattcgtcgaactgctccgaagaggtgatgctcgtgggttccggcaggttcagatcgagactgttatcctgctcgtcctgttcattattcgtagactcgccggctccgtatgtgttggaaaccttggcaccggtattgaaggttttcagtacacgactcctggtacgcggtccgaattcaagctccttgaacagggcgtcgatttgtgccacgtccacggtgccgaatgtcagatcctcaatatcgacgccaagatcgacgtctcgtaccagtgcgttgactttgcgattgagcttgacctggtcgatattggccctcagcgattcgccttttttgccgccgatttcatcggcgtgctcgcaaatgccgtcgagggaaccgaattggttgatccacttggccgcaaagccatcgcctacaccgggcacaccgggaatattgtcggcggtttcgccgcggagcgccgccagatccggatattgtgcgggagtgactttgtatttgtcgatgatggactgcggcgtcatatgcttcaggtctttgaagtgatgacccgggtacaacacggtgacgttgtcatccaccagctggaaggcgtctcggtctccggacaataccagtgtgtggtagccggccttgtctcccatggtggcgagggtggcgatcacgtcgtcgccttcgaatcccggcttctcgatgtaggtgacgccgagggccgtgagcatgcgttgaatcaatggcagctgggtgagcagctcttcgggagccgcctcacgggtgcctttgtattgcggaagcatctcattgcggaatgtgccgcccttcacatcgaaggcgacgcccagatggtcggggttctccgcatcgatcacctgcgcgagcatggtggcaaaaccccagacggcgttggtggcctggccgctggaagtactgaagttgtcgaccggcagggcgaaaaatgcacggaaggccagcgagtggccgtccaccaccagcaatgtttcattggtgggtacggtcacgctggcctctcccatagtgtgtttgtattgctttacgactcagcacggtgatgccgataatcagcgttcgcccgaatcagaaggcttcggatcgccgtacttggcgatgatggcctgagccaggcgcttcttggggatgcgctggtccatggaggtcttctgaatccaacggaaggcaccctgctcggagaagtcagccttgtccatcagcagacccttggcgcggtcgacgagcttgcgctcctcaagcgtgtcttcggccttcttgagcttctcttcggtttccttgagctggtcggtggtttccttgagtttgcgttcgctgcgctccacgttgtccagcagatcgttgatctcggcgaaacggcccatggccacctcgagggtcggcagcaacttggattcctcgtacggcttggtgacgtatgccatggcgccggcaccggtggccttcttcaccagatcggtctgggagaatgcggtgagcatgacgacaggggcgatgttctcatcgcagataatgccggcagcggcgatgccgtccatacgcggcatcttgacatccatgcacaccacatcagggcgatacttgcgggtcagttccacggcttcctcgccgttggcggcctgaccaacgacctcataaccgttgtcttccagcatggcgaccagatccatgcggttcacggcttcatcctcggccacgacgacggtacgcggaccatcctcggccacggccttgcgctcagcaggttcgctttcatcggctacggccttgagttcttcgtcggtcagcacctcatcgacgttgatactcggttcttcggacttcttccttgcagccatgccaacctctttcttgaattacccaacaatggggttcgtaataatttcagcgaactcctagctaaagtgccctcggtgggactcgaacccacactgcgcagattttgaggctgcttcctctaccaattgggatacgagggcgtgcctaagcactctgaagagagtagcataccgattcgactcctgcgacacaagacacgcgccagtcctccattccccccggtaaaacaggcgaaacacgtcgatatcgtggacggcgtacccgtgtgttgcccgttcttctgcgtggtttcaccgcttacaatgggctgtagtttcgatgtatcgcttttgttaggagggcttatgagcaacgaaacttaccgtcagttcgatccctggcgcccctctccggtcaaggagatttcccgtagacagattgtggagacgcattatttcaatgtcgatcacgtctcctatgagtcgaatcagatcggttcgtttgaacgctactttgttcaggagaacaatggcgacactgtggctgtgctggccgtcaccgatgacggcatgattccgctggtcgagcagtatcgcatcgccaaccatcgttggacgttggagattccggcaggccacgccaacaacccgtccgaacgcccgaccgatgtggctaagcgcaagctggccgaagaggctggtttcgatgcctccaagcttacgcagttcacccgttttatgaacacgccgagctattccacccagcacaccgcaatcttcttcgccaccggacttaccccggcttcccgtcaggaaatcggcccggagactccgcgttccgacgtgcgtatggtgtcggtggacgatgcctatgagatggtggtcaatggcacgattgtggatgccaagaccatggtcgccattctgcgtctgaagagcggcacgctcgatcatctcaacgactagtcaccacgctcgatcatcgcggtgactacgtgccattgcaatcaccgcacaatcgcaacataacggataacgaaagccccccatccactttctggatgggggggctttcgcgtgctatgtgctagctgtcagcagctaccagcggcctgaaatcagtcgcaagcgccaacggtgtgcacgtagatggagtcggtgcggcccggctggtgatcgccctgagcagagctcaggatgacgatcttgtcgccgtcagcaaccttgccggcgtccttgaggatcttgtccgtgtagatcatgagatccttacgggacttgtcgtggtagtcctccttgagcaggaaggcttcggtgccccaggacagagccagccagtggtaggtgtgctcgttgctggtcaggccgtagatcggggcggccggacgctcacgggagacgcggtgcacggtggcgccggtctgggtgtaggcgacgatggccttggcgttgagcttgtcggccaggtccacggcggcggaggagacggcgccggtggaggacatgtcgaggttcttgagctccgggatgcggtcgaagccgtggtcggtggcgtagccggagatgcgcgacatggtggccacggtcacatccgggtacttgccgacggcggtctcgttggaggtcatggtggcgtcggagccgtcgaggacggcgttggcgcagtcggaggcctctgcacgggtcgggaccggggagttcaccatggagccgaggacttcggtggccacgatgaccggcttggcgtactggcgggccagctcgatgatgcgcttggtggccagcgggacctcttccagcgggcactcaacggccatgtcgccacgggcggccatgacaccgtcgaaggtcttgacgatctcttcgaggttctccagagcctgcggcttctcgatcttggcaacgatcgggatgcgacggccttcctcgtccatgatctcgtgggcgcggtcgatgtcggtggcgaaacgcacgaaggacatggcgatgatgtcggcaccggtgcggatggcccaacgcaggtcagcctcatccttctcggtcagggccggcagggagacggcgacgcccggcaggttgatgcccttgtgggaggacacaggaccggccacgacgaccttggtgtacacgttgttgccctcgaccttggtgacctcaagacgaaccttaccgtcatcgatcaggatcgggtcgcccgggtggcaatcgcccggcaggcccttgaaggtggtggaggtgatgtgctcgtcgccctcgacgtcatcagtggtgatgacgaattcctggccgagctgcagctgaaccttgtcttcgccatcggcgttcttcttgaaccaaccgcagcgaatcttcgggccctgcaaatcaacaagcgcggcaacgttgcgaccagtggcttcgctggccttgcgcacgttgttgtagaccttgaggtgatcctcgggggtgccgtgggagcggttcagacgagcaacgtccataccggcttcaacgagcttcaggaggttgtcgtaatcctcggtggaaggaccgatggtgtctacgatcttggctttacgcatgaatgcctgcctattcttgttcaatttggttcgaggcacgattgccccatttgccgaaacccagtctactagcgcgagccgactcatgacaagttttcttcacggtgtgttgtgagcgctcacattgttgtgttgactaggtttaagggttgtattctctaacggtttcaggccttctcggcgctttccatgctcttcatcttgatcacggaagccacggatgcgccgccaattgcgaccacaatcacagccagcgacagccatgtgggcacttccggcacccaatggatgccttcgccgccgttgatgaacggcaaggtattgccgtgcagggcctccatgatgagcttgacgccgatgaagcccagcaccacggacaggccggcaggcaggtagacgagcttgtcgagcagagcacccagcaggaagtacagctgctgcaggccgagcagggcgaacacgttggaggtgaacaccaggaacggatccttggtcaggccgaagatcgcgggaatcgagtcgaaggcaaacatgacgtcggtggtgccgatggtcaggaacacgatgagcatcggggtccagtaacgcacgccgttcttggtggtgcgcagcttctcgccgtcgtagtcgtcggtgatcttgatgatcttgcgcagattacggatgatgccgttttcgtgatattcctcgtcctcatcgccgccgagcaccagtttgacggcggtgtagatcaggaaggcgccgaacaggaagaacacccatgtgaagcgggtgatcagggccgcgccgatcagaatgaaaatgccacggaagatcaaagcaatggtgatgcccaccgaaagcacgtacttctgaatctgcttgggcaccgcgaagttcgacatgataatgacgaacacgaacagattgtcgatggacaacgagtattcggtgagccagccggaatagaactcgatggcgggcttggagccggcgaagaaccagatgcatccgccgaagatcagcgccatgaccacgaagaaggcgatatgctgcacgcattccttggtggagggcacatgcggtcggcgcccgatgacgaacaggtcgacgatgaagaacagcgcgagcaccacgaaggtgatgatttcaaatgcgagtggggtttctgccatgattccctacactaacccatgtatgtgacgggtcatcgccccgcctcggtcatctgccggagctccttcttgagatcacggatctcgtcgcgcagacgggccgcaagctcgaactggagttgttcggcggcggtgtgcatctgttcgctcagttggcgaatcaggtcggcgaggtcctgcgcgggcaggccggccttcaggatctcctcgtggcgtttgtctgcctcgttgggatcgagtaccggcacgcccaggtgtgtgttgccggccttgcccgcgttgcggtagccaccttcaagcaaggtctgggtgtccacatcctccttggcgagcatgtcgttgacatcgctgatcttcttgatcaggggcttgggatcgatgccgtgttcccggttgtaggcgatctgcttggcgcggcggcggtcggtctcgtcgatggcttgccgcatggcttcggtggtctcgtcggcgtacatgatcaccgtgccggacacgtttcgggccgcacggccgatggtctggatgagcgaacgataggagcgcaggaatccttccttgtcggcgtcaagaatcgccaccagcgatacttccggcaaatcgaggccctcacgcagcaggttgatgccgacaatcacatcgatcttgccttcgcgcaacatgcgcagcagttcgacgcggcgcaacgtatccacatcggaatgcaggtattcgaccttgatgccgcgttccagcagatagtcggtcaaatcctcggccatcttcttggtcagggtggtcaccagcgcacgctcgttcctggccacacgggccttgatctcggcgagcagatcgtcgatctgccccttgaccgggcgcacgtcgatcttcgggtccagcaggccggtcggacggatgatctgttcgaccaccccgtcggacaagcccaactcgtagtcgccgggcgtggcggacagatacacggtctggccgacgcgctgcaggaactccggccatttgagcggtcggttatccatcgcggaaggcagacggaagccgtgttcgaccagcgtgcgcttgcgggaggcatcgccctcgtacatggcaccgatctgcggcacggtgacgtgtgattcgtcaatgaccagcaggaagtcatcggggaagaagtcgagcagcgtgtgcggtggggtgccggcggcgcggccgtcgaagtggcgcgaatagttttcgacgcccgagcacacgcccacctgggtgagcatttccagatcgtaggtggtgcgcatgttgaggcgctgcgcttccagctccttgccttgcttacgcagttctgccaggcgttcgtcgagttcctcgcgaatggttttgagcgcgcgttccatgcgttcggggccggccacgtaatgggaggccgggaagatgtggatttcgttttcctcgtcgatctcgtcgccggtcagcgggtgcagcgtggagatgcggtcgatctcgtcgccgaagaattcgatgcgcacggccagttcctcgtagacggggatgatttcgaccgtatcgccgcgcacgcggaaggtgccgcgcgtgaaggcgatgtcgttgcgcttgtactgcatggccacgaaccggcgcagcaggtcgtcgcgattgatctgctggccttccttgagaaacagcatacgcccggcgtattcctcaggagtgcccaggccgtagatgcaggagacggtggccacgaccacgcagtcgcgtctggtcagcaggttggccgtggcctgatggcgcaaacgttccacatcgtcgttgatgttggagtctttctcgatataggtgtcggtctgcggtatgtaggcctccggctgatagtagtcgtagtaggaaacgaaatagctcaccgcgttgtcgggcatgagctcgcggaattcggcgcacagctgcgcggcgagcgtcttgttcggctcgatgatgagcgtgggacgttgcagccgttcgatcagccatgcggtggtggcggttttgccggtgccggtggcgcccatgagcaccacgtcgttctcgccgttctcgatgcgcgtggccagttcctcgatggccttcggctggtctccggatggttggtacggcgatttgaccacaaacggcttgtccacacgttcgatgttgaatcccatgcgctgtttccttccgattcacgctgtatcccgatgatatatcggaatatacgctaggcaactccaatacccgtcttcctcttggacgcgcagccaaccaccgctccgcgtaattgattgacacagatgagacattccaaatcccatgcccaatgttctcggagattccgccaatgctccatccgccatcttggcgggaacgtcagccaccgatacgtacagtccgtcttgccgcacttgtatggcgagcacatacccttgttcgcgatccgcgtgcttggcgatattggcaaacgtctcttccagcaacgaccgcgtcaactggatagtcttctcgtcaaaccgactcaggagatcgaagggatcggacacaaccacctcgcctcggaaaccaagcgttgcgagttcccgccggtgccgttcgatctcggcctcgaatcgacctgcaccgatcggaacgatggcttctccggagcgacgcgcatggcatcgcgggattcgcgcagtaccgacattgtgctttgcgagaaccgctatgacatcatgcgtctgatcgagcgcccgttgagccacttcgcgcaacagtggcaagtccatcgactctccttgcgaagggtgttccgacatgatcctgtcgatgctcatgatgagatatgagagatcattggtcgtcgcatcatgcaaccttgccgccaaatccaacgattcggccctgccacgcgcttccgactccctctccccctcacgatgatgccaattcagcagcagaccgattccaacgcacgccaacgccggcatgacggtccaaggcacaacggacaccaacgccccggcatcccaacccatcggcaacccatactgccatatcagctgcgccacgcgagatacggtcacagtcaccgccaacaccacgccgcaccatatgcgttgataggagaggacgattaatggctcggctatcaccacgctcaccgacatggacagatccaccggcaaggggaacaccacgcaccatgagatcgccaacgcgatattgccgccgaacgggaatgccacgcagagcaacgacaggatgacgaacaacagacccacccacagggcccacgcatcccaaaccggattgatacacgattcgatgaccgtatcagcggctatgcacaaggcgcaggctagcgccgcgatcttctcgccatgccaagacttcccgaaatcgcggaagcgacgtctaagaaaacggctgctgtcacagaacatggtatcgctcacagtaatcaaggagttcgccgcgcctcgtcaccccgaccttgcgcatggctcgtttcacatagctgtacacagtttcgacaccgattcccaagcggcgcgcaatttcaatggtcggtacatgatgtgcatagagacgcaacaccgccagctctcgatcggagaagagcctggcaccatccgcttccggctgtgcggcatccaccgtatgcaatgtctcttcaaggctatgcaaaccccaaccatgagggtatgttcccccgtcaaacaccgatttgaccgcctcgcgtatggtcgctgcgaaatctcttttcgaaatcaacgcttgggctccgcaacacgcgatatcctcaccataggttgccaggtcatacgaagtgactacgatgacgccaacctgcacgttccgctgtcgaatacgttccgtcagccgcactccgttcagcccgtccatcatgagatcgcaaataaggatgtccggcttccgcggatcgaacagacaacgttccaaggcaagactgggattatccgtaacccatagcatatgcgcctcgggaatcgtcctgccaataagcaaagccatcatctccgcagagcaacgatcgttgtccaccaaggcaagccgaatcaggcgcccgttcttcataagtaccccctccccaaatcgcctccgtcaaacgaaatcgtaacactgtgacgattcccgtcacacagacttcgttcgctcctcattggcgtcttaccgtgttatatgcggcaaaacagccgcgcaataatgtgcggcgagcgaacttcctatcgtccgccgcacaaacacattgttaccgggaataaggtgtatcatgcactggacttataaaatcgccagtatattggccgtggctctcatcactctcgcagcaggattctatgcgcagaataacgaagaaacctatccctccggccctagctacgatattggaatttccgacgcgcacgggcagactctatcgacattgaccggtctcgcagcgacccatcatgtcggactcgcgagagtctcctatgagccggacggtcacggtaccaacagacgcgtaatttctattttcggcgcattagacggcaacggcatgcatgcgaattcgccatacccggattatgggttcgggccgcgcacacgtgtgcaacgcggagacagattcaccgacccattgggaagatggcttctctatggatcaccacgggataccgcttcagtagccaaatccatacggcgccaaggattcgaacttaacagagcaacccccatcggcatcacacaaatcaccaaacaattcttctccaattccatcgcccaagtcatattcgccggacttgctgtagtatttgtgtccggcgcgctttccgtgtcgacagcttcacgcgtttgcgcgatacaagccttgcatggcatgagaacaaccggcattattatgaggcaattcctgcggcatgcgttctttttcatcatctgcgtctgcatcggatggatgacttggatttccattggtgcgatcttctggcctttcgcttctcccttaggattcgccggtcaggtattcctctccatcatcatcgccacaacgtgcatggcattggttgccttgtcattgtcgattgctctagtaagggttctggtgccgaacgcactcaaattaatccaaggaaagcgccctttacgttttctcatggcttccggctgcatcatggcaatcatcgttctcgctctcagctctgccagtttgaacgttacgaacttcaaatggcggcaatcccaaacactgaaaacaacattggagcatcaattgtcatccaacgacggattccaattgcaactgtggtatagcagcgatcaaaaccgagctcgttccatgccctcatggaacgacttcgtcgaacaaacttcccaatcagaacatacgcgattcgcctcattccgggtaggatgcacgtgggtggatagctcgcaagacccacagccctgcatcctcatggattcccgtacggcaaggctccatcatcttatacgaaacaacacgacacttgcacgaatcagtgtgattatgcccgagaatgaacaatggaacagcgaatccattacgaacaatgtgcttcgcgcatactcattcgagcaaagtttggcggcagaagagggaaagagtctgcccgccatcaatcgcacgagcatctccattgaatccagaccaagagatgctgtcttatcggcatttgacaccccttccaacaccgatggcctttcctctgttcctgttgttgtcattgacccgtcactgctctctggcgataccactacatcgatggtgtccaccggcggcatgaccttcgattacagctcccgccatcagctgctcgaaatcctacgggaaaagggcgtggactctttggtggcttcggtcgtcaatcggcacgacgagatacaaactcgtttggcacgaacaactcaggaaatgaactatttttccatcacagcttgcatatccataacatgtctgctgggcggcgcaatcatggtggctttgacactatgcacactccgacgtcaaattatgttcgtggaatatatgcatggagcgccgtcatatctccgttttcaatcgatactgttcctagcagcggcgttatgcagtgcatctcttccgatccagttgctcataggaggttacaacgccgtttccacgacctcggtttccttactattcatcgtcgtttcgctggcaaccacagtgctttacgattcgcggctgcgcgccgacagtatcaaacatccctgatcgccatccacaaacctgtatcagcaaccgcttaccacgtaaggaacatcaagcatgagcgccttattgatcacgcataatctgacatatcgaatcgacgaccgcaccttatgggaaggactgaacctgacattcagtcccggtgacatggttgccctgactggagaaagcggatgcggcaaaaccactttgttgaatgtcctaggtcttttggaagagccaagttcaggaacaattacctatgatgggcaaacaattgcctccagaaagggccgacggctcatgcaccgcaacgtcatgggattcatgttccagaattacgccctggtggagcaatggacggtgaacagaaatctgattctggctctgcgcagcgtcggaataccatcggcagatagaagtcggctcatcagacgcgcattgcgggccgtgaatctgacgggctacggcaatagacctatctacacactcagtggaggcgaacaacaacgagtcgcaatcgcgaggcttctcatccgtcaatcgctgcgcgtcatactggcggacgagccaacagcggccctcgatgccgacaaccgcgccatggtcatgcgtcacctgcgtgatttcgccgacaacggagcgatcgtgatctacacgacgcacaacgaggagaccgcggccctcgccgaccgcatcatcgcattatgattccgccagccactgttcgtacagcgcatcgacggcttcgagcattcgacccatcggctgcgtggaatcgatcaccgcgtcggctatgacacggcgttgttccaggctggactggtggcgaatgcgcgcaagcgcatcatctcgcgtcatgccgcgggtcgacaccattctgtcgacccgtacttgttcgggcgcttcgacggtgacgatatggtcgaatcgcatgggcatggcgtccaggacttccgccaacagcggaacatcatgcacgaccacggcatccggattgtccgcgaccgcctgccgctcccgcgacagcgcaagatcatagatcaacggatgctcgatatcgtccagtttcctccgcatccgttccgagtcgggcccggcgaacacgtgctcggcgatccatcgccggttgagccgcccctgatcggtcagcgcgtcggggccgaaacattccgctatacgacgaagaccgacgccgcccggttccaccactcggcgcgcgagctcgtcatagtcgataagcgccgcgccgagctcccgcagtcttgtggacaccgtgcttttgcccgccgcaataccaccggtcaatcctattcgaatcatgctcccccatcatgccatgtttcgaggttcatgcacacaacggcaaaacccggcccgccgaagcgagaccgggtattgactatacgtcaggcgtcagtcgcccgatggcaaactcacttgccgagcagctggtcgcgcagggcggcgagctgatcggagtcggcgagggtaccggtagccggagcggcggaagagtagttggaggtctcctcgaccggcttctcttccttcgggccctggccgtcggcggctgcggattcggcagcgttctccagctccttggccacgaactccttgtgctcctcccacagctcgtgggcggcggcgtactgggactcccactcctcgcgctgcttctcgtaaccggcgatccactcgttggtgttcgggtcgaagccttcggggtacttgtagttgccctgctcgtcgtactcggccggcatgccgtagatggccggatcgaagtcctcggaagccgggtcgacggagtcgttggcctgcttgagggacagggagatgcggcgacgatcgaggtcgacgtcgatcaccttgacgaacacggcctcgcccggcttgaccacggtctccgggttctcgacgtgacggttggcgagctcggagatgtgcaccaggccctcgatgccgtcctcgacggagatgaagacaccgaactggacgatcttggtgaccttgcccttgacgatctggccgggaacgtgggtgcgagcgaagcgctgccacggatcctcctgagtcgccttcagggacagggagatacgctcacggtcgagatcgacgtcgagcacctcgacggtgaccttgtcgccgaccttgacgacctcagacgggtggtcgatgtgcttccaagacagctcggaaacgtggatcaggccgtcaacaccgcccagatcgacgaaagcgccgaagttgacgatggaggacaccacgccctcacgaatctggcccttcttgagctgggacaggaaggtctcgcggacctcggactgggtctcctcgaggtactggcggcgggacaggaccacgttgttgcggttcttgtcgagctcaaggatcttggccttgatcttctggccgatgtacggggagaggtcgcggacgcgacgcatctcgacgagggaggcaggcaggaagccacgcagaccgatgtcgacgatgaggccgcccttgacggcttcgatgacggtgccctcgacgacgccgtcagcttccttgatcttttcgatgtcgccccaggcgcgctcgtactgggcacgcttcttggacagaatcagacggccttccttgtcttccttggtgacgacaagggcctcgatggtgtcgccgacctcgacgacttcgtcaggatcaacgtccttcttgatggaaagctcgcgggaggggatgacaccctcggtcttgtagccgatgtccaggaggacttcgtcgtgatcgatcttgacgacggtgccctcaaccagatcaccatcatcgaagttcttgatggtggaatcgactgccttgatgaagtcctcttcggtgccgatgtcgttgatggcaaccttggtgacttcagtgttgttctctgccatgtaaatatatggtttctaatagtggatggataatttctcgatattcagttatacgcacacccttacaggcatacggatattcacaatacaagcaactctgcccaaatttcctaggaaactctaggcgtgtcgttcggccatttccacgacgttggccaggagcatggctcgggtcatggggcccacgcctccggggttgggggtgtaggcggaggccttgtcgtagcaggccttgtccacgtcgcccttgatgcggtagcgaccggcttcttcgtcgtagacgcggctgacgcccacgtcgaccagcacggcgccgtccttgatcttgtcgggcgtcacgaatccggccgaacccattgcggcgacgatcacgtcggcgcggcgcatgtggtcggccacatcccgggtaccggtgtggcacagggtgacggtggcgttgacggcgttgcgcgtgagcatcaggccaatcgtgcggccaatggtgatgccgcggccaagcacgcacacttccttgccgttcagatcaatgtcataggcgtcgagcagctcgagcaccccgcgcggagtgcaaggcagcggtgtcgaaatgtcgccgcgcacatgcagcaccagttcgccgaggttgtacgggtgcatgccgtcggcatccttggccgggtcgatcatgtcgatgatcgcgttctcgttgatgcccttgggcaacggcaactggacgatgaacccggtgcaggccggatcttcgttgagttcgcgtacggcagcggcgatgtcgtcgaagctggcgtccgccggcagttccttcttgactgaggtaatgcccacttcctggcaatcggcgtgcttgccggccacgtacttcatcgacccgggatccgaccccaccagcaacgtgccaagccccggctggatgtcccgggccttgagcctgctcacccgttcggcaaggtcggtcttgatcccggccgcgattcgtttgccgtcgattattgtggacatcaacgccctcccctgtggtttcgatgctttctatcgaaacgataggctatcgttggaacaagtcaggattatatatcgttcgctctcacgaagaaggcgtgccatggggactcaaatcacacgacttacgcgactcgccgcagccggcctgagcgccgtcctgttgttcgcgaccgccgcatgcgcagccacctcccccgctgaaaccgagccggacaacacgaccagtgttcccgcaccgaccgggccgatcaatgtggtcgcctccctcaatcaatggggctcgctggccgccgagctgggcggcgatgatgtggaagtcacgtccatcgtgaactccaccaatgtggatgcccacgatttcgagccaaagacctcggacgtcgccaagctgtccaaggca

SEQ ID NO: 360 - DNA, 24289 bp, Unknown
  R42_10m  MAG No. k141_24099
tcgatgatcacatccacggaaacgaatgagccggtgttcagggtgacttcggcgtgacgcagcggctggccgagcagattggtgactgcgccgtgcagcaggtgctcctgcgtcaggtcgatgctgatgatgcgcagtcgatcgatatcgatgctcagcagtgtgcctcgtttgcctttgccgccgctgggtgcctgaccggtctcgcgcagcaatccttcctccagcatccgaccgaccacatcggaaacggccacgcggctcaatccggtgcgtcggccgagctcggcgcgcgaatactggttggtggggaacaacaacctgaagataagttggcggttcttgcggcgcacatcggcgggggaagccttggccgcatggtcgtcggtcgttgtgttgagaccgagatatgacatgtttcctcctacctgatggtgagcgagtggacggcgattgttgttccatacacagcttagacggtgaagcgcaatttcgtcgttgaaactgttatgaaacttcactaataaattccagtgtacctgtgtgaagcgtcaggaaacaccgtgagtgttcatgaggtccaaaattgttactatcattaacaaatagcgaatcaccaatcggcgctacgccgaacggtggttggaacgccgcgcggcacccggacgtgacaaggatgttgccattatccgcaagacgggcggcggtacagcgactcgcatcgggcgggccgcacggaactggaggaaaccgatgccggaaatcatcattgtcaagaacgaagccgaggccggcgagatctacggccgttgcgtggcggacctgatcaaagcaaagccggacgccgtgctgggcctggccactggctccagcccgctggccgcctatcaggcgctcgccaagatcgtcaaggacgaggccattgacgtttcgggcgtgcgtggtttcgcgcttgacgaatacatcgggctgccgctgacccatcccgagtcctatcatgcgaccatccatcgcaccgtggtcgaaccgcttggcctggacccggccaaggtccatgtgcccggcgacgtactcaacggcactccgctcgaagacggcgacaaagtcgcgctggccggcccggcctatgatcgtgccatcgaagccgctggcggcatcgacgtgcagatcctcggcatcggcaccgacggccacgtcggcttcaacgagcccggttcctcgttggcctccggcactcgcgtcaagaccttggccgaacagacccgcatcgacaacgcgcgcttcttcgacaacgacatcaaccaagtgcccacccactgcatcacgcagggtattggcacgatcatgaaggcccgtcacctcgtgctgctggcgttcggtgccggcaaggccgaagccatcgaggagacggtggaaggcggcttgtccgcgttctgcccggcttccgcgctgcagatgcacccgcacgccacgattatcgtggatgaggaggccgcctctcgtctgcgccacaaggactactatcgctacgcctacacccacaagccggcctggcagggcatctgagttatcgtgtgctggcttccctctttgtgtgaggggagctgtcgaatgtaatgagactgagggtggttatcggcggcggcatatgtgtattgcttcccgattggaccaccctcagtctcgtttcgcgagccagctcccgttggcgggagcgcatgagcggtaaggagaacaacatgtctgataggaacgagatagtctcgcgcgtgaccgcggcactggagggcaagccggctccggtggcgattcgcaacgcgcgcaaggtggatgcgtgcggcgaacggcgcggatattgggtcgtctccgatgccgccggcgtcatcgtggcggccggcacgggggaggaggccttcgagcactactgccgcacggtgaggctcgacccggccgatcgcaacgcggtcatcgacgccgaaggccgtattctgacccccggctacgtggacatccacgcgcacggcgcatgggtgaagagcttcgacgacgggtcggatggcatcgatgtggcgcgggccggccacgccgtgcacggcaccacgcgccaggtgctctcgctgatcaccaatcccgtggacgtgatctgccggaacatccgcaccgtccgcgccaagatggagtccggccgccccgacatcctaggctgtcatctggaaggtccgttcctggctctggcccgcaagggcgcacatgacccggaatgtctcaaggatccggtacccgacatcgtcgacgacatgcttgaggcttcaggcgcggcgaacggcaagattggctgcatccgccagatcaccatcgcccccgaactaccccacggcatctccgccatccgccagttcgccgctgccggcgtggtgccggccgtgggccactgcgacgccgactacgagaccgccaaagccggcttcgacgcgggcgcgggcatcatgacccacatgttcaacgcgatgaacggcctgcaccaccgcgagcccggtccgattccggccgcggtggaggatccgcgcgtcaccatcgagctcatcaacgacggatttcacgtgcaggatccgatggtgagcctctccttccggttcgcgcctcatcgtacggccttcgtaaccgatgcaatggccgcgaccgactgcccggacggtgcctacaagttgggtgcactggacgtgaacgtggtcgacgggcatgcgcgtttggtttccaacggcgccatcgccggctccactctgctgctggaggtcgccgtgcgccgtgcggtgtgcgaactgggcttgagcccggtggacgcggtcgaggccgccacattgacgccggccaaggcgttcggcttcgaccggccgaacccggtcaccggggtgcctatcggcctcatcgcccccggcttcgccgccgatttcaaccttgccgatccgaccgattggacggtcgaacaggtgtggtgcgcgggccgcaagctcaagtagcagtaggccgaccggttgacgaatggaaagcattcgtctacaagcatgttcaaatggtgacatgatagcatgttcatctcaccatttgaacgttattcacgtcgtaatacaagaatccgtaatactgctcgataccgcataaaaccggccatggtcgccacaagcgaaacataagtcgatggctgtggaaacgcaggagtaacacatcctcaccatagtcaggcggtaatccacgcccgcagtgatggcgtggaaacaagttatgagagaggattcctgttgaattccaagaagattctggccgccgccgtctccgtggccgccatcgcatccctgaccgcctgcggcggtgtgaaggatgacaccaccgcaggcgccgattccggcaacgccatcaccatcggcaccaccgataagatcaccagcctggaccccgccggctcctacgacaacggctcctacgccgtacagatccaggtgttcccgttcctgtacgcccaggactacaacacctccgagctgagcccggacatcgccgccgatgacggtacctggaacgatgacggtaccgaattcaccgtcaagctcaaggacggcctgaagtttgccaacggcaacgacctgaccgcttccgacgtcaagttctcctacgaccgcatcaagaagatcaacgacccgaacggcccgagctccctgctcgccaacgtcgaatccgtgaccgctaaggacgacaccaccgtggtgttcaaggattccgtgcctttcgacgtgactttgaagcaggtcatgtccagccccgccggcccgatcgtcgatgaggataccttcgacgccgacaagctcaccgacgccgacaccatcgtctccaagaaggccttcgccggcccgtacacgctgaccgccttcaagatcaacgagtccgccgcctacgctaagaacgactcctacaagggcctgaccccggccaagaactccgccgtgcaggtcaagtacttcgccgacgcctccaacctgaagatggccgtccagcagggccaggtcgacgtggcctaccgctccctgagcccgaccgacatcgaggacctctccaaggactccaaggtcaaggtcgtcaagggcccgggcggtgaggagcgcttcatcgccttcaacttcaagattcagccctacggtgaatcccagcccgacgccgacgctaacaaggccaaggccgtgcgccaggccgtcgccaacctcatcgaccgcgaagagctctccaccaaggtctacaagggcacctacaccccgatgtactccttcatcccggacggcctggccggtcacgatgacacgctgaagtccgcctacggcgacggcaacggcaagccgagcaccgagaaggccaagaaggtcctcgccgatgccggcgtcaccaccccggtcgacctcaagctccagtacaacagcgaccactatggctccgcctccgccgacgagtacgcggccttgaagtcccagcttgaggaaggcggcctgttcaaggtcgacctgcagtccaccgaatggacccagtactccaaggaccgcgtggtcaccgacgattccgacggtgtgtacccggtctaccagctcggctggttcccggactactccgacccggacaactacctgtccccgttcttccgcgacggcaacttcgtgaacaacggctactccaacaaggaagtcaacgacctgatcgtcaagcaggccggcgagaaggatgcctccgcccgtgaggacatcctcaagcaggtccagaaactcgagaccgaagacctctccaccatcccgctgctgcagggtgcccaggtcgccgtcaccggcacctccgtgaagggtgtcaccctcgacgcttccttccgcttccgctacgcctccgtcaccaagggctgatccagcatgagctcccctctttgaggggggggagctgtctggcgacggcagactgaggggagcccaactcgtatgactcccctcagtcggcttcgccgccagctcccctcggagaggggagcctttattgctttatataccgattaccaacaccaaggagcatcgcgtgtcagacagcgccacagcgacctccagcaccactccggcgaaagccaagacgaagaagaaccgactgtcaggtagtttcttccgcttcgtgctgacgaggttcctcctcattatccccaccgttttcattctggtcaccatcgtgttcttcgtgatgcgcgccaccggcgacccgatttccgccgccctgggcggccgcctgacacccgccgaactccagcagcgcatccacgcggccggctatgaccgcccgctgatcgtgcaatacgtcgactatcttggcggcctgctgcacggcgacctcggcacgacgctgaccgataaccagccggtgatcagcatccttacgcactacggcgccgccacattcgaactggccttcctcgccctgatcgtggcgctgatcgtcggcatcggcctgggccgactcgccgcccgcaaacgcgaccgtgccgccgacgccggcatccgcatcttcgccatcctgtgctacgccaccccggtgttcttcctcggcctcgtgctgaagctcatcttcgccgtctggctcaacatcctgccagcctccggccgctccgacctgaactccgaaatgcagttcacccgtctggtatcgccgaccggcttctacatcatcgacgccatccagctcggcgacatgaacgtgctcgtcgacgtgctgcgccacgccgtgctgccggccgtcgccctaggcctgctgaccgccggcgtgttcatccgtctggtgcgcaccaacgtcatctccacctacaattccggctacgtcgaggccgcccgctcgcgcggcgtctccgaaaagcgcctgctcaacaagcacgcctggcggccggccctgatcccgatcatcaccgtcatgggcatgcagatcgccctgatgctcgccggtgcggtcctgaccgaaaccaccttcgaatggaagggcctgggcttcatgctgtcccagtacctgaaggcccgtgacttcgtggccgtgcagggcatcgtgatccttatcgccatcatcgtggccgtcgtcaacttcctcgtcgacgtcatcgccgcgcttatcgacccgagagtgaggtactgagatgaccaccgcatcctccgacaagatcaccgtccccggtgacgaccgcctcaccaagctcaacgtcagcaccaagacgccgttctggaccaagattccaatcatcaaggaactgcgcgtggcggtcggctggcagaagggcatgctgatcaccggtctcgcgatcaccgcgttcttcctgctcgtggccctcttcgccccgctgatcgccccctacggccacgcccagatcaaggccgccgacggcacgtccttcccggcgcaggccgcgccctccgccgaacacatctggggcaccaccgccgccggattcgatgtgttctcccgtgtggtgtggggtgcccgcaccgccgtcatcgccatcgtcgtggccgtgctgctctccatcttcgccggcgtgctgcttggtctggtgtccggctactacggtggctgggtggaccgcatcctggtgatgatcgccgacgccgtctactccttcccctcgctgctgctcgccattctgatggccatcatgatctcccacggccagtccggcctgtggagcggcatcctggcctccggcatctccatcaccgtggtgtacatcccgcagtatttccgcacaattcgcgccgaagtgatccgcatcaaggaatccgcgtatgtcgagtccgcgcgcgtggtcggcgcctccacctggcgcatcatgaccaagcacctgttcaagaactccacccgcacgctgccggtgatcctgacgctgaactcgtccgaagccatcctgaccctcgccggcctgggcttcctcggcttcggcatcgagccgaccgccgccgccgaatggggctacgacctgaaccgttcggtttccgacgtgaccgccggcatctggtggaccgccgtgttcccgggcatcgccatcgtgcttatcgtgctcggcatcacgctcgtgggcgaatcgctcaacgatctggccgacccgcgtctgcgcgcccgcaagtccgccggcgaagtggtcggatcgatcgaagacacgtccgtcgacccaaacgagaagccgtccgcacgcaacgaggtgatcgccgaactcgacgcgaacgtcgacccgccggccaccgtcaccgaccatgacccgaccatcgtcgcctccgaatggaccggcgaaggcaagccggaaggcaaggagtgagagatgagcgaagacaacaagaatctcgccgatatcaaggacctgtccgtctccttcatgaccgacgccggttccatcaaggccgtcgaggacgtgaacttcaccattccgcgcaagaccgtggtcggcgtggtcggcgaatccggttccggcaagtccgtgaccgcgcgctccatcatcaagctgctgccggagacggccaccacctccggtgccgtctacctgtccaagcgtgatggctccgattcgctggacgtgctctccctgagcggcgaacagctgcgcgaagtgcgtggttccgaggccgcgatggtgttccaggagcccaattcggtgctgaacccggtgtacaccatcggctggcagattgaagagggcctgcgcgcccacggcatgaaggacaagaaggaactgcgcgccaaggccatcgacatcctgaagaaggtcggcatcccggatgccgaaacccgcgtggactactacccgcaccagttctccggcggccagaagcagcgcatcgtcatcgccatggcgttggtgctgaaccccggcctgattctggccgacgagcccaccaccgccctcgacgtgaccgtgcaggccgaaattctcgacctgctgcgcctcgcccgtgacgagttcgacgcctccgtgctcatcatcacccacaacatgggcgtgatcgcggacatcgccgaccaggtggtcgtcatgtaccgcggccacgtggtcgagcagggcgacgtggagcagatcttctaccatccgaaggacgactacaccaagcgactgctgggtgccgtgccgcgcatcggtcagaagctggtcgtgcgcgaccgcgagggcaagccgatcgagcgcaaggccgattggcgcgaacagccgatcgccgttgaggccaagaacctgaccatcacgtacccgggccatctcatgcagcccgacttcaaggccgtggacggcgcgaacttcaccatccaccgctccgaagtgctgggcctggtgggcgagtccggttccggcaagtccaccaccggccgtgccatcgccggcctgcagaaggtgtccggcggctccctgaacgtgcttggcatcgagatgaacggcgtcaaggagcgtgacttcaagcccaagcgcgcggacattggtttcgtgttccaggatccgggctcctcgttcaacccgctgatgaccatcgcggagaatgtggccgagccgctgctcgtgcaccacaagtacggttccgtggccgaggccaagaactatgtgggcgacctgctggagatggtccagctgccgcgcgcctacatgaaccgtttcccgcatgagctgtccggcggccagcgccagagggcgtctttggcgcgtggtttggcgttgaagccgtcgctgctgatcgccgatgagccgacttctgcattggacgtgtcggtgcaggccaaggtgttggagctgttcaagcgactgcaggcggaaatcggcttcgcgtgcctgttcatcacccatgatttggcggtggtcgatatgctcgccgaccgcatcatggtgatgcataagggccagatcgtggagcacggcgatgccgaccagattatgcagcacccggagaacccgtacaccaagaagctgctggcctccctgcccgtgcccgacccgcgcgaacagcagcagcaccgcgcccacctccacgagctcctagcccaagaggcgtaatcgcatagcattggagctccctcgtcagagggagctaactttatatccgctagtactgctgcccatcgaactggaacagggcgtgggcgtcgccgtgctttttgttctcgatgtaagtatggaacagctccagccgctcgctcgtgctggccgccaggggagtgggcaggtcatccagatcgaaccagccgacgctgaggctttcctcgtcgcccacgaacggctcggcattgccgccgggcttcagggcgcacaggaacgaatgatccatgtacatggtgttgtcgccattggcgtaggtcaacaccttgtttgacgaggtgacggccaccaaatcggtgacgatggcatcgatgcccgtctcctccttgatttcgcgcatcaccgtgtccgccggctgttcgcccggctcgttgatgccgtagaccatcgcccattcgcccgtgtccgaacgacggcccaacagcagttgaccatgttcgttcagtacacaaccggtcacgccattgagccatagcagatcatggccgatcttcttacgcaattccaacacaaattccggagtaggcacattgcctccttagtagaaaaaggagctccctctgatgagggagcttaagggttacttggcttgggcagcctgcttaatatggtgcgcttcgcgcatgatttcattttcctcgcgcttgtcagcgttcggcgtcgcctacaatcagtccaccggactgattgctttacggctccgcatccacgcttcgacgtcgtcgatctgcttcgggatgccggcggaaatccattcggggccgttctcggtcatgagcacgtcgtcctcgatacggatgccgatgccgcggtattccggcggaatcagcagatcatcctcgcggaagtacagaccgggctcgatggtgaagatcatgccgggcgtgatcttcgcgccctgataggactcatagcgggcctgcgcgcaatcatgcacatcaagacctaggtggtgggccacgccgcaggcgagccaacggcggtgctgctggccttgcggggacagtgactcctcgacgctcaccggcagcagaccccaatcgtgcagacgctcggcgatcacacgcatgcaggcgtggtggatgtcggaataggtggcacccggcttggcggcttcgaaaccggcctgctgcgagtccagcacggcctggtacagacgcttctggaagtcggtgaacttgccgttggtcgggaaggtgcgggtgatgtcggccgtgtacagggaatcgacctcaacgccggcatccaccagcagcatgtcgccggtcttcaccacaccggtattgcgcatccagtgcagaatcggggcgtgggggccggaggccacgatggagtcgtaaccgatggcgttgcccagctcacgggacacggcgttgaacgcgccttcgaggatacgctcggaacgcggcttgtcgagcgcggccggcagtgcggagagcagacggtcgaagccgtgcttggtggcgtccacggccttgcgcatctcgttgatttcgtagccgtctttgaccatgcgtgcctcggcggcgaactcgtgcagcttgtcgtcggatgcggagttcttgtccggatcggcgaaaccgttggcctcgcggatggactcgaccatcgaggtgatttcgggatcggtctcgctgaccacgcgcacacgcacggcgccggcctcggcacccacgtccttggacagggcgtcggccagctgggcgatgtcgtgggtctcgatgccggtcatcgcctgcatctccttgaggccagcacgcgggccaacccagtattcgccgtagtgggcggacatgaagaagtcctcggtggagttgtcggcgcgaggtgccacgaacagttccggagtgtgcgtcttgccggcggcggcttcgggggagtcggggtcgaccgggttcaggaccagcacggcgccggcctcgtaatcggaacccagaccggtgtagtaggcgaacgtggtgtccgggcggaacatgtaatcgcaatcattgttgcgcaccttcggctggccggccggaatgaccagacgctcgcccgggaaggctttgcccagcgcctcaaggcgggctggcgtgaacttggaggattcgagaggcttgatctccggatcatcgtcggcccagccggacttcataaactccttgaatgcagccgactgcgggcgcagcgagcggttgttcacacggtcgctcatcgactggttcgcgcccggcgccgtagcgcgctcctcggcctcatattccttgtccttggcggtgatcacttcacccattgccactctcctgtatgtagttgttgtcgaatcatcgattcccacctcatactagtcggctttatgcgatgtgccacgattgacggctgacggtaaaaccaagtacggaatttggacggtcttccggacatgcccatatggcgagtgcatcgggctggaatgcgggcccgtttattgttctcggtagggaaggaggggcatgggctggagcttgccgattgatattggcatattttgcgggctgaatccatgtgaacccatgcgatgaaggttcatcgcatcacgggacccgctgctctgcggatgcctccatctggggcactctggctttgagcagttttacccgcagcggagtgcgttcgatgacgtcggcgtatgtgaaatggacgatttcggtggcaccggctcgtttcagtccctcgtcgcgtgctcgttccttggccaccacctcctgaatgctgcggttatcggtcatggctgggtccacgtatttttgtgtgccgtcgtattcggccactatcacgcgcccgtcatcgagcttccatacgaaatcaacgcggtgctcggtattcgtctgcgggtcggtcaccgttacctgaatacgcggcgtgaggaagcgatcctcgatgatggtgcctcgcgcgagggattctccaccattctcgctcctttcgtttgcatagcgcagcaggcggaatactcgggcataatcgattctccattgaacgcagtcggcggctatctcttccttggttattcccttggcaagggccgagtcaaagatcggcaacgcaaaccgaaaatcaaggtctatagcggcctcgaccaaggttctagccggtgatatcagggataggccggaggcctcgtaatgtgtcttcggattgttcatatcgggcatatagacatgtcgtaagcgctgatggcattgacgagatccatgatcggaagtcacgatggttatgcagccatcatgcaaatgccattgatgttcgaatccataagcacttactgccaccaagccgccaaaaacccactgaggatgctcttgcgcaagagcgcgggccatatgcaacgttcgctccggcggcgtcaaaccatcccagtatgcggtatttgcataaagactgggaatgccgtcatacactttcaacaactcgccactctgggcacggcggcgtagagcggtctgttccgcttcatttcttgaatagacgcatctcagctcattctgcgcggctgatatgagcgaggccactgctttgtgtgtcttcatgacgtcgagcgtagccggaacgaagcagcgtaagtatgaatttcagccattgtggttctagcctcggagcttggctgtcttggagtgagatattcccgataatttcaaggtattaggccgctaattcggaatagtggataacatacaaaacttatccaccatcagtaatgtcattcgaacaacgtgctttggggattcgaacaagatatcatcggcgaaggcggatgtagctggtagagggcggcgaattgacggttaacagtgcttatgctttgtacgccgtcggtgctggttcagatattggctggcttctgtctgagtgtggaatctagcgtcggcgtgagtccaatggttgtatcgtggccgacgatttgctgcgatttattggcggcatagatccagggcttggacggctgccgacggtgagagcagtcataacagtgaatgagcctctgcgagttcaaaagatgatgtagaggacgtttgtgagagtcgtttccggggcaagacatggtcgattgacaatgttgaaatttctcagcgacggcagaatggcatgccttggcgaggaggcgacactgagaggcgatggagtcgggattaatccaggttttggccagctaccgactcgcaagagcatcatagcgtcggtgtaccgccagaagctggcactgtaccgacgctgaatagcatcagcgtcgccggacatacaagttttggattgcagccgactaagaatgggatgccgacggcaagagccgcattgcaactatatgagatggcttcactgtgcgcgctgcaggaaaaggccgcccgcgcggcggcgacatatgagacggtttcactgtgcgcgcacgataaaccaccccggcggctaggatagagggaattgagggagtgcggctccacgcgtgaaggcaagaatcccgaaccatgcagggcaaacctgtgcgaggggagcttcttgcgcatgcggaagcggaatatatgcgggcatgcgtagacatgacgagaatggcacgaacacgtaagcggcatacgcactccgaacggttcaacagcaacacgagcagaggtcagaagaggatatgtcattcgagcatccgaatcggaacaacgagagcatgcgggacgtcgaactggacatcatgagccgcccgccggagcataacaccaccaatctggatctcgaccggatgaccctgatgctcgacatcctgggccacccggagcagtcgttccgcgtgattcatatcaccggtaccaacggcaaaggctccaccgcacgcatggccgaggccatctgccgcgcctacggcatgcgcaccggcctgtacacgtcgccgcatctggagaagatcaacgagcgtatcgccatcgacggccagcagctgtccgacgacgatttcatcgacatctgggaccagaccaaggatctcgtggccctggtggacgccaagatggaggagcaaggcaagccgaagatgagcttcttcgaggtgctcaccgccatggccatctggaagttcgccgacacgcccgtggacgtggccatcgtcgaggtcggcatgggaggcctgtgggacgccaccaacgtgctcaacgcggatgcggccatcatcggcccggtggacatggaccacatgcagtggctgggcgacaccgtcgaacagatcgccaccgagaaggccggcatcatcaagccgaactgcaccgccatcatcgggcctcagccgcatgaggaagccgtcatgccgattctcaccgaagccgccgaacgcaaccacgccatgctcgtgcgcgacggctacgaaatgaccgtgtccgaccgtatggccgcagtcggcggccaggtcgtcaccctgaccacgcccaacggcacttacgagggcgtgccgatcgccaagttcggcgagcatcaggcccataacgcgcttgccgcgcttgccgcctctgaagtggtgattccggtcaatggcccgctggacggcgacttggtgggcgaggcgttgagctcggtcaagattcccggccgcatcgaacagatccgcacctcaccgaccatcattctggatggcggacacaacgtgaatgccgccgaagccctacgcaaggccatagaggaaagctacgacttcaagcagctggtcggcgtggtcgccatgatgcgcgacaagcaggtcgaggaatatctgggtgttctggagccgatcctgagctccgtggtggtcaccgagaactcgtggcgcgagcgtgtgatgccggccgatgagctcgagaagattgccgtggacgtgttcggccgtgaccgtgtgatcaaggaagcgaacctgcccgacgcgattcaggctgccgtcaacatggtcgatgccgaggacgagctgggcgtgggctacggccacggcgtgcttatctgcggcagcttcgtcaccgccggcgacgcacgcctgatgcttgaggagcatgccagccccacgatgaggcaggccatggccgtccatcagccggcggtcgacccggacgattcggatcagccggcagacaaggccgaggatgaggccgccgacaacctcgaggattcggtgagcccggacgacttcgacgtgttcgacgtcctcggcctcggcaaggaacaggccagtgacgccggtaacgccggcaccggcacggccagcgccgacacaggcgccgtcaccgacgattccgccgacgcccggtaacccgaatccaaggcatatcggatacccggacacacggaaaacagtctcacgccatgtatctcaaggaactcaccctccgcggattcaaatccttcgcctccgccaccacgctgcgcttcgagcccggcatcacggcggtcgtcggccccaacggttcgggcaagtcgaacatcgtcgacgccctgacctgggtgatgggtgagcagggcgccaaaaacctgcgcggcacttcgatggaggacgtgattttcgcgggcacgtcctcccgcccgccattgggccgtgcacaggtgagcctgaccatcgataattccgaccacacgctcgatatcgattacacggaagtcaccatatcccgcaccatcttccgcaacggaggctccgaatacgcgatcaacggctcgcaatgccgtctgctcgacattcaggaactcctctccgataccggtcttggccagcagatgcacgtgattgtgggtcagggacgattggatgcgattctgaaggccgacccgtccggccaccgcgcgttcatcgaagaggccgccggcatcctgaagcaccgcaagcgcaaggaacgcgcgttgcgcaagttggccaataccgaaacgaacctgagtcgacttgacgatttgctgggggagattcaccgccagctcggccccctcggacgccaggcacgcatctcccggcgcgccgacgcgattcagatatccgtacgcgacgcccaagcacgcctgtatgccgaagacgcccaacgctcgatgaaccgccgcgacacggtacgtcaagagcttggcgatgtgcgcaaccagctggccgtcgcccaacgtgaactcgcccacgtcaaagtacgcatcgaacaggtcgaggcgttgagctctgaatccagtccgaccatcgccaaggccaaccaatactggcatgaattctcacagacccgtgaacgactgaacgcgctcgcccagttggccgaagagcgcagccggtcactcaccggccagatcgtcaccaacttcggtgaggatcccggcatgctcgtcaaacgagccgaggaactggagtctcaggccgcggcacaaaccaaggccgtggccgatgcacgcatcgcactcgacaaggccaccgaggaacgcgccgacgacgagaagaagctcgcctcagtccgccagaccttgacggaactgcgcaaaaccgcacaggagcgcgatgcgcagatcgcccgactgcgcgaactcatcgcccgcgaggaatccgccgtgcaactggcgaccagccgcgccaaggattatgcctcccaacgcgacttgctgacttcccagcgcgacgatgcccagcaacagctggacgcattgcgcagcgaagcagactccattgccgacgatgacggtaccgcattggacgccgcgcgtgcgacgctcgccgaatgccgcgaacgactgaacgaactcgccgataagcagcgcgagatacagtccaagatcatctcgctcaaatccaaggccgatgcgcttgccgacacgctaggcagccgcaatgcctccggatcgttggaacgcgacacggacgtggcctcgcttggccgactcaccggcttcatccatgtggccgaaggctgggaagaagccgtggcccacgcgctcgaccagcatgccagcgccatcgtggtacccgaggcaggcaacatgttgcacgccctcgaacgcgctcgggaagataagctcggcaaagccgtggtgctgaccgcgagcattgccggcgatcccgccacagagccaggcacggagtcggaggagagtagcgccgagaacacggcggccgccccgcgatcgggcaacgcgctggcagcactcgtcaccgcgaacccggatgcagagaacccggcacaggccgaagctgtcgtgcacaccgtgcgtctcctgctggctgatgtagccatggccggcaccgccgacgaagcacagcacatcgtggcatccggcgaagccatgcgggccgtcaccaagaacggcgagaccttcacacacggcgtggcggcggtcggcggctcttccatctctcaatcggacctgtctctggccgcccgtcgagacaaagcattggcacaggtcaaacagttggccgcccaagacggcggaatggctgagcaagtggccgaggccaaagccaaacgcgatgaagcggcccgactcgtcgaccaggaatccgccaaacgcaccgaagcccggctcaaagcccaacaggcggagaaatctctgaaatccgccacagaccgcgtcgcatcgttcacccgtcagcttgagcagctggataggaaaatcaccgagacccaagagaatcgcaacgagcatcagctcaagctcgacgatctcaatcgcgctttggcatcggcccggcaatccacagcggaacatgccgatttcgacgaacttgatgaacgtgaacgcacgctggagcgcgaactgaacctgactcgcgagcatgaggtcgccgcgaaaatcgcgtggaccgaagcaagccgcaaaggggagtcactgagccgacaggccgggctgctgcgggacaacgccagagaagccgccgaacgccgcgcccgcatcgaggcgttgaacgatcgcagatgcgagcaggccgcacacctgcaaggtgtggccgatgacgcgcgagcagtggccgccatggtggagcatacgctgcatgacgtggccgccaaacgagacgagctgcaggccgccgcttccagccatgacgaggaactcaaggccctgcgcgcgcagcgcaaccagatcgagcccaaggtcaccgatctgaccgggcgcgaacatgccttggatgtaaaccgcgaacggttggccgccgaatccgggcagctcatgcagaaagtgtccgacgaactcggtctcactttggaggaattggttagtggttacggccccgaacagccggtgcccgtgctggatgatgagggcaaccctgtgccgttggatgagacggaagctgaggctgggaccgaagagggagaaaccgggggagagaccggcaccaacggcgattccgcccgctttaagaccgtgccgtataaccgtcaggagcagaagaagcgtctcgataaggctcgccgcgatctggccgcactcggtaagatcaaccctttggccaccgaggaattcgaagcgcttgaggagcggaacaagtatctcaatgatcagcgcaacgatgtggtcaaatcacgtgacgatttgatgcagctcatcaaggatctcgattccacgatggtccaggtgttcaaatccgcgttcgacgataccgccgaggcattcgagcagatgttcgccacgctgttcccaggcggcaccggacgactgcgcctggaaaacccggaagacatgctcaccaccggcgtactggtcgaggccagcccggccggcaagcgcgtcaaacagctgagtcttctgtccggcggcgaacgttcgctgaccgcgctggcgctgctgttcgcgattttcaccgcccgccccagcccgttctatgtgatggacgaggtcgaggctgcgttggacgacgtgaacctgacccgtttgattaatgcgttcaatgagctacgcgcccatgcgcagctcatcatcattacgcaccagcaacgcaccatgtcgattgccgacgcgctttacggcgtaaccatgagagccgatggcgtaacagccgtggtgagtcaaaaactcgaacgataaacgaatggttcccgctggcaggaactggtaccacaggtgacagagggcggtccatatcgaaagaccgccctcagtcttgcttcgttcgacagctcccgccagcgggagcggggcggtattagcgcaatgccttgcgcacgccctgtacagtctgcagcgtcttgtagaagaccttcttgatgggtacgtcgcgggcgggggccaccggggtgatttcctcggtgaacttgcacttgaactcgttaaggcccttgagagacggcgcgaagtcggagccgatgcccatgagatcgtattcagtaataccctgcgagcctaggatgcagcattcggaatacagcagcttgtcggtcacatgcagacgcataacctcgttgcgcatgccggcatagtagcgcaccgcatgtgtgccgttcacggtgacaatcgaccatgccaccacacggtcttcaatacgtgcggcgaacacacggcaatgatcggcacccaacgcgccgatcatatcggagtagtcgctcatcggagcaggcgtgaatccatcgcgctggccggtctcgaccatcacatcgtaatattcggagaaatcggccagcgccttatccgtctcatcggcaacctcggccgggcactcgcgcagagacttgcgcacgtcacggcgtccacgacgcttcatccgagccagaatctcatcatcgccaccggtgacgtcgatgaccacggtctggtcgtacggcactgtggacagcaccttctccgtaccatcggcgaaccaggtgtcgatacgcaggaacgcgatgttcttgtcggccttcttgacggtgtccacgatggcgtcgacgacctcgcgctcctcagcctcggtgggcttggcgacccacgccggcccatgcatcgagcgcagataatgataaccgtgcgtctcaaaatcgataaaggagatcacggcgaccaattcaccatcacgcttgatcagataatcgccccatggtgtgcgtccgtcgatatccgcctgaaaaccagaccaaaccttggtctgttcgatgggcaacgtgatgccggccttctcggcttcggcttccagtgtggctccgtcaactttctccaacgtgatcattacgattcagctatcctttttcgttcgtatccgtatgtcgtgtttctggtttggtcgtattgcgcgtgatctgatgtgggccaatcgggatccgatcaggatctgattggccggaatcccgtcacaagccaaacatgcgttcgaccacgtgatcgtcgccgtcgaacggcacatgcttgtgatggtccttgatccaacgctcgttgcccttgccgatgatcagcaggatgttgaatcggtcggcgtgcgcacgggcatcgtaaatggcgttggtgatggccgtcggacggtcggaaatcaccgtggaggccacatccttgttcgtgatgtagccttgcatttccatgcagatgtcgatgaacggctcggtgtccgtatcttcggcggtgaaaatgaagttcgcgatacggttctcggcagcctcgacgatttccttacgacgatcgtaggccttgttgccggccgatccggtcaccagcgtgatacgcgggttttcctcgccccaacgctcgtagacgaagtcaagcagcgcggtgacggatgcgtagttgtgcgcataatcgacgatggcgagcgtgttcgactgcggatcgcggaactgttccatacggccggcgatacgtacggattcgatggcgtgcagtgcgccggcgtcatcgagcgatacgccagccgcatgggcgatggcgatggccgccgccgcgttgaggtagttgaagtcgccatcgatggacagatggtagtcgccaagggtctgatctccgtcggcgatgtggaaggaggcgtgcgccgtgtcggcgggccaggcgacgacgtccgcactggtgccggcattatccgcgtcatgcagggcgaaggtggtcacgccgatgccggctgccgccgcgtcctcccgcaacagatcggcgtgcagactgtccgcgccgagtaccagcgacttcgcgttggcgatgatctggcgcttgcaatacaggtaatcctcgaacgtggggtgttcgatcgggctgatgtggtcgggggagatgttgaggaacgcggccacatcgaaagtcagtccgtagacgcggtccaccttgtacgcctgggaggagacctccatcaccagatactccatgccgttatcggccgcctcgcgcatcatgcggaaggcgtccatcgattcgggcgtggtcagatcggattcgacgtaggtgtggccgtcaaggcaattatcgaccgaggagaacaatgcggccttgccgccggagacggcgttgataagcgcctgcgtgaagtacgaggtggtcgtcttgcccttggtgccggtgacgccgatgaccgtgagctcgttctgcggatatccgtagaacgcggcggacagcaggctcatcgccttgcgtgcgtcgttgacgatcaggccgggggcggcggttgcggctgagtactcggtttcggccacgtatgcggccaggccggcttcgtcgatgccgttcagatactcggccttgaatcggcccttgcagcacagcagggtgcccggcgtgaccttgcgggtgtcgtaggtgatgccggcgaacggttcatccgccgaagcgatacgggccgggtcgtcggtccagacatccccttggatgatttcacgcagcagatggtgttccttgagcaggtcagcggccgaagccaaagtcaaagccataattgtttctccctattatctagccgatacgccattctacaggtggggtgtagcgtgttgtggctcacacgtcatcgaccacgatatgggcacatgatttgattagaatggtgaaccgtgacgacaagcgaagcaactacgcaatccgggcagtcagccggatcgggcgagtccatggcagccaagcgcgccagattcgagcagctcgccatgcccgccgtcaatgcactgtaccggcaggcgatgaggctgaccaacaatcccgatgacgcgcaggatctggtccaggacaccttcgaacgcgggttcaaggccttcgactcatttcagccgggctccaacttcgaggcgtggatgaccaccatcgagcgcaatgcctacttcaaccagtatgccaaggccaagcggcgcccgcagcgtgccaacgactccactggcgaatacgacgattgggacatttacgatgccgccgaacatacgtcggacgggctcaagtccgctgaagaggaatatttggacgccttcgcacccgaggaaatcatgaccgcgctcgccaaactctcgccggaacgccggcaggtgttcatcgacgccgccatcgacggcaagtcctaccaacaggtggccgatgagcagggcgtgaaaatcggcacggtgatgagccgcctgaatcgcgcccgcacgcaactcaagcgtgagctcgcctcgtatgcgaaagagcgcgggtacgcgactggttcgtcggctggttcaccatccgcgaagttgagcgaaaacgttggtcgaatcgccgattccggccataatgaaagtagtgaacgaactgttggcagcaatggcgacacgcaagccgtagtgagacatagtcatgcgactcacgcccacacgccacaacagtcaagcaagctttcgggaaaggagatctgatgaacgatcagccggtagagcgtactcgccatatctccataacccgtacggcggccgatggcacggtaagccagaccgaagtgcatatcacggcggtgcatcatcgttcagtagataccggctcggccgctgcgtcggtccagacagacgtgcatatcgttacggagggcgactgttttgacccccgtacctgctgcgacgagcgtgaacaggcgttgattgccgcgttgcgtgcctacttgcgcccggatgtggcacccgaatgtctgatggcccggctcaaggccacgcttgatcactgctgcggcgaagataagtaacgacacatatacaacaaggcccgtctgatgtatcatcagacgggccttgagcgttctataagaaacgcgaagaatcaggcgttaggacgcttgccgtggttggcggccttcttacgacgatccttgcgcttacgtccgcgcatgcccatgatggactcctttgctgcagtaaaaaaataagccttcggaattatgccacataagtacgacgtgatgcaacacgggtgtccatgtggcgatgatcgtcaggcttggttattcggtttttcagatttgttcggcgtggaaggtgaccacggtggtgtagtcatcgcccggctcgagcacaaccagatccttgccggtgcggaaggcgtcggcgtaggcggtcatcggttcgacggccacgccggcctgacgagccttcccgccgatttcgttgccggtgcacacctgccaggagttgatggtcttgtcgccggtcagcgtgaccttgatgccgtcggggcgggtgaacacggcggaagtgctgccgtcttcgccgcggttggtgatatcggtccaggcatcgtcgaagccacgtccctccagcgtggggttatcgcgcaggtcgaagatgccggaaaccggctcttcaccggtgggcagcaggtgttcgtctacggtcacgtgggtatcgcagtgcagctcaagacggcaggactcgttgtcggcggtaatggcctgaccggtggcgtgcttgccgtttgccagccacgggtggatgccaaatgcccatggggccttcacgctgtcgttgttgtgcacggtgaaggtttccgtgagaccgttctcgtcaagtgcataagtggcggtgatggtgatatcaaacgggtagccggcgatgtcgggggagcgccaggagagcgtcacatgtgattcctgcaaatcaacgagctcccacatgtagcggtaggcgtagccgtgcagggaggattggcggtcgaactcgtcgatcggcatctggtagtcttcgccatcgaaagaatactgaccattggtcacgcggttcgggtacggtgccagcacccagccgttgcagcaggggatgaccttgttcgggtcgaaggggacgatgaggtcttcgccgcgccacttcagctcgcgcaggctggcaccca

SEQ ID NO: 361 - DNA, 28639 bp, Unknown
  R42_10m  MAG No. k141_24113
cgccacctgcagatgatctcgttgggcggcgtgatcggcaccggcctgttcctgagctccggatacaccatccagcaggcgggccccatcggcaccattctggcgtatggcatcggcgcgctgatcgtctacctggtcatgctcacgctcggcgaactgtccgtggccatgccggtgaccggctccttccatgtgtatgccgagaagttcatcggccctggcaccggcttcgtgatcgcgatccagtactggctcacatggacggtggcgctcggatccgagttcaccgccgccgggctgctcatgcagcgctggttcccgaacagtcccacatgggcgtggagcgcggcgtgcatcacactcatcttcaccctgaacgccttgtcggtgcgtttcttcgccgaggcggagttctggttcgcctccatcaaggtgttcgccatctgcgcgttcatcgtcatcggatcgctcgccatcttcggcgtcatcccggtcgccggctaccaacatgccccgatgttcggcaatctcatcaaggacggcgtcttccccaacggcttcatgccggtgttcgccacgattctgaccgtcaacttcgcgttctccggcaccgaactcatcggcgtgaccgccggtgagacgagggacccacaaaccgccgtgccgaaagccatccacaccaccctgtggcgtctggtgctcttcttcatcggctcgatcaccgtgatgtgcgcgctgatcccgtggcgccaggccggcgtgggcgaaagcccgttcgtgctcgtcttcaacagcatcggcatcccctatgcgggcgacatcatgaatttcgtggtgctgacggccgtgctttccgcctcgaattccggcctgtacgcctccacgcgcatggtgtggtcgatgggcaacgaaggcatgattccgcgctggttcgccaaaacgaaccgtcgcggcgtgccgatgctcgccttgtgcgccgcgatggccggtggcctgctggcgctcctgtcttccgtgatcgccgcctcgactgtgtacctggtgctggtggcgctttccggcctgtccgccgtggtggtgtggatcgccatcgcctactgccagatcgtgttccgtcgccgttggctggagtccggccattccaccagcgaactcaaataccgcacgcccggctatccgtacgtgtcttgggcggcgttcatcctgtgcaccgcatcgttcgtattggtggttttcgacgtggagcaacggttcgcgctcgtggccgagctcgtgttcatcgtggcctgctatggggcgtatttcctgcaacagtgggtacgcaagcgcaaaaaggcgaccgaggccgacgacctcgatacgctttgggtcgcgcgcgactgaacggctcgcgacctaccggcgcaccgctattcacgccgtgaacgtgcactgatccaacgcaatgccagacccagcaaatccacaccgccacgattgcccatgatgtgggtttgagcgcggccggggagaacggcagcacctgcaggccaatgatgattaagccggcggccagcagcgaagctgagatgaccataccgaacttcttccagtcaaggccttcgcttgcctcttcggcactctgcggaatcgtgtcgaaaccggtgtagaagagcggcgtcatcaccagcactccgggcagaaacgacccgaccatggtaaccgcgccggacgtcgagccgatcggcagcagaaacacggcgcccagcacgaaggcgatcatcgcctcgaccgggccaccgccgacgatcatccagtcaccgaccagcagcacccatacggtgccgatgattgcgccgaatcccatggtgaagtagttccacaggctcagcgatctgaccatgccgccgtcgtcgccgctgccatcggcactactgtcgccgttgccgttgttaccatcctcgtgcacaggaatagcggcactgggcaggccagtcgattccaccaaactggccgtcatcgtgcttgacgggctgaatgccgtggatgcggcgaccatgaccgagcctcctttaattcggactgactgtgatgataacgccgttcacgatatgccgtattatgaacgcagtgagagcccgcttcaccggccctattcggctcatgaataaacttcgcctatctgcggcactgaacacatgaccataatgtgatacacgtcacttcctgaaatacgtagtcgttatggaatcacccgcacgtttcccgtatcggagctgtacgatagctgtgagacaggggggggtcgtcagatttcggggggagggttccggaaacggtccgactgcaggatgcaccgggccgtgcgacacatgtcaacttgcgtattcacgccaaactcaattgagcaagccgattctcgtaaatggccagaagcggaacaacgccacaccttggatatcgtcgtatggcactagcccattgttgccgtcgtcaagatggtatcgagaatctctggaattggagcgattatcaccaagcacgaacacgttgccgtcagtaacggttacggaaaaaggactgtcgcttggattcacgccggacttaagataagcgctttcatcaatgggtttgccgttgaccgtgatgggctccccggatcccttgcaggcgacggtatcgccgggcagaccgatgacacgtttgattaggtaacgattgctgtcgattatcgacatcagattggtgggaagctgctccccctccatccagtctgcgggatctttgaacacgatgatgtcgccacggtgcagtgcaaagagtctcggagtcaatcgcgaggcaaatacgcggtcgccgatttgcaacgtgtcttccatgctacgggatggaatcacatagacgttgaacacgaaggtgcgtcccagcaacacgaccagcatcaccgcgatcaccgtcagcagatagccgcgaatttcactccaaacggagggctttcgcgcatgtctcctcgactgtccacgcgcttttttgctatgacgccccaccatcatatcctttccgaccggtaacgcaacaccatagtcctcaaaccatgccgttacctacgcccatgtttgagctcagctgtcacaccagcggttcgcgcacgtctagttcacaggcgatgccggtttccttgcgggcccattcggccgcctgcagtgcggcgatgttccataatgcgcacggcactccgccaaggtccggatgcgatgcccagaatgtgaggtcatcagcgtatgcggtgatgaccgattcttccgtgactggcatgatcgtgtggtacagacggtccgcaagcgtggccacgaattcgttggccgcggcgaacgtgtcgataagatgctgttcggcggtcaccggcgggccgaccagctcccaggattcgacgtccgtggcgctccaatgcgcggcttcgccgtccacatcgcgttgcaaagagacgaacagcctggcgaactcatccgaagtcagtcccgtaacccggcgtcgggttgacaattcaatcggagtcatcagataccgttcctttcgcttcgttcattccgttgtctcgctggtttgatttgctgccaaccggtacaaagcctatctcgcacacctcacgatagcccaaaccaccggcatggccatgattgccagccctacgaccagtgaccatgaggagccggcgattccggtcagattggtcatggcggcggagacgtcatacatgccatgagccacgatcagcggtgtaatcatgcccatacggcggtacagcagcacggcgagcactgcaatcagcacacgcggtggcgtgccgccggcacaatgtcctatcgagcatcgccgcatgattcgtgcggtccacaatcgaggcagcatcggtttccattcggttcatgcggccagactatcgcccgttcttgccgattgcctgtaagcaggttcggatagactggcgcgagaacaatgcgagaaagaggcaagaatgacccggaaacggtcacaacagcacgacgcacaacgcaaaccgtcctggcgcgtacgctggaagaccatgagccgagccgtagacatggaaatccgcgaacacaaaagctcattcgcggtctatgtggtgctgcgcatgctggtgctcgccatggcaatactccagttctttaacggcgactacgaaaatgtgttcctgtgcatcctgacgttgctgttgctgttggcgccggcgttcatccaggtgcagttccgcatcgagctgccttcggtgctggaagtcatcgtgctggtgttcgtgttctcgtccgagattcttggcgagatcagttcgttctatgagatcttcccgttctgggacacggtgttgcacacgatgaacggcttcctcgccgcggcgatcggcttctcgctggtcgacctgctcaaccggtccgaccgggtgaagttcgagctttcgcccctgtatctggcgatcgtctccttctgcttctccatgaccatcggcgtgatctgggagttcttcgaattcggcatggaccagttgttcggattcgacatgcagaaagacgccatcgtgcattccatcagctcggtgatgctcgaccccacgcacaccaaccatgcgattcgcatcaacgacatcacccaggtcacggtcaatggccaagacttgggcctcggcggctacctcgacatcggtctgatcgacacgatggaggatcttatcgtcaacttcatcggcgcggtcgtgttctccgtgttcggcttcctgtacgtgaagaaccgcggcaagaaaaactccatcatcagtcggttcgtgccgcgccgcaagtccgccgactgcgattatctgcgactggtgatcgatggcgggagcgcggctgatgccaaggccaaagccggcggtgccaacgctgacgatagtgctaacgccagtgcggccggcaccgattcagctgatgcagccggagccaaagccggcaatgccgacgccgctccgaccgtcaccgccaagccctgagtacgctctacagcactttcgaagcgtcgaaacggtagtgcccggtgaccgtcatgtgcttcttgaaggcgaagtagtcgttttcgcgctgccgctgcgccatgttgtgaatcacgtacggtgcacgccccgcgatcggccggcggatagccgccctgatagtagccggaatcgtaagccggatggttttcggcgtccttgcgcgcacccgccacgatatccgcgtaatcgtccacaccattgtcattgaaatcgaccgaactggcgactctcgaatacttgcggtccgcctcgccttgtgattcgatgattcatgaacgtattcgggtcacactgtgatcgtccgacccaccgcccgcacctcccaatccgcccggtgcttgaacttgtgggactttggcggtatcgcgaccgcagcatcgccatgctcatctccagccatcagctcaacgaattgcaggagttgtgcgggcgattcctgttcatcaaaggcggccggcttgcggacgaattcgccggcgaacagaagcggatcacggttatcgagcttggccggccgctcggtgtcgcgaaacgtgcggcggtcgcagctttggatccggccgccgtcattcatactgattctgccggccgtgaacctgttcaactccgatttcatgaaagtcagcggaaagaccggttcggtgagtgtgctggatttcctcgctggcgagttcgtcgtacagaacatgctgatgctgccgatggtggtcatggcctatctggtggctggtgccatctatacgcccgtggcctccggccgcatgttcctgtacaaggatctggaccgcgccacgatcatcaatgcgaaaatccttgccctgtttggtatctacgccgtgtacgtggcattgcagacggtggtgacggtcgctctctacatcctgtacatcgcgcgcttcgactacgcttccggcacactgctgccggccgcaggtgcggacatcgcttcggatgtggcctccatcgccggcatcctgtgcgccggtgtggtgactatactggtggtggccgcccttgccacccggttctcgaccggcagtacgagagcgcggaccacaccgtgcacctcgatgtgaaggtggacgaggacacggtgtggcttaacagacagcaattggcattgctgtttggccgcgatatcaaaacaatcggcaagcatatcggcaatgcattgagggaagagctcaatggattttcagttgtcgcaaaatttgcgacaactgcatctgacggtaagacataccaagtcgagcattacaacttggatatgatcctgtcggtcggataccgcgtcaaatccaaggaaggcatctaatttccggcgatgggccaactcagttctgaagcagcatctcgttgatggttacaccatcaatcacaagcggcttgacgcacttcacgccgtcgtcaaggtgctatcgaggtccaccgaaccggaaattgctggcaccgcagagatcttggaacgatatttgccgagtcttgtgctgcttaacgactatgacacaggcaatgtccctatacccaagggcgacgagtcccagtgggtcttgacctatgaggacgcgatgctgttcatccggtcgatgccgttctacacgcaatccgatctgttcgggagggaacgcaacggttcgttccaaggaatcgtcgcaggactctgccagacgttcggaggcgaagaactgtaccgttccacccgggagaaagccgcgaacctgctgtatcaagttgtcaaggatcacccgttctccgacggcaataaacgttgtgccgccgcactgttcgtgtatttcctgaacggcaacagtatactgggcgacgatgactcccctgcttgtggagggtaatgccttggcggcgatgacgctgatgattgcactgtccgcacctgcggagaaagacacgatgatcgccttggtcgagaacttccttatacggcatgaatcgcaggagatcaattgagagaccgtcaatgaagggtgcacatcaatcacgttctagcattgcgcgactatctgtacgagtcgtctgaacgatctgctgggagtgctcttcgcggaaaaccaacagcagaccggaggccgcatccactatgtgttgttcaacccttgggccgtacgcagcaatgaggcattgaacagtttcgattcgccactgatgaagctgctggcgcgtgccatttacgccattgtgggcgtcagcgtcgaggaggcgattgcccccatcacccacttgatcgacaacccgccgcacaccgcgctgtcagcgttcatcaagaccaaacccgtcgatctcactatgaacaccttcgacaggggcaaggcggtccggttggacgatatcaccaaaagctgctgaatcgctagctgtcatagcacaaggccttagacagaacacccagaaatcgaacgggtagatggatcgcgtctccccttgacttccggcaagcacacgccaatcatggggcgtatgggtattgcaatcaaacgtatatatgaagagccgactgcgtcggatgggtatcgggtgctggtggatcgcctgtggcctcgcggcatgacgaaagagcgtgcggcgttggacctgtggctgaaggacgtcgctccctctcccctcctgcgcaaatggttcggccatgaccccgccaaattcgcggaattccgcatgcgttacatcgccgagctcgacgccaatgccgccgtggacaatctgcgccacatctgcgcggagcatcccgacgtgaccctgctctatgccgccaaggacccgcacatcaatcacgccctcgtactgcgcgattatcttaactgaatattgactcaggacgaccgtcgtttcagtccatctgctagattctcgccgattttcgtatctttgaatcgaagtgcacagtcgtcactccttggattgccaagtaaagggatgcctccaaaccaaatcaatccgtcatcgattatggcaaaatcggaacacgattcgacggtccggacaatgcacccaatagcacgcagccgattaatattccgttctattcgtgttctggttgccaccgcagcagtcgccggcaaacggacataaacttcgatgagcgctttcctgtcggccagtcggagcaattcatcgtcaattgcgctgagtccctgttgtgatacatattcagccgagataatcagggaacgtgcgcaaccggcaatatccttgcggagtatctctgcataattcgtggctgtaacgataccgccttcgaataatccgtcagaccgggtgtcgagcaacgcatccgcagcatcttcgccctgcgtcgcggccgtcatgcaagcgcgcaacgcttccgcctttgcactgagcatgtccattttctcagtatggtcaggatttaccgaatatccttgatttgcgtatgccttcagccgttttcgatacatgacagcggataaaggcacggtcacgtcgatgtaatcatagacacgaacctcggtcttgccatcattctcgcgatgaagtcgccctacatattgcgagagagtaccctcaaacgagaccggagcggcaagcagaagcgtgtcgaaacgcttctgatcgaatccttctccgatatagctacccgtagccactacagtcaggctctcattattcggcaccaaggatagatcatgcatttttttggttattcgctgtttgcggtggggcgggcatgggttagtgtttcgggttcgatttcctgtcagaaaaaataatcgagtgcgggattacggccggtaaggctcctgctgtggatgcggatgcgcgtcagccttacggtgatgctttcccaaaacgcggattatacgaggtgtgggacggcacgcggattcggccgttttccgcccgccgtcccacagcgctcgctatgaacggttgtgcataatcatggagctgcagcgagaatcggcgttattccgcggtttctacagtcgtcggtgtgggacgctacggacgttaaacggttgacttgtctgccatcccgcgctcttgagggacggcgcggacgacaaacgattgactcgtctgccgtcccacagatattgggatgtgtgcggctgcctgctgtctatagcgggtgtcggtcaccccccaccgatcgccccccaccggtcaccaccctgcttgacggaaatacgcaactcgactttctgtaggcatcatggcggcatggcgacggcggacagtcgaagagatccccatgatgcctcaacagccatcgcccacacacatcacagctatcaaccgcaaatatcaagaggccgaaaatctatgagacaagcaaccccggaaagcctcagaccctacaaatggctttattgcaagggtatatgccggttcaaactccactaatagaacaaatagaacagccggcttaggtacggcgcggcaaatggcgcaaaccggccgcgatagtagtagcgtggtgcataccagtacaaccatgcgaggagaacagccatgatcaatgaggaatacaaggccatgcttggcggcaagtccgtgattcgcgggctgagcgagtacgccacgagccgcggtgctgaaatcggctaccagaacgtgttcgattacagccttggcaatccctcggtgccggctccgaaatccttcaccgacgccatggtcgacctctacgaaaacggcgatccggcggccatccacggctactccccctcgctcggcatcccgtccgtcaaggacgcgatcaccgaaaacctcaacgaacgtttcggcatggcatacaccggcaaccacatcttcccgaccacgggcgcggcgggcgcgctgtcccacgcgatgcgtgcggtgaccaagccgggcgacgagatcatcaccttcgccccctacttccccgaataccagccgtacgtcaagggcaccggtgccaagctgaccatcgtgccggccgacaccgagaacttccaaatcaacttcgacgcattcgaggctgcgcttaacccgaacgtgcaggtcgtgcttatcaacaccccgaacaacccgtccggcgcggtgtattcggcggacacgctcaagcgtctggccgcgatcctgaccgccaagcaggccgagtacggccacgacatcttcctgatcagcgacgaaccttaccgcgaaatcgtgttcgacggagccacccagccctacccggccagcttctatgcgaactcgctgacctgctactcgtggtcgaagtcgctgagcctgccgggcgaacgcatcggctacgtcgcggtgaaccccgcagccaccgacgccgacctgctcgtgccgatgatgggccaaatctcgcgcggcaccggccacaactgcccgccgagctcgatccagctgggcgtagccaaagtcatcgaccagaccgccgacctcaacgtctacgagacgaacatgaacctgctctacgatgcgctcaccggcatcggcttcgacgtggtgcgccccggcggcacgttctacatcttccccaaggcgttagaggacgacgccgtggcgttctgcatgaaggccaaggaatacgacctgatcctcgtgccgtccgacagcttcggcgtgcccggatacttccgcatggcctactgcatcgacaccgagaaagtcaagcgttcgatccccgtgctcgaaaagttcgcccacgaggtgtacggcctgtaaacacgggccgcaagtaacaaacacaagaaaggggttgccatggaatacaccgaagacgccgatcgtcgcgaactgctgctgcacagcgcctatgactccgatacggtccgggccatggagcgacccctgctggacaaaggcgtgccgctgatgcgcatggccgcccaggccgcggcccacatggcggccggtatgctggacgacgaggatctggcgctggaggacacgtcgatcgtgctgctggccggggccggagacaatggtggcgatggtctgttcgcggccgccgcgctggcccaggagggcgcgaacgtcactgccatcgccgtgggccggtcgctgcatgaggccggattcgccgcgctcgtgcgcgccggcggcaaggtgctggtgcttgacccggcagccgatattcccggctgcgcgtccgggttttcctccggtgaggccggtgagcgattgcagaccgccatcgccgtggccaggaaatcgcatctgatcatcgacgcgatgaccggcatcggcattcaaggctcgctacgcggcattcccgccgcgctcgcctccgcccttggtctcgacggcgagtctcccgatgagcccgccctgccgaaccgtgagtcgtcaggcgattttccgctggtacttgctgtggatacgccatccggcgtcggtgtgaacgatggttctctgcccggcccgtacattccggccacggtcacggtcacgttcggcgcgatgaagccgtgcgcggtgctgccgcccgccacgttcgcctgcggccgtatcgagttgttcgatttcggattcgatatcgacgacaaggatccggacgtcgaagtggtggataattcgttcgcgtccgacgcggtccgtctcccccggttcgaggattccaaatattcccggggcgtggttggtctggtgaccggctcgcagcgctaccccggtgccgccgtgctcaccaccagcgccgccgcccgcgcgaacaccggcatggtccggtatctgggcccggagcgcgcgcagaacatggtgctcaccgcactgccggaagccgtgatcggcaagggacatgtgcagtcctgggtcgtggggtccggcgtgcccgaggctagcgtcgagggctccgacggcgatatgcagcgggacaccatcgccgcattgctcaagcattacgcgctcggcagcgaggatgagaacaaggacgcctacgacatgccgccaatcgtggtggatgccggcgcactcgacctgctgccggagcgtgtgcccggccaggtggtgatcacgccacatgccggcgagatggcgaaactgctcaaccggttcgaaaccaccgccagcaccgcggagcatgccgattcgcacgagccgtacaccgccgacgacgtgcggctgaacccgttggccagcgcgaagcgcgcccacgagctcaccggtgccaccgtattgctgaagggcgcggtgaccatcgtggtggatgaggaccatgtctatgcgtcgggcagtgcgccggcctggctgggcaccgccggcgcgggcgacgtactggccggtctgaccggcgccctactcgcccagcaggatgacgtggccaccacgggcgagaccgtggcctcggccgcctacctgcatggcctggcggcggcgatcgcctccgaatccgagcagcagggctggcaggagccggaactgatcggccgcgagcatcgccagcgcttcatgacgctcggccacccaatcgtggccggcgacgtgatccacgccatccccgaagccatcgccgacgtcatcgcataaccttgttgacctccctctgacgagggaggtgtctcggcaaaaccaagacggagggagagaaacataagcctcaaactccacataccccgacctatacacaaaccccgtacactaaatcgcagaccccacccaacgacccaaacacacaaggaaccatcatggccaactcccccatcaccgacgtgattttcgacttctgcggcgtgctgctggactggaacacccgcgcatgccttgaaggccgattccccgatgaaatcgtggaacgcatctgcgccgacgacgacccctgcggcttcttccactacgaggaccgcatggacgccggcgaggatttcgcggacatctacccggatgtggtacgcgaacaaggccaggaactcgccgacatcttcaagttctacatcggccactacgcggacgcgctgccccgcacgctgccgggcatggtcgaactgctggcggatttgaaggcccacggctacggcgtatggggtctgaccaactggtcgcatgagaccttccacctggccttcgagaagtacccgcgcctcgaacagctgctgcagggcaccgtggtctccggcgtggagaagatgcacaagccgaacgccgacatctacgagctggtcctgacccgcttcggtctcacggccgagcgctgcgtgttcttcgacgacaccgccaagaacatcgtcggcgccaacgaggtcggcatccacagcatcctcttcgagaacgcgtcgcaggcgcgcgaatcgctcgccgaactcggcgtacgcctgtaagtcgccaaatattgcgtcgcggcagttgaagtctatggacccgtccttgacgacggtgaccggccgtttggcgaccggccgtttggcgaccggcatgtcgcactgttcggtgagcacttcaacgacgcggcacgcggcaccatgcgcagaatcatcatgaaggcgttctggatgttcatcacgtcggcgccgagcctggtcatcaggcttggcgtggagaagcggtcgatgctggagaaggagaaggtctggatggcatcgtactggtcctgcctcaggttaccaatgtggcgcatatcccgttacacagcgtccgcgatatgcgaggcatctcatattgtgtcgccatagtggattgatgaggttataaacccgtgtggcgaccatccctagcgatataaatagactttatgacactgctgcagctgaaatacatcgtcaagatcgtcgagtgcggctcgatgaacgaggcctcccatgccctgtacgtctcccagccggccctgagctcgtcggtcaaggaattggagaacgagctgggcatcgagattttcacccgctcctcgcagggcatcgccctgaccgtggacggcgcggaattcctgacctacgcccgccaggtgctcgaccaggccgacctgctcgaagagcgctacaagcacgccaaaccgcgcaagcagctgtgccaggtctccacccagcactacatgttcgccgtcgaggctttcgtggagatgatcaactccattaagtccgacgaatacgagttcacgatccgtgagacccgtacacgtgacatcatcaaccaggtggcgaacatgcagtccgagatcggcatcatctacctgtccgacttcaataaggacgtgatcggcaaactcctgcgcgagaaacaccttgaattccatccgctcttccgcgcccccctgcacgtgttcatctcacgggacaacccattggccgccaagaagatcatcaccatggaggatctgaagccctatccgttcatccagtacgaacagggcgaggaaggctcgttctacttctatgaggaggcggtctggccggaatactcccccaagcagatcaacgtgaccgaccgcgccacgattctgaacttcatcatcggcctcaacggctacacggtgtgcaccggcatcgacaacggcgacctcaacaacgagaagatcgtcaccgtgccgctcgacaccgacgaaacgatgttggtcggctggatcacgaacgagcgttccaagctctccaaggccgccgaaacctacctcaccaagctcaagtccgtagtcgccgatcacggctacaagctcattgattaggagtaagtaaaacagacatggtcagcagtgagatatactgcgattaagccaaccccgctggggaaatggaagtaagagccggcccctgagtatctcaggggccggctcttgcgctattgagactgactggcaaaaccagtttgatggcctccggctacttggccgagattaccgacgtggcggctgtcgtggcgaagcctttgagcacttcaatcatcacgtcgcgatcttcgacatcaatgttgcgggccgcggcgagcataatcggcagtgactgtgtcaaatgcgaagtgaggtcgccgaatgtgtcgtatccgccagcctcgaagatggcaaacaggttttcgatgaacttgcggcgatgctcgtcgtcgtattttgccatccatccgttgagcgtgcgtgccaggtatcgcgcgctacttgtcagtccatcagcctgtacgaattggccatgatcgacttgccagtgcaatgcgaaatgctgcatgatgctggcaccgtcgctgctgaccaccgtatagccgtcttccacatgctcacgagtctcaaacagcatgccgatgatcgacgatcccggtaccgatttatggattttcggcgcaatgcgcgcgtacccatcctcatcgaagaacgcctcatcgaagcctggaccatcgtgcgaatacacggccgtgatacgtccctgaatttcgccgggcacattggccgccgcgtataccgccagattgccgcctttggaatggccgccgaccataatcggcccggcccagcggccggcaatatcagtcacataccgcacagcggcctcctgcgaggcgaccggacggcggaaggccatcgtgaaatcctccttccacccgacgatcgaactgtcggtgccacggaaagccacgtacagcgtgccgtcgcccagttcgaagacgcaggccgagaactgtttggtggtttcggcgtcgaattcatccacgtattcgccgacgcgcaggtcgcgccagcgcgggctctcccccatcgcacgcagcagatcgacgttcatctgcggcgaccacaccttgccgaacatggcgtcatagcattcggcgcgtagcaggtcgcggatggagaccgtgggaatcatgccgctgacgtccgccgaatcctcgtgatagcgcggaacgttatccggcatgcgcgcgtaggccagctgggacagggcgagactgtccgcctcggtgaacggcagtgcggcgaaggtgtcgaaatgttgccggatatcgtcggtgatgttccccatggcggccttccttgttcgaatgtaacgaacctacggtaattctacgccgagcgggttttcatcacaggcgagtcggtcccagagtttaaaaccctatctcgccttcaaggggctgatttggccttctggagacatctatctccgtttcaaggggctgttcatccgtcatatcccgagtatgagcggcatcaccccaacgtcattccgccattttcatgctgcttctacttgggcatcagtccctcgaaacggaagtagatctctggaaaccacgacatcagcccctcgaaacggagatagcatcaatttaggcccagattgcccgttacagcatcgggtaatacttaccgtgatcgattttggcggcgatatcacgtaattcggcagcatctcggcggtcttcttcattaccttgcgacaacttgttcgctttgctgtccagatgatgctcgatgccgaagtaactgcatatccccacgagcgcaaacagccctataccaactaaccagttcatagcacgctccttgccaaagcttctgccttaatatggtactgctgttcatggatcgtaataaaaaaagcgggctcgcaagcccgcttttggttttaggttgaagacgatcaggcgccgtattcctcaaggtaggcggcggcgcgctgctggatatcgtggctgagcaacggggtgccgtcggagttcttcatcttggcggcggcgtcgaagatctcgcgcacgttggcgatggagagcaccgggaagccgaattcggcttccacggccttcacggcggacaggtcggagtccttggtcttctccatgcggtccacggagagcacgagacccacgacctcgacgttcgcctcggccttgagcttggggatgacttcgcgcacggcggtgccggcggtcatcacgtcgtccacgagcagcaccttcatgccgtcggtcagcggggtgccgaccatccagccgccgtcgccgtggtccttcttctccttgcggtcgaaggtgtatccaacggtcatgttgtggccggcgttcagcgcgatcgcggtggacacggccagcggaatgcccttgtaggcggggccgaacacggtgtcgatgttgcggggaatcgtgttgtgcacgatggcctggctaatcttttcggcgtagaacgtgccgagcgcggcgatcttcttgccgtcgtcgaaggcgccggcgttgatgaagtacgggctcttgcggccggacttcagcgtgaagtcgccgaacttcaacgcgttggattccaacaggaattcagtgaagcgatgtgcgagtgtttctgccatgatgttccttacctccaagtctgtcctgcggccagtttagcagcgagttcgggacggctgtccagcaggtcgtcaagttcgcgggcgacgcgcagcggggccaccgggtcgaagagcgcggccgcacccacttcgacggcgttcgcgccggcgtacaggtattcgagcgccttctcaccactgtcgatgccgccgagtccgatgatcggaatctccggcagtgcggtgcgcacccgatagacggctgccaggccgaccggcagcacggccgggccggatacgccgccggtgacgttggcgatgatcggctggccggtgcgaatgttgatgcgcatgcctttgagcgtgttgatcatgctcaacgcgtcggcgccgtgttccacggccgcgcgcgccggcacggtgatgtcggtgacgttcggcgtgagtttgacgatcatcggcttgtcggtcatcgggcgcagccggtccataagattggcgagggccaccgggtcggtgcccacgctcatgccgccggcggaaacgttcgggcagctgacgttgatttccagcatgtccgcgtcggagtcggcgagcttttccacgaccgccgcgtaatcgtcatcgcaatgtccggcgacattggagatgacgaacgcgcccgcggccttgagcttgggcaggtcttcggccaagtaatggtcgatgccggggttctgcaggcccacagcgttgatgttcgcggccggcgattcggcggtgcgcggcgaggggttgccctcccacggcacgggcgaggcgcccttggtgcatacggcgccgagctggctgacgtcgtagaaccagcggacggcggcgtactggaaggtgccggaggcggtgccgaccgggttcttccattccagaccggccaccttggtgtggtgcttccacacgtggggctcgtacaggttgatgtggttgtcgctgccctgcgcggactggttgtttgcgctcatcgtcactccccccatccgagctgttcgcgagtgaacacgggtccgtcggagcagaccttgagccggccgtccacggtgtcgatggtgcacagcacgcaggtgccgtagccgcagcccatgcgctgttccatgctcagctgcgcggggatgccgcgttcggcggcccaagcggccacggccttcatcataggcagcggtccgcaggacaagatgatcggcttgcgatcgtaggccttcaggtcgtcgccttgttcgagtttgttgagcaggtcgaccacgttgccttcggcgtcgtcgatgctccacgaccagtccgcgtaccgggagacgtattcctcagcgaagtggtcgttgcggtagccgaatacggcggtggcaaaggaggcgtcgtgttcggcgagcttttgcgcggcgtagattagcgggggcacgccgagtccgccgccgacgagaatgtagttggcgtcttccttgaggttgaagccgcggccgagcgggccgagcacgtcgacggtgtcgccggcctgcagccttgccaactgttcggtgccgtggcccacgacggcgaagatcacgctgacttcatcgccgtcgacttcgctgacgccgaacggacgcggcatgagcatgaagtcgtcgtgcgtgaacaggttgacgaactgggcgggcttggcgtgggaggcgatgaacgggtcgcggaatgtcagtcgcatcacgcggtcggtcagttccgtaacctgcgtgatttcgacgttgtggcgcggcgggaagaatccggccgcagtcgcctccgcaaccacatcatgggtgggggtgaaagttgtcatttcattcctattcagcacatcaagctcccccctatcaggggagctgtcaaccgcaggttgactgaggggtagttaaacacactcggctccggtttccagcccacactcacgtatagcccacagccggacaatctacctacctatatacggcaacccgcagattatcgcgcatgtcgagcgccgcctggcgcgcgctgctcgccacaaggtccagcgcctcgtcggcggtcatggattcggagtacttgccgctcttcttccatgcgccgatgatgccgcgcgacgagttgacgatggcgccgctgccctgcttgtcgaacatgcctgccacgtccgcggccgtgccgccctgcgcaccgtagcccggcacgaggaagaacgtgtgcggcatacgttcacgcaacgccttgccttcctcggggtgggtggcaccgaccaccgcgcccacgcgggagtagccgtggctgccgatggtctcggcgccccagccttccacgagatcggccacatgctcgtagaccttcgtgccgtcggccaggtcgagcatctgcagttcgctggaggacgggttggaggtgcgcacgagcacgaagatgtccttgtcggcttcggcggcggcctcgacgaacggggtgatgccgtcggtgccgagatacgggttgacggtcaccgcatcctcatgccacgggtcgaagtcgcccacgccgttcaggtggtgggcgtaggcggctgcagtggagccgatgtcgccgcgtttgatgtcgccgagcacgtagaggccctgctgggccgcgtattcgcaggtcatcgtgtagatgtccacgccggcggggccgagcgcctcgtacatggcgatctgcggtttgacggcgggcacgatgtcggcgatggcgtcgatgatcgtgcggttgtattcgaagtaggcgacggccagctgcgcggattcgatttcctccggggattcgaccgagtcacgcacctcgtcggcaaagctcgccacgacctgcggcggtaccaacgcctcggtggggtcgaggcccacgacgctggggttctgagtgttgtcaatcgcttcgatcaggcgatccatgctgctccttatgttatctacagacggctgaacatcagctgggagccgatgatcgtggcgagggggcgtccggtgacctgccagccgccgaacggggtgttacgagccctggagtggaactgttcagggtccacggtccattcctcagcggtgttgagcaccacgaggtcgacattgtcggcgtcatccacgcggctcaggtcgagcagtcggttgacgccttcacgctgcggctgagcgtcgctctcccccgcaatcacgccatccggatcatccccagtgggcgcgggttcggcgtagtcctcgaccagcgcggccacgtcggttggcacatgccccatgagttcggcgggtcccacggacatgagctcgatcagacgctcatcggaaatgaagccgccgtcgacgagcaccttgtggcacacgccgtacgcgcattccagtccgatgatgccgttgggcgcctcaaggaagccgagttccttctctgccaacgtgtgcggcgcatggtcggtggccagcagatccacggtgccgtcggcgatggccgcgatggtggctttgcggtccgcttcggagcgcagcggcggattcatcttggcgagcgtgccgtacttgagcagcgcctcgtcgctcaacgccagatagtgcggcgcggtctcgcaggtgattggcaatccttcggccttggccttgcgaatcgcctcgaacgagatggcagtgctcacatgctggaagtgtacgtggacaccagtgcggcgggccgcttctatatcgcgggccacgatcttgagctcggtgtcttccggaatgccgggcacgccaagttcgcgcgagaccgggccttcgttcacggcacctgtatcgtgatgctcgcaatgctcgattaggtacaggtcggaggccttgacgttctccagcacctggtccaggatctccggcgtcacagcggaaccgtcgtcgctaattgcggtgatggggtgcgtgagcatggccggcgtcttggcgtcgtcctcgaatccgggcacgtacctgagccagtcggcaacgtcgcttgcctcatgaccggcgcgatccttggacgcgcacacgcacagatcgtaacgaaccggcaattgaacatcgtgcgcagtatcgtactgctgcaggaagtcgatgacgttgtcgaagccggcatccagaacctctttcgcaccggccgcttccaggtcagacacggtctgcccatccagtgccggcaacgtgttcggcatgatgagcacgttcgtgtatccgccggatgcggacgcgcggcagccggagaccatagattccttgtaggtctggccgggatcgcggaagtggacgtgcgggtcttcgaaaccgggggccacggtcagtccggtggcgtcgatatcggcaccgtcagccacggcggaggtgtcggcgaagtaggcggcagcggtcccgggcaccacgaggtcgatgacttcgccggtgttccagaccttgatgttgcgtagggtgatgctcacagtttggcttcctcgtcgcagtagtcgcagcggtattcgagccgttcagagtgcacgaggtggaacatctgcttgatgccgggctcggtggtggtcacgcagcgcgggttcacgcaggagatcacgccgacgatgtgctcgggcaggttcggctgcttcttttcgacgatcttgccgccgcgcaccacgtctacggtggcctggcaggccacgaagccgagcacgtcgaggtcgatgtccttgtcatcctcgattttgatgatgtccttggagccgtaacgcttggagttggcgttcatgatgagcgcaagcttggttttggccggttcgattttcaggtattcgagaaccttcagcgaggttccggccggcacatggtcgatgatgatgccgttctgaatgctggtgacttccatcaggcctgaacctccttggggttgagcggttcgtatccgggtagttcgtcgcccaccacggtgctttcgagggccatgcgcacgagcatgccgttcttgacctgttcgaagtaggcggcacgcgggtcgtcgtccacgtccacggagatttcgttgacgcgcggcagcgggtgaagtacggccatggacggcttggcgagctgcagcttttcttcgtcgagaatgtaggtgtcgcgcaggcgcaggtagtcgtcttcgttgaagaagcgttccttctgcacgcgggtcatgtacagcacgtcgaggtcgccgatcacggaggccaggtcgcgcacttccacgtaggagcagttgtcagtggcgttgatgcggtcgatcacgtactgcggggtcttgagctcgtccgggctgataagcacgaagcgcacgttgccgaagcggcacagggtctcgatcagggagtgcacggtgcggccgaaggtcaaatcgccgcacagtcccacggtcaggtcggtgatgcggccgaagcgcgactgcagcgtggccaggtcggccagcgtctgcgtgggatgcatgtggccgccgtcgccggcgttgatcaccggcacggatgcggcgcgggaggccaccagcgcggcaccctccttcgggtgacggatggcgaccacgtccacgtagttggacacggtcttcaacgtgtcggcgatggattcgcccttggtcacggaggccagctgcgcgccggcgaatccgatgaccttgccgccgagacgcagcattgccgtctcaaagctcaggcgcgtacgggtggagggctcgtagaacagcgtggccagcactcgcccatcgcaggtatgggcaacctctttgcggtgggaatcgatgtattcggccttatgcagcaggtcgagaatctggtttgtagacaggccgtccagcgttacgacgcttttgccgaccattggcgtttcttcagacaaggctcaccttttcgctcgtggttttcaggtggccacccttgtgtgacctaatataacttacgccatttttcggacagccgcattcaccgagtgttcacctgaaaatccaacgaatatgctgtgtctgtatagctgatatctgctttggaacgccagagctcattcattaggtcgatttgacgttcattaggtcactgcaccctcgtatctgttgttggaatgccgccattccaacaaggtatgcggcggcggaccgacctaatgaacgatgaatcgacctaatgaacgtagtgaacgcaatacaagaaaggtctatcgctgcgcgcggcgtcggttccgctccagtcgcggtgcgatcacgtgcatacgcgggcgaagcgcggtttgcggctgctgcgttgcggcggaggccgtggcggtggttgccgcagtcgcctcgtcttcggcctgcccgtagaacaggcgctggcatacgtcacggcatttgcgcatcacggccagcaggtcgttctcgaaatgctggccgcggtgggcgccgtagccgaggtagacggcgatgccgcccagcgaatagatgtcatcaggcagaatatcggcctggttggcgcgcccgctccacagatagttgccgttgcgggccgcggtgcacaacgtccatgccttgcgcagctgaatcgcatcgatagcgctgatgagcttcttggcctccagcacgtccaatgcctccaatgtgccgttgacgcgcagatctttgatatcgccggcgtgctggagctgcatgagttgcacggtccattccacgtcagacagaccgcccttgccgagcttcagatgacgttctcgacgcacgccgcgcggcagacgctcggcctccatacgggccttgagcttgcggatgttctgcaattcggcctcggtcagctccgtggtcgggtagcgcaacgggtcggcgatgttgatcaggaagtcccgcgccagttcggcgtcgccggccgcgtaccgggcgcgcagcagcgcctggcgctcccaggtcgaggcccaggattcgtagtattcctcgcaggaggcgtaggagcgcacgagcgggccgttcttgccttccgggcgcaggtccaggtcgagttcgatcttgggttccagcgtcgtcgggccttgcaggatgttgcgcaggtcttccacgaccttcttggcgaaggcgttggcttggccgtcgtcggcatcgtcggccggacggtagatgagaatggcatccgcatcggagctgaagttcacttcgcgcccgccgtaacggcccatggcgatgacggtgatgccggccggcgcggtttcgacgccgaacgcggcgatctggtggcgcacggcccaggtcagtgaggcgtcgatgatcgcgtcatacacgtcggtcatggccttgagactgtcggagtcgctgatcacaccgctcatccaagacaggccgatgcgttcgatttcgtggcggcgcatggcgcgcatggaggtggcgaactcgttgatgttcgagccgaaacgttccagcgccgagccggtctgcacatccaatgcctcgcgcgtgcgggcctgcagattgccgtcatcaccgagccaactgatcgattcgaccgacttgttgagcgcgtcgcccaggaatcgcgagttggacaggatgtggcacagacgctgggcagcggaggtggagtcgcgcaggaagccgaggtagccggattcggtgccgaagttctcctccagcttgcgccagttgagcaggcccatgtccgggttctggccctcgcccagccactgcaagacggcgggcaggatgatgcggttgattttggccgcgcgccccacgccggcagtgagcgcctgcacgtggcggatggcggcgtccgggtcgccgaagccgatggattcgaatcgttcctgtgcggcctcgacgctcagcacgatctggtcgttctccatctgggcgttgaccggcagcatcgggcgatagtagatgtcgaggtgcaggtggcgtacttcgcgacgggtgtcgtcgtatttgtcgacgagttcttccgggtgcaggccgaatgcgcgggcgaggcgacgcagctcctggttctggttgagctcatccacgtcgatgtcgcgcttcttttcgaggcctccgaccgaggcccggccgaggtccgggaacaggtgcgtgcgcttcagggaccagatctgctggcgatgctccatcacgcgctcgaagcggtagtcctgggacatgcgcacggcctgtttgcgcgaaacgtagccgccttcggacaggcgctgcagcgagtcgagcgtgttgctggtgcgcagcgattcatcggtacggccgtgcacaagctgaagcatctgcacggtgaattccacatcgcgcagaccaccgcggccgagcttgatttcgcgatccttcagaggtgcgggaatcagatcttccacgcgcttgcgcattttctggcagtcgtagacgaagttcttacgcttggacgcgctccacacgaacggccgagtcatatccatgtaggcccggccgaggtcggggtcgccagccaccgggcgggccttgagcaacgcctggaactcccagttctcggcccactgctcgtagtagttcttgtgcgaggagagcacgcgcaccagcgcgccgtccttgccttccgggcgcaggccgccgtcgatctgccacagcggctgctcggccacgcccatgatggcggactggcagacacgctgcaacatggtgcccatcttggtgcccacgcggatcagcgtctgatggtccacgtccttgtcggccggttcgaccacgtagatgaggtccacgtcggagacgtagttcagttcctgtgcgccgagtttgcccatgccgatgatggtgaagcgcacgtgctcgctgccctcggtttcgtggcgggcgatggccagcgcgccttcgagcgccgcgtccgcgaggtcggacagttcgcggctgatggtcggttggatggaggccgggtcgtccgccacggcatcctgggcgatgatggcggccagttggttccggtagctggaacgcaaggccgtggccgcttcggccagatccttggaggcgacgggcatggccggttcgtccgggtccgcgccgaccgccttgagcagacgtgcacggcgttgcgcgtgattgaacagatggctgttgcagttgtcgactgctgcggcctccacaagctgcggcttgaagcgcatgaacttgcccatcgcgtcggagacgccgagcaccgtgaccagacgcttcagggcgtcgttgtcggggatgacgtgtttcagatcgcgctggctggattgcatcgcgttgacgatatccacgaaattgctcaatgccatatcggggtcgcaggcgtgggccagcatgctcagcagttcggtgcatcgctcatcgggaatgtcgtccgccttgagctggtcgaacaaggtgcgggccttgtcgaggtcttgcagacctgccctgatgagatccatggagctgggtttgaacatcgacgattccataagattccactatatacgctcatgccctccgaatggggcatgagccgggaaggagtcatcgggcgacgctgatgagctccgaggaatccatatcgtaatcggccatggcgtaggaacggatggcggggtcatcataggtgttcatgtaataggtgttggtcttggacgaatatccgctggtgaacagcgtgcgttcgaactggccgtcgcccatcttcgccatgccgtccaccatctgcacggagccgagggtgtggaacaggcgagacacattggcggcttcatcgttctgctgcgggtaatgcgcgttggtgtaggccacacgaacgaagcgcgacggggagctcacgtcgcccgggatgccatgcatgcccacacccgcaccccaggcggtcaaggaggccttgccccatgaagtcggttcggccatctcgttgctgacgcacatgtagttgcgcagattttccatatggaagtcgaacgtcggctgattggtcagcacatcgacgtcatcatgatgcacgtgcatgccatcggccatctgctcgacgacgatgctgcgcttgccgtcgccgatgaaccagtgcagcagagactcctgctgtcccggcacgatctgggagacgagcgtcacgttcctgagcgcctcctcgacctcgtcgacggagtcgaaattacgcgccacccacagcggaaattcgaacgtggcgacgttttccgtgccttcgaccggttcgtggacgaacgaggcgtagccggggaaattcaagccggcgatggccagaccatgctcattggcgcagtcgaaatacatcggcctatcggccatgaccacgcccacgccgatcaccgcgttcggcttcgccttgccgcccgcaccgaacaccgtgtcatagtggtagccgcgcggagtgaccaggatggtctccccatatgagaaactccagtcgagattacggccgaaataggtgttgccctcatcatcggagaaacggacaccagtgcacataacggacttccttccatcgctttggttggcttgtacgttcatgatacccatcggccgctgggggaactctgggtttcgccagcagattaacgtgcggcgcgacgcattgagatgcgccgcgccgcgatatgcgtcaaccttgcgtaccgaggaacaacggttccgtattgcgccagatacggcgcgtggtggcggggtggttcatcgaatacaggtggacgccgtccacgccgtgggccacgaggtcggcgatctgctcggaagcgtagaggatgccggcggcacgcagggactggatgtcgtcctcccacttgttcagcagggtgttgagcttgtccgggatacgcgaggcgttgcgttcggccatgcgacgcacggacttggcaccacgcaccggcatgatgcccgcctcgatcggcacggtgatgccggcggcgcgcgccttgtcgaggaagcgatagaagtcctcgttgtcgtagaacagttgggagatcaggtgagtgacgccggcatcgaccttgatcttaaggttttcgatgtcctggtccagcgagtcagcctggtagtggccttccgggtagcaggcgccgaacactttgaggcccggcttcacggagcggatgtatgacacgaggtcgctggcgtggttgaactcgcctaccagctgctcgccgtcgatgtagtcgccgcgcaatgcgagtacggcgctcacgccggcctgctcgaacatgtcgagggcctcgtcgattttcgccttgtcggagtacaacgcggtcaggtgcgcgactgcgggaatgccgtactccttgctgatcgtgtgggcgatgcgcgcggtggcggtgcggtccgaatgggtgccgtggccgtaggtcacggaaatgaagtcggggttcagcccctccaggccgtcgagggtgtcatagatggtgtccacgggagcgttgcgcttcgggggaaagacctcaagggtgaacatcggggaatgcatgctgatttccttacataaacccgagctccctcatac
